United States Patent Application Publication US 2013/0096032 A1 - sequence listing, part 29

SEQ ID NO: 1014 - DNA, 98471 bp, Arabidopsis thaliana
gaattcttcaccgtgatattaaaggctcaaatctcttaatcaataatgaaggtgtcttgaagattggtgatttcggattggcgaatttttaccgaggtgatggagatctgcagctgaccagtcgtgttgtgaccttatggtacagagcacctgagctgttgctcggtgccactgagtatggaccagccattgacctgtggagcgccggctgcattctcactgagctcttcgccggaaaacctattatgccaggacgcacagaagtaatgaactctctaacacctctttagtttgttaagaacagtttttgagctcaggctttataattcgacgcagcattcattcaaattctgagactcagagtcttacttcttatagacagctgatgagataattatccttttttgtttatcaggtggagcagatgcacaagatctttaagctctgtggttcaccctcggaagattactggagaagagcaacactgccactagcaacaagctttaaacccagtcatccttacaagcctgttcttgctgaaacctttaaccatttcccttcatcagctctgatgctcatcaataagctactggcaatagaacctgaaaaacggggatcggctgcttctaccttgaggagcgaagtaatagatcgatactaaccagaaatccatgtttcttaaacaagttattagatacatttctcatgatgagtttcaatctttcttctcttcagttcttcaccacggagccactccctgcgaatccatcaaacttacctagatatccaccaagcaaggaacttgatgccaagcttcgcaacgaagaagcaagaaagtaaagctacatacatcttcattcactagtctttctcttgggggttttctgatgaaagttttgtttgcagactaagggcagaaggtaacaagagaagagggggagaaactgtgacaagaggacggccaaaggatcttaaaacagcccagacaccagagtttatggctgcaggacagtccaaagtcacatgcataagccacaaattcaaaacagacgaggaaggtggcaccgggtttaggatagaaccaccaagaagagggatccagcagaatggtaaagctcatgcttcttcaatggttcacccaacagtggctgatacagaatggaacggaggtggaagcatcaaaagacaaactaatgcagagatgaagtctaggacatctcaaacaggagacttgtctggtgaatcttataggagagatcccaacagagattactcaaccgtaagtctctcctcttgttatatcgtgtaccttaaaccttttggtatgtaattattaagttgctttgggctgtgtcatcagggcaatgcaccaaggaaaaacagaatcaattactcaggaccattgatgcctcctggtggaaatcttgaagatttgcttaaagagcatgagaagcagatccaacaagctgtccgcaaagcacgtgtagaaaagtctgcatcaagaaaaaaccaagctttaacaggacaacaacagcagcaacgttacacaggaagaaatgctcggtagctgaaaaagggaacaagaagccatagaactcataagcgtttttgttgttgtgcctcttctgtgcttgaagccagggattgatacaatgtatagtcgaatttgtttcttaggccaacaagattgactacactataatgtcaagctaccttttgtatatacacaaggtctctctattgagttgagtcaaacaaacaaagatgtatctgcaagggaaagcaaaaaattccaaatttgctacattctatgattctagctcagctcaagtaattaaaacctaccattagctgaaaatctcataccacataacctctgcaacaattccacatatcaagctaaagctactgagcaaaaaactcacgaggaaaaaaaaggctgaattcttgagaaattagcaaacttttttgcataaacaagttcgctctgacctagctactgagtagtgagtactgagcaaacattccacgagaaaaaaaaaaccttaattcttgagaaattcgaaaactttttgcataaacttgaaaagcttaaattagaatcagataatgaattcttcaaaccagaaaaacttcaccgatattcccaaaaccaaatcatatgttttcaatcgaaagactaataaacctaaaccctctgttttctatttcccggcgaagtggccggcgatatcttgcttttttgtaacctctgttttctgtttggcccaaatccagaaaagcccaaagcccatttgggaagatattaataaaaatattttaattaaaaaatagacgggtatgggttcaaagacccgacaacgtacggtattcgggttacatatgaataattcgggtatatatatgtttttaaggattaattagaaacaaagagattacagtaatatactatgtatggtcaaagttgaaactcgtaaattgtgaatttgtgatgttactagatgagctgataattttttccttttttttttgcaaggattgaatccaaatctcttatgatgtttttatttattttccattttataagtacaagactttattatacttttaaaaaaacgtaaagtataataaaattgtaaattttcaatgcgtacttaaggaaagtcgttaaaaaaaatgtaatatttaacaggatgtcaaaaataaaacatatttggtcatacttgcatattttactattgatgatatccttacccacaaaagaaaagtaatttgtctggtttgaaaatcttataatttatgtattttttataaattggtaataaactgtgtaattatatgaaattttcttagtttaaattgttaatgatttgtaggcttattgaagtgcgaaaaagtcgggatgagtaaggctagaaatgttagtaaagaagaaaatatctgaaaacaaaataaaataggcaatgtcttgcttaccgtgaagaggaaagggcattaacccaatgccacacaaaaaaaaactgaatttcgtaggccataattttttcatttttagccttatgtatttaaattgtatagtgcatagtgagtatttgtttgggaagtccacacgctatgtattagaaatttatgcacatgctaatggaagataattttaataacataagtacataactaaaataacgaaaatctcttttggaataatcaacatattaaaagaaaatgaaaattaaaaagaaaaagagaaattgattttgtgttatcaatgggccacttaaaaaaaaaaaattataaacaaaattagtagtaaggttaatctttgtaaccgtgtcttcttctaaatcataaacttctttttttgcttcaattttataagagtatttggctatcatatctatagagagaaaattggtttgataactacgtgagtttgttgaataatttttttaaaggaaagatagataaatagtggtttgaatattttattttctttcatcttatcactatcgaatatgtttttcgttatttggattatttttttaataataaaagccacatttgtttattcgccctaagctatatttagccttagcacgacactgaaaatagaaagagaccagagtcgttagattttacgagtgacttctaacttacgagattaaccgcagactggttcaaaagaccatcctcactttcctaagatccaagtaatcaaaattcactttcactcaaatcacctctctatttaaacaacaacaccactttttcaatcctcattaacaaagttaaaaaaacaaaacaacaccatcttcactttttttttttcttcttattttttgttttctttctctatacatattgtatcaaaaaataaatacattttcctgtattttattttttttgtgagtattaaagaaaacacaagacaagaatgacatacacagcggtaactatgctctctctctgcctaataaatatcttttcatcttatggcaaagagtgtcgagttttggcccgacttgtaatgtagtttcatcaatgagactcttaacattatatcatatcattgcctcactttattacattttttgtaacgttacgcgctgttagttctcttaattcattatattaagcatgccaaaataccttgatcagaatgacgaggagaacaaaggaagatcaacggacaataacaatcaccgtcaaatggattacaacgattggttaccagtcacagcgtctagagaagccaaatggtattactccgccttccacaatgtcacggccatggttggcgccggagttcttggtctccctttcgccatgtcacaacttggctggtaattttttaagaaatgtttaaatttgtctgatcttaacttcacaaaataaagtcgtaatttaacgataaatttgttgctaacaggggacctggacttgttgctataataatgtcatgggctataacgttctactcgttatggcaaatggtacagttgcacgaagccgttccagggaaacggttggaccgttaccccgagctagggcaagaagcttttggaccaaaactaggttactggatcgtcatgccgcaacagcttcttgtccaaatcgcttccgacatagtctacaacgtgacaggaggaaaatctctcaagaaatttgtcgagcttctatttccgaatctcgaacatatccgtcagacttattacatccttggattcgccgcgcttcagcttgtcctctctcaatctcctgatttcaactccatcaagatcgtctctctcctcgccgccctcatgtctttcctgtattgtcaccaaaccctaaaccttaacaaacaaaaaattcttcttttttttgttttctaattatttataaggaaacttaaacttgttgcagttactcaatgatagcttcggtggcgtcaatagcaaaaggaacggaacaccgtccttcaacttacggagtcaggggagacacggtggcctcaatggtctttgatgcatttaacggcattggaaccatagcgtttgcgtttgcaggacacagtgtggttcttgagatccaagcaactattccttcaacacctgaagtgccttccaagaaaccaatgtggaaaggagttgttgtagcttacataatcgtcatcatttgttacctttttgtggctatctccggctattgggcgtttggggctcatgttgaggatgatgttctcatttccttagagagaccagcttggcttatagcggctgctaacttcatggtttttatccatgtcataggaagttatcaggtctagttttttccttatctttttggtcccttagaaaaactctccaacttttattaaaatgatcatcttgacaggtttttgcgatgattgtgtttgacacgatcgagtcttatcttgtgaaaacactgaaattcactccttcaacaacactgcgtctagtcgcacgtagtacatatgttggttagttctcatttaacttcttttttactcatttttttcatggagaaatggaaaactaagataattcttggtttgtgcagcattgatttgtcttgtagcagtttgtatcccctttttcggaggtcttttagggttcttcggcggtcttgtcttctcatcaacctcgtacttcgtaagttatacactacaaaaaaaagaatgaacatataactctttgcaaacactgtatgggtaatgatacctctttaatatttgcagttgccttgcattatatggttgataatgaagcgaccaaaaagatttagcgcccattggtggtgttcttgggttagtctttctttcttaattaaacgaggcttagtcacacaatctaattgacccaataacacttaaatccgtttctttaactaacaggtagcaatagtcactggtatctcgatagcgattcttgcgcccattggaggaatgagacacattattctttcagcaagaacctacaagctcttctcataggcttcaaataaaaagccttgcaaccaaacatcacaacaaacttataaaagttttttaccttttttaacttaagttagccttctagttggggaatatataaagttagttatttgattatttggattctcctttctttttataaccctttcatcaagaactgccttcggaattgttgttaaggctttacgcgcttggcttgaggctgtgacggatgatgttctctcaaaaacttcatgacaaaaaaaaaggaataccatacaatatgtggtcaacctcaggctctgaactttcaggttttttggtttttagctttttttttctttcctctttttcttaagtctttagattttctactgcaggttaaaaaaaaaaaaaagcctaaacggctgtatcagaactttttgttttggattgtaataaaacatctgaataaagagattggctttaccgttttaccgctgttgaatttgtttttaaatgcatatcaacgaaaccgatgaaaaggagaaaaacagagatgtacatgcaaaacagagatgtaaaacagagaacctgaaagatgtgattttggcatggtaaaagaaccaacttttcccacatggcttgagccaaacttgcccaaatatgaagcttcactgatgaaatcacttcagaaacattgagtgggttttggtgaaggagcttcataaaaattatcaaaaacaaaatctaatgaagtttcctagagaaacattttacaatcaaaatataaattattgactatacttttgtttttattagagtaaaaatatagtgttgtaatttgtaactgctatatttactctttaaccttaattgggacctaagctgatatgacaccacaaccttaattaattagaaaaattactattgttagtatcgacgaatcaatgcgagtcacaccaataatcaaaccacaaaacatggacaaagctacacaagaaaaatcaaaatcttttgtctctttgtcccctgaagaccataaaaaaccctttctctgcagtaaaaagctttagtaacgtctctcacttaagcacaatctctctgcatctctcaatgacgacttatctcccatttccgatgaccacgagactcatactctctagcttcgtctctctcgtcgtactcactctcttcttcatcaccagaaccggtttctcaccgtcatcttcatttcatcagcctctgaacaacactctccggatctccacttcctccaccggcagtaaattacagagtccaagaagttgtaataagatccctccttccctcgccgatgctctcgtccactatgcctcctccaatgtcactccccagcaaactctctccgaaatctccgtcaccaagaaggtaacaaattaaagtatactatttaattatcacaaaaaaaaagacttttgacatgcaaattaaattgtaaactgtagattgttaattgatatctaaatgaagaactcaattcgtcatctaaattctggaaaaatcaaatatgattagcaaattaaatgaatctagtctaatcttttgtactaatgttgctaccgtaacataagtttagtagtccggtaatgatgtgaatttttagtcttttagacgtcacaaaaaatgagcaaatgaccgtagttaaattttattttacttttttactagtaaattgttgtcgtattgtataagataagtgtaaatgtgaattatagatgatacaaattaaattggatcaggaattagagaagaaatctccgtgcaacttcttggtatttggtcttggtcacgatagcttgatgtgggcgacgttaaatcacggaggaagaaccatcttcttagacgaggacgagtcatggattcaccaaatcgctgagaaattcccgtctcttgaatcgtaccacgtccggtacaagaccaaggtaagagacgcggaagctctcatggctgctacgaaagacagagaagaatgccgccgcgtgtcaactgatcttagggtttccacttgcgagcttgcgttgaagggcttaccggaggtggtttacgagacagagtgggatctaatcatggtggatgctccgacggggtttcatgaagaagctccgggacggatgtcggcgatttacacggcggggatgatcgcgaggagacggaaggatgaggaagagacaacggctgtgtttgtgcatgatgtggataggaaagtggaggatgagttctcaatggagtttttgtgtagagattacatgacgaagcaagagggaagactccgtcatttcacggtgcctagtcaccgtaactatggtgtctccggcgttaaattctgtccttaaccctatccgccggtataaacaatttctggttggatgatgcttaaatacatatcaagaactgaatctccgaagctccataggcttcaggattagtgtgatttattaaaaaaaaagaaaaagattgtgtgttttttgtaattttataattgatgatatttaagaaaacaaaggaagcaacgatgagtacattgatttggaccgttaagtgtgacacagtagacgttttcaaaacgtcttaaaaggaaaacagatttgactcaaaaccttacaaaaaagaaactacaaagacaacaccaagtttttatgtcttgttgatagtcttcataatcgttaattgagactagccaattgctgaatgttgatcgggtacgcgacagtgcggtcaccagcaaacgctttctttgccattatgagattaactttctctgtaggatggaaagcatcccaaaacacatactgatctctgttaggacaaggcgtttcaaagggaagacaagtgatctgtcctctgttttttcctattccacaacatcctttgtccatagtagtaagacctatagaacaacacaacattaatagctatagatattagttagaggttatttagctagcttaacgtttgttaattacgtaccataagctgcttggttagcaacgatgtcttcgaacatatgagcgatgtcgaggtaaataaatttagcatccgggagattctggttgagattagagatcattgttttaacgtttgtgttgaaaggaagaacaagttggttcacttcttccgagcatttaccgtcgtttccttgagctagaatgctgggaatgcaccccattcttccaagtccggccactacaaatttccgaccaccaagattatatagtctctgcattaccaaaaaaacaacaacacattttgattatattttcgcttcttactcgattagtactatcaattaaaattagagatcattcttttgtttttgttgtattacggtgagctgatcggtgtaatgttgaaccaagagatcaccgaactgttgggagttgtattggttacgggtagggaaattgggcatcaagtaattgttgagatagtcgttgcttcccattccgatgaagaacaagcttcgagtcaccgaatccgcaatggccactgcaccaccggacttgctcgccacctgatctagtgttgtctcgaagttatgaatctgctggtcgaaaggtatgcgtcccacctgaccaccagaacataaactccacgttacattattaattatcgcatttagcaggagcacccacaaccatttttcttggtacaatatgaaaccacaatgttgctcttgaacatagctcatgtgatgtgaccaccattgaaaatatattttctttctcaagaaaaaacgaaaaaattgaaagtattttgattgattttgaataaaaaagatttgtcacaatttttctttatgatcactaatttttttaaaatcaaattagaaacgatttcattaagattttaaaatattaattaattttttgatgtttactcttgtttattcacaagctcataacagaaaatagatacacttcagaattatgtaagttatttatagtacatttattagaatccatttagaattatttaatacaaactaaaatattggtcggctgattagtagatacaagtatatctatgcttaaaaaaaaaaaaagtatatcaatgctcttcggataacttacatttcttacaacaaatagtaaaaagagagtgtatatgtaactatgtaagtatgtaacatatatgcaaccttttcttgttaaggatataacatgcaacttacgaattgatttacttttttgcataaaagctacttacaaagtttcctccggtgtcaggaagaatccccgcggctgcggaagcatagttgacaccacgaagtacttgatctccggtagcttccgagtaggccggaatcagtggcagccccaatagttgagctatacgatcaatgcatgcatgcatcatatataatacttatatcagcctcgttccagttttaggaggaaggaaaacttattataatgcatagagtgaaaacttaccaatcccatcgaccatcgttaagccattgcagaatcgaccggtcggaccgccattgaaatcaatgccataaggaaaataattggctttggcaaaggaaggaatgttattgttattcccattgtctattagagagtcaccgaagacaaacagcgccggcacaatgccatcaccggtgtttaggtcgaccagcggaggcggaggagcagaaataggttcctcaaccacaactagttggccagagacgccatgaaggagttggagaaccacggcaagaagagctgagaagaagcaaagtcgccggaagtggaaagccattatgaagttgtttgtgtttagtaaggtgtaacttttaacttttgtaggttgattttggggtgaagagacaaatagatttggacagatttatagatagatgagaagggtttggtgaagagtaataaatgtatttatccgtcttctaccacaccgtaataacacaatcagtggtaggtgagttgtctacaatattacttaacattattgtaaacatgtcattttccatagccagattttttgagaaacgtttaaattgtagctatcggaaaatttagcaattagtgtattttgaaaattacatatttagaattgagatgcaaaacaaaatgtgtgtgccaatttatgatgtgtttactgtttaggccgtatcaccaaaacaatcattcattcttttttctttttttattctataattaatattagtttaacaaaagtatttaagttgaaatatatgatcaggatgacataattattgatttggtgaaatgcaagccagcacaactaaaaaaaatatcatttacttaaacaatcgatttcattaagctcattatataaaattcctgtattttttttttcacatataaaattcctgtacatgatgaactatttgatcgaaagaggaaagtaaaccagggagaagcgatttattaaaaaacatttcttaccaaataaaaacattgcatttaaatcgtcgttattctcaaagacgtttaataagctgtcacggtcaaatcgtgaagaccagttatgtcgaagacgagggcagaaaaagcaacaaataagcctcttctattacaaatgatggttgtagattttagcatgtcattaaatttagggttgactttaatgttttgacttcatcatatacgcgggacccaataatatggtagtctttttaaaccaataaaatgtatagtcccatcgtatgttaagaacttaagatacaaaaagttttcacatttctagatttgtttcaaatttcatgacatgatcagttacgttatggaatcgaatcagagaagctttagttgtgtcgaatttctattttccataaagtatgagttgtcgacattataattttcatcatggataacaatgtaaaattattaatttaaaaaaacattgtaaatatacactgcaaaaagaggctaggtatcttcagttaaacccaaaaccaaataatccataaattcaaaacatagatagaaagtagaaagagttataagtacacaccacacttgcagtcatttcatcttcacaccaacaaatgtaaaacaagaggataaaacatacggatagattttcaactgcctagcgaagttccacaggctttattttaattatgtgtgatttaacaacactatattatacttaccaaggttatttaaattcgtgagacatagtcttcaaataccctatggtctagaactgaaatatttcacttggcattgttagcggataggaatagtttgtctccatgactgcgaagttagcatctaatatgctattgttgttttcctctatctgcatttaattcaccaacaaaataaatcattagacaatagctaagcaaaacactctaaagatcatctgaatagtgcgactagataattctgctgatagaagtttcataagttgtgctatgatgagatcatacaactgattttgttaccttttcgaggagatacttgttggtgtttttgaggactccttcctttaaatacaaaaaaaaaaaaaaaaaaactgttaaaaatttacattaatttaatataattgctataaagctgaatatacaatgtgttttttttttttgaaaaacatttgttttttttgcttaccttgttcctcaatgactgaatttcttgaagcataacatccatctgcaaattttacataaaagcttttctagtcaatcattttatattcactctccctaacatttgcactaaatatatgcatgaaaacatgtatacataccttagcagagcgaatctgagaaatccaatactcaagatgcttctcaagcaaaagaagttcttcaagattcatagccccatctcctcctccaaacatatagctgaaatccattttaaatgcatttactcatatatgtataaatttataacccataagtaaggagatagcatgcaaataatcagtataccttatccctttctgaagcatctcaatctcttgcttaagcacgttgatctcatctttcggatcctagagaattataaacttttatttcaatgtttctatacattatttgtaaacatatctaaaagcgggtgaatttttttgaagatgtcgaattacaaatagtgacccatgttggtacacacacacacaaacatgaaatacgtatatgcatcaatatataaaataatagttcaaagcgtgtcaataactatagtttaggccttagggcaacctttataaagtggtcagatcaacttttattaaaagattgtgctgattataaaccaataatactacttcattccgaaacacaatgcgattgaataaccagagatataaaatattaattaaagtgtaatacattgtctctaagcatcttttactttaacagtaattactttgacttgtttcgtaactattttatgatagtacaacgttccacaacaatgtcagttcctctcagtagtcaacaaattaaaaattcggagaattggagagctaggtgcaatgaatgttgtacttcactaactattttcatgtatagaatcagaatcaggtgccctacctaacttccctgagtattttaatttcaaatcaattaacaacgtccaacagattttccctctgcatgtcaacacgtgttagcatgttgcacactaaaataatgtttatggaacaaaaagactaaactaccccttaaaagaatgaaatggaaagaagtgaaactactgacgacgaggcactagttttaatatcaacccaaaaattctatttaaaaaaacaaacacatacgataatcaatcccaaaaataaagaaaaactcgatgaaagtagatactaattaatgagaatgaaagagaaagtagacgtacaagatttggtggttgaagttgttcttgagcagtaaaagtagcagaagaagaaccacgaccaccaccagtacacttcatgtacttatcaatcattccctccattgttctgaatttataatcagatttacatatataatatatgttactctttagtcacatgtatatatatgaacactaagatatatatatgatataatacgtaccctttagtagcgagctcaaagagcttgccctgaggagagaagatcacaacaccgatctcggcatcacagagcacagagagctccttagccttcttgagaagaccagttctcctcttgcaaaaagtcacttgtctgtgaaccgggttctcaatcctcttaagctgaatctttccacgagccatctctcaatcagaatatttccttctatctgatgatttgacgtttgggtttacgtttagagttggatttggttttatgacttgaaagttgaaacgtgaaacaacctcccactagtttgaactagcttcgaggttccccacttaactctttggtttctctgtttcttcggagacaactgtgaagttattaccaatctcatgccaccttcttgtctttatatataatctccattatcatattctcccactaacttcactgcttcttaaagcaccttttccacatcagcctcattttcccttatatatgtatgcgctcatatacgttatatgttaagtatgcattcatacaatagtatatagctttacatgcgaaagctccgtctttctttgttattataaggggtttgtattgtactatcccttcctcctctagcttgtagtataatttcctaggtttctttttgattgattgatgttacatctgatgtgacatatgacctgacatgcactattgttacaatatccaaatatatttaacaatctaatttggtacaatttacattctacaccaagagatggaggctggatttgatatgtgcaagactatatatataaaaaaagattgagttcccaaatggcatgcgattcactttcttaaaaaaagaattctttgttttattttttataaacaaagcgttattatgtgaaggatttagagtaaataagagttcaacaatgaaacaaaaactagttctgttcctagttaaacattcatagcatctttattcatagcatcatttattttgcctcttatatttactaatgtatagttctgaatatatctctgcacgtacctctcatatcttatttactttaactggatccaaagatcgaatatatttattttgggttgatgacttgatgtaaatcattaaaaatacataaaatttcatcttaaaatcaactaataataaacaagaagttatcaaaaaaaaaaaaaaaagtgggaggtttttgctctattgattaagcaaaagtttaatgtatttacactatcgaattaccgtccgaataataacaaaatatattatatgtatatatttttgttattattaaaacgaaccatatttgatctagagttgaaactcacatgatctctatttagtgtctaaatatgaaattcgattactagaaaatataaagcagactaatagaaagaagtttacaaagaattttcattgtggtatatatagaactgctcatcattattatgtcatgttaaaaatccatggtgagctttttattctgtattttttttttttttttcgtccgagctttttattctgtattgaattatacatttctcacatttaacgacgtggaattcttaacccattttaacaactaaaaagaacaattaagtgatggtcattaagcatacttagcccatattaaagcgggtatcatgtgcatctcatcgtggtggagaaccaatgacctgcccatgttaggtgccaatgtagccttttttttttgttaggtgtattaatttattgaatttcacctttttgcttgttaattgattaagtaggtcgtttttctcctttctaaatatttttttgaccatcttgctttgcctttggtctacataacaaactcctgaatcttattcttcttcaacattacggggtttttcaactcacttttttcttggaatatgggatttttctcttatttctgagtagaaaatccaccttatattcgacatcaatatttcaaagaaatacataatacattgaaacatagattgatactctgtaacgatggaacttttttggttaaggtcactaactggtattctgtgagcggtttaactcatcatataacaaaagactcacagcttcttttaccaaaaaaaaaaaaaaagacacagcttttagcaacgttttttacgatggtattttttagcgtggattatatcatcaaatttaaatttcaccatgaagaaagtaaggtttaatcaaactagaattaaataacattttccatggactaaatccccttagcagctaattttttttttttttaatatagctaatgtaagagtatattccctttaactaatttaatccatctttacagaatccataactaaaaaatatgataatttcgtggtgattgtacacatttcgatttattttttttgttgaaaaggccaaggttagtattcaaaatagtattagaatgggattcctctataaataatttacatttgccattacaacataaactggtgtggaaccaaagttctaaactattgaaatctagtcaaaatatttcgctgtcaaaatatgtattttggacattttgatttcgatgcttccaaaattgaaatgattgatcgttctaaaaacagtttaaactttaagaaagagggtcagcttaagtaaggaagaaggaagtaaataaagaatctttgtcaaatcaaaatgcatcaaacatgcaaaacgcaaaaagtgtgtgatcgatctgttgcttctttttcctcgcatctttgcgctcattggctcgatcaagatcgtatctatgattgacacttgtttgattttcatgtcttttaggggcataaagtttcttttgattctccactccctaaaatttatttatttctttgtatattatttatcctaatgcatgcttttaatttaactatgagcttatgtgcattgcgatctgagaaagtgggtttctttagataacattaatatatgaattaattgatatatgctagaaaaatctaactagtattgttagacattctaaccaattatttcttcgaatatatggatcttacaataagaaaccaactaaactttcatattttaatccaaagtaattccaaactttcaactattaattcttatttcccaaaactcaacggaaaaaaaatcagcctcaagtttaaagttcatttacttttttttttagctcttttaatggtcaattttcgtaaaaattagttatatacactgttttttttgggtaaattagttagcatatctatttcacttaaagaaaacacaatacatatgtatttaatatatatgatgggtgtgtgtaagaaaggattaaaagaaatacaacttagatattagttaaaatctttgaaccaaaaaaaagaagaagaaaaagatattattaatatctaatcgacatggagcactaaaattatggtcccatccaaattgaatctttaaaagaaaggacaagatgccttatgataattaaggttgccctttaaactctatcaatccttagttaattatgcactatttcttgacatatatttattttggggcaattattttagaattgatttattattagattactacaatgctattattgcaatttaactgctatacctttttatgtgcaaattttaactgctatatcaaaacatgattttatccttgttaggtcaaattaaaatacatacatgatattgagttattggtataagtgacatgagtagacaagattcaggaatgattaaattgaaaaaattatagtttgtagttttgtacaggcattaagaaaatatagctaagaccaaggagaaagctatgacgtacaaaactgcatattaccacaccaaaactgcaaaatatctttatgtaattggggaaacacataataatataattatcataaaaaaattgattcatattttctaattgaaaatttagatttattaaaagaaattagttggatcattaaaaatgataatcaacaactgaccgaaatatacaaattaacgaacatagccagtctttcacaaaaacttttatatctccaataaacatgtagaggtcaaaagtgtacacataaagtttatagataatagccaaagtttattcttgataagagaattttgaccacaacatagcgatcttgctcagccattggagtttcgtgtaatgttaatagtgttttatttatatataaaaaatgagaattcaattctctttaatttttgtgttttctttataatattgaagggtcttaaaaataaatgtatggtttagtttagcttgtaggctaagagcaatgtcaactgcgttaaaattttaaaagaaaggatgagacgtttttcttttaggatgaaaatattaagtgatataacgattataacaaatatgattggtaatcattaccccgaaacacatccaaacagaaatcagttttccactgattcaaattttgcttaaaactggtgtgtatatatatattaagaagttggtgtaataggtacatgttcagttatatattaaaaagtagttataaatcatttattcctaagttcttatgatgtgagagaaaaaaaatatctctaaattaaacgttctaacacgatcagaccagacatatgcatgattcaaaagctctaagacgatttgtatataatttagatgttaattgtaattatcggtaatgatgcgaaattggatgcagtggagcatctagccgtccacaatatggtttaacagcttatagaatgaataatccgtacaccaagttggtatataataaactccaagttgatttagttaattgaaatttacgtacgcttttgctttttttctttcgttctattttatggaacaatgttttatgattccaacactaatattttgggacatatgccgtatttgggcaaaactataattcaaacaaaaatatattattttccttttctcccaaaaatcatgacatattgatatttactttatgcagctatattttgaaatcaatgctcttccatactatataacgaagtaattctattatgaaccattaatgtcagctgcaataaccataatttctgattatctgttatgttatttaatattatttttataaaattctaaaactacaaagttatgaagatgaactcataacaactccagtctccagtgtattcgttttatcatagtttctcatttccaatcgactgtaaataaattgtgtagctaatttgatctatacaactattatttttattaaatatctatatttaatcttattgtataaactttttgttttacagccgacaattttttttttttttaatataaaaacatcaggttttgatgagtgatctgttaacagggaacggtcctacaaaaaggaacatagtatactcttgattttattaaatttaaaatctcaatttcagaattttcttacaaagacatattcgaatagagtataaactaccacgtgtcatctttcagtcgattcaataagatgatatcccaaaggcttatagccaatcaatcctgtgattctccccggctaatgtcctagtatgcatgtgatcaattaaaatctattacaagtttccaactgtagacaaaattagtctaactaaaagatgttggagtccaataattttttgtaatgtaaaattaatacaaacaacatatagtattggtctacctataatatgtcatgtaagacatcgttaaatcatatttaatatgttgacaacaataaaacatatatttttctttgttaattaaaaggagttcggacctaagctttaattcctccacggttcaggatcaattattgttaataccttatattttctatcagaaatcgaactagtaaacatatgggtctaacccctgcatttaaaccactagtctgtccaactcaacgttgatagtaactaaatgcaagtttgatgagagagcagcttaagtactcttgtagaactgaagttttatattaagaaaaaaagatttttttttttaaaaagagaaaaaatatggttatatatatagaaagcgagaacgagatcaagattttgggtgtgttttacaatatattttcagcatcgagagtgagggagttggtggaagataaactaaacacagtgcgttagaatattgaacatcatcacctatatgagtcgtattgagatgactgattttggatggtttccacaatgcgtctagatgtgaatatgtgatgaaggaaaattataactatttgatggtttctccataaatctgattgatttaattagtgacagacatgagagaaaattataattataagtggaagatacttttttttttgatcaaaagtggaagatacttaagaaaattgattcgtatcccaaaaataagttaccatagatttgttgtgagatacttcttgtctagttgtcttgattacaacatataatacgaattatgaaataatttgtaagaggatatgatacccaaatctaacttctgtcagcagtttttattataaaagtttttttaaaaaaacttgttaacaattgatatcggctactattatgcaaaacacagattattatttttttttttaatacaaatgagttagtacgtaacttaatatcttttacaaaaaaaaaacttaatatacatacatatttaatatcttatacaaataagttagtgcgtttctatcacattttgataagagagaattcacaaaagaattttttttagtgttttagtgccaccgaaaaattacagcctcagtttcatgtaggtgggttttgagacttcgtgtttttagaagatctcatcccttaatatgatatcatagagacattttttgtatgctcattcttagtctgttccacattttacagttaaaacatgaaaacatattattgagaaatcaataggcaaatactaattggagctcgtctgatgatgaggaccaacattctaagcgaccacgatcaatatgcaaacactaattcaagggatatctgtataacccttttaagaaaaggcttttaagctagagtccagttcacttgattgggctcaagtggtgcctggcccgggatggagttcgtaattagttttctttctggtgtttactattttttttttttttaggagttcttatattttctttttccctcacaactctcttaaatgagtttacacataatctttctttctttttttttttttttttcacatagtctttctatatccttttctacttcatctttatctttatttttatttttttctctttatcaatagtcttttgacttttgttatcaacaccttttatcaacttttaattggtctttagttcttaagtcgtatgactctaatttataaaaacttggctcgtgggctgctaatttttacaatttgcatttttttaggaaaaaaatgatgatcggtctttttttgcatatatatttatagaatttgctttcggctctttttcgttggttgatagagtaagggaatcaatgtctcatacgtttctaatttttttatgacagctttacaatatagtttaatgtgcatgttatatataacgtaatcaaagttgctgttaaaaaagaaaagaatttatagatgtaatcaaagaccatgatagttcgatcattgtacattttgcatgcctggagccattatccttgatcattacgtaccaaaacattcggagacatcccatagatttaaaacgatacaaaaaatggtaatttcttttccactttccacgaaactcttagcttaactccttgtttttataaatcgttcaaaatacgttcatcataaacatagagaaaaaaggacgtgatgcgagttttatgaaactagtcccattaaatgtctgcccacacccctaatttctgcaaacctaaataagtttatagtgttacttagtcatctgttcctagagtaatcatgtggaggtaaatgatttataaccatatattaattgttttaacccaaaaaaatagagagttacatatactatttttccagcgtgtatccacatcatatgcatcaatataatttttttaatcaaattattaatgttgtccgaagtattagaaattatgcacaaacattaaatgaattgaaagaaaataacttaagtttttttttgtttaaaaatgagataacacaaaatgtttctaaaatcggatagaatgcgaacaataactgtttcggaagtccatggtaatctatacatgttttgactacaatatatgttataaatatacgtatttttaatatatatatatatatatatatatacgtatttttagtatgtatatgtatatatatatatatatatatataatttgtgaaatgtcttgttatatagaaaacaaacttattttcgtccaaaattattttttcacagcagttcatacacatttatgggcatgtactagtttttccgactataagcaaaatttatgtcgatttttctggatgtaacgtatatcttaggaaagagtaagcatatgaacgtggctgaaacaaactaaaagtgtctatctacacatacagatgctagcctctatgaaacacacttgtttggtcattggtggtggctactctcacgtgctcgctttgcattagtttagtttttttcaaacttcaaaagtcttttatcctttttggttatttcaaatgtccccaccatttctgcaaagtcacaatcttcataaaccatttacgatcctctactgactcagcgaatatgccaacacaagggcgcgtgattgtcttgagattcttccactgctatgcgagtttcttcaaaaattcctcatcgatcgacgcacttacctttttttttaaatggatcaaattgtttttgcatcttagaccaataaaaccatattgtatatattacgtaaacataatcactagtccatgatactatttatgaaaggtcataaagaatcctctctaagcatggaacatatgcaattcgaattcgggttcagaagcactaaaacaatactctttttaaccggttaagtatttgaaatagtgcacacaaaaataactaaaaagtttcgtgttactctaattagtagtagtactatatatataaccattgtcaatatagtctaactgatataataggtggaccactgtcacgaacttgaatgccagcgggaaaaaaaaatatactcgatcgcacgtatttatttgctttaatgtttgatccgaaaaagaatctctttggtaagaaaaaaagaagcctttttctattgacaatagtaattggtacgttgaacacagggtcacaggaacgaccgaacgagaccagacgcaaagcttccacttggatattttttttcctttttgaaaagcaaagaaatatactctcctttaatcacaataaatatatagaaggaaaagacttcagtattcctttgccttttaacataagaaaaatatatatacttaaaagatagaaataagacacacaaggactgaaggaccaaaattgcctataaaagcaaagtccatctattccacaagaacaagaaaaggcagagaagagagaggctctgataaaaaaaaaaacaaaaaaaaatgacaaaggcttattcaacacgtgtcctcacgtttctgatattgatctcgctaatggcggtgacactgaacctttttcccacggtagaggcaaagaagcggagtagagatgctcctatagtgaaaggtctctcatggaacttttaccagaaagcatgtccgaaagtcgaaaacatcatcagaaaagagctcaagaaagtcttcaagcgagatattggtttagccgctgccatccttcgtatacatttccatgattgcttcgttcaggttcgatctttttcttccttttgttttgtttcttgtattaaaacctaagaaaacttaatttgattcttaaagcctagtctaaacagttctacgcatgtaaattacatattatttcattaataaaaatatcattttttaatataagaaaccatatccagttatccactcatcactcgttatacccacacacaaaaaagattctctaggcatgtccgaaatgaaaatgaaatattcataaatatcaataaacttgtgagttttcttattaaaatccgaccaaaataaccttaaaggaaaacacaaagtcgcctcaaaagtctcatgaacaagatttaagggttgtccgattcttacttcacttttgtttttttttcaaaacaaagggtttcttagtgtaaacataactaaatgacatgtattattggaatagtattgtttattacaaaattactacacttaatatacatgcaagctataaaataaaattaaaaaaatacatgcaataggacatgtcgcattaatactatacaccggctttccgtatgttagttggatctcagttatggaacgtaaacatatcttaaataattcaatatccaaccaataataaaaataatacatatccggatatgatagcatatgtgaattatttatatcaacatttaatgcatccaattttctgaataaaatatttgatatttctcaagccaaatactaaacctaattttgtttgcagcaatactttaattatgattatcagattcttagaacttgtaagttgcaacacctttatatacttaaaagtaaatattatcaataatgatgaattgtggcataatttgattagatatacaatttcggaagaaacttcaaaatgtatttttcatttttaatctttttgttatgagaaatatcttcttttttttttgtatgttatgagaaattttataaactaaaataaacagggatgtgaagcatcagtgctgctagctggatcagccagtggaccaggagaacaatcatcaatcccaaatctgacactacgacaacaagcctttgtcgtcattaataaccttcgtgccctcgtccaaaagaagtgcggtcaagtcgtctcttgctcagatatcctcgctctcgccgctcgcgattccgtcgtcctagtaaccacatctatcactttttcgtctataactcaatcacatttagtttcaactaaccttggattatgacttgcggttacatgcaataatacaaaccattagtctacaagtcacactaattctctaacatgataattatttttgtgtgtcaatgtagtcaggagggccagactatgctgtcccacttggccgacgtgactctctagcgttcgcgagccaggaaacgacgttaaataacttaccaccaccgttcttcaacgcgagtcagctcatcgccgacttcgccaacagaaacctcaacatcaccgacttagtagcactttccggtggtcacaccatcggaatcgcgcattgtccgtctttcacagaccgactctacccgaaccaagacccaaccatgaaccagttcttcgccaacagcctcaaacgcacttgtcccaccgcaaactcgagcaacacgcaagtgaatgacataaggagtcctgacgtgttcgacaacaagtactacgttgatctcatgaaccgacaagggctattcacttctgaccaggatctcttcgtggataagaggacacgtggcattgtggaaagctttgcgatcgaccagcagctgttttttgattattttactgtggcgatgatcaagatgggtcagatgagtgtcttaactggaacacaaggagagattcgttccaattgttcagccagaaacacccaaagtttcatgtccgttttggaagaaggcatagaggaagctatttccatgatctaaataaccataaatctcgacctttcctttgtcaactctgtttttatttagttcatgcacttgtggttgggttgtcgaatgcgtaaaactatctgataaataagaacgtcgcttcatcttaattaacttcatccaataccatgcactccttcattatttatgtgccaatcgagttactaaaatttaacgggctaaaagagaatttaaattaggcccactagttacaataactcacgaggctatgacccaatatttgtaactgtctaaagcccaagttttggtcaacgatctctgactctctaatgtcccttcttccttccctccccattgtacctttcacctatcccaacaatggtggaaatcagaaatcccggtattgctttaacgaatcaatcagcaaggaagtgagaacgagaaggagagatctgtgtttcattagagatgagcaagctcagattcttccaaagtctcctaatttcgactgtgatctgctttttcctcccgtcgatcaacgctagaggcggccactccgaccatatccacccaggtccgtcgccattttagtcttcactatctaatttttgttcatagcgcttaatgaaaactatttgcagatttaattacttacgtcattaattgctcttaatttggtaataagtttaacaattatctttttgaagagcacatactaattgaggtgtatgcattaatttagtgattttgttaatctggttttatgtgttaattattaggtgatgggaattatagttttcatggtattgtgaggcacttatttgctcaagaagagcctacaccgaggtaatgtcgttattaggtttccaagctgttattgggatgtgattactgttgtctgtgtaatgataaatgtgtttgcattgttcaaagtttggaattaactcgaggatatatgactaatgatgatcttgagaaagcaatgaaggatttcaccaagagatgtagtaagatttcgagattatacaggtaatcaccatcatcgttggatcaatcagtagttgtattcatcctagattcagtattcttggtttctatattagggtcttatggtgttgttgattttgttctttatttctctctttgagggttttctggaacgtgctttcagcatcggaaagagtgtcaatggatttcctttggtaatacactcttatttatcagaaatgaatctttatgtttaataatgtgtgactcttaagatcactgtcgatgatgccttcttctgtttgtttcatgctttgcctttttagtgggtcatagagatttcagacaggcctggagagatagaggctgaacctgcattcaaggttaaaactgctcaattatttgtgcctatacatgcaatctttgagatattagattgtggtgatagcctagatgaatctaaatagttgaatatttggtcatgcagtacattgggaatgtacatggagatgaacctgtagggcgtgagctcttattacgccttgcaaactggatttgtgataactataagaaggatccattggtaagtgatttttgctttttgtaattgcaccatgccatggccatgaaagttgttcactcatcttcaataaacttgcctaagaaaaaggttatgtgcagatactgatttttttatgctggtatgcaggcccagatgattgtagaaaatgttcaccttcatataatgccatcattgaatcctgatggcttttcaatcaggaaacgtaataatgcaaataatgtggatctaaatcgcgacttccctgatcaggtgattgtctgatgacgcttttgacgatcataaattttattttcaccgatgctgtgattttcatgatggtagctagattcggttggttttattcatagtcacgtttgacttacttaactcatacctgataatgcagttctttcctttcaatgacgacttgaatttgaggcaacctgaaactaaggcaattatgacttggctgagagatatacgattcacagcgtcggctactctgcacggggtaattttcctgtagcagacttgtgcatactataacgtcttaagtatgtccaatttgaaagtttactttcaagattatgggagggggttttcaatgtaatgtcaaggaaaatcttgattcaatgtgaaaaaaatatttgctaaaccagcttttgttttagggtgcgctggtcgcaaattttccatgggatggtacagaggataaaaggtatttacttctattcaaatggttttgaggctaatatctttgctcggtccttgaggaaatgcaaacgtcatgtagttgttttgcactcttcttgcaggaaatactattatgcatgtcctgacgatgagacattccggttcttggcacgtatatatagcaaatctcaccgtaatatgtctttgagcaaagaatttgaggaaggaatcaccaatggagcatcctggtatcacatcaagtccccttactctgtcttattcaacaaatgagtttcttggttaatgctttaagcaaaacgctctacaggtacccaatttatggtggcatgcaagactggaattacatatatgggggatgctttgaattgactctggaaataagcgacaacaagtggcctaaagcctcagaggtcaaatcttatattcctatgtgataactgtttctccttcgcaaggtagttagctgatactaatagagttcacacatgttacacagctttccaccatttgggattataatagaaagagcatgctgaatcttgttgcaagcttagtgaaggtattatttaacctttgtttttagaaccccaacattttaatcttgttgtatcattttagattaagcctccagagattggttacattaatggaagtttgcacctttgcttccattgttatataaaatattttctgttttgtttttttaagtacgcctttatcttttataccttagacaggagttcatgggcggatcttttcattagacaagggaaagccactgcctgggcttgttgtggtcaagggaattaattatacggtagacacatattaaccctgccttctagtatttccttattccaaaatctgaaaaatcttgttagttcttcattgctcattgtaatccttatgctctacaggttaaagctcatcaaacatatgcagactatcatcggttgcttgtacctggacagaaatatgaaggtctgatgttttttcctcatattcagcttaaaatacgtgtgattaagttcttatcagtatgttattagagttgtccactgttataagattatgatacgagctgattttagtgattcatccttaagaaccgtggggcgtacaaatgcactatgatatatccttcataacttgtgcagaccaatgccttctgttataagctgacgctaacgatacgatatctgcatttcatctccttgttattgttgattacttgcctcattttgagtttcctttactgattcgcagtcacagcatcatccccaggatacaaatcgaaaacaacaactgtttggttaggtgaaaacgctgttaccgctgatttcattctcatcccagaaacaagttcccgaggcaatcaactgagaagcagctgcgactgtagctgtaaaagctgcggtcagccgcttctaacgcaatttttcacagagacaaataatggaatcacgcttaccctattcgtggttgtagtgttcctttgttttttgttgcaaagaagggtgagattcaacctatggaagcaaagacaatcctctagaagatcaataacagtatgatttataggtataataacacaactctatatactctaataagaacaaccaaaatccaaacaattgagtccaattattcaagtagttgttacattattttataccattgaacatttctttgtatcgttgtactttatgtgtttggtggatcttatcatcttacaagtcttgtactacgtcaagagtgcaacattgtcgccaaacttatgtcaccaagggacattaaaaaatgtaaccggaagaaaaagtcatgcttattaagtatttgaagaatgcgttcacaaatgaaatgtgaaagtcaaaacaccaattaggaaaaacaaacaatataaagcagaaatctatttatgctgttatccacagctttcatttagatttcttaaagacttttatagacatgagatttttttctatcttatctgtgtgtactttatttagaaagtagtaatctgttttatcatagaagatctttcttttaaaagtttaatcatttccataatagtgattactacatcgaatctatgacagtaataggaccactatatatagaaaatagtgtttactacataattttctacatctgagtttctgagtataataatatcgggatattcactgcgagacaacggttaaagaacctatcacaaaaactgtataagaaatctcactgctgtctcatagtaaaaaaacaaagacgactatttggatttgttgactttgacctataacaatgaccgtttcgttacgccgttgacttctccgcgccttaaatataccacgtgttttttcctcattggttccgacaaaaccgtcggtcacaataaccgttttttaaaacaccgtcatttgaaaaagccaatcgcttcacgagacaaacgacgaacaacgcaattacgcgttcttatctttctgggtatttcttaattatattactctatataaataaaaatacccagaaacgtaatttcgtcgagttcaaaaattcaattcaaagaataatttctttccataaaaagattgttgtggattaacttctttcttaaaagaatctcatacccgtcgaatcttcttcttcaacctttttctgcgtttttaatattttccctacaaaaagattctcaaaatcgttttacataaacccgatcttgtcaatctccagaaacaaaaaaaaaaaaatggcgatcaagacaaagactagtctaattccaagttgttcatcacctgaggatctaaaacgcgttttgcaaacgctaggttcgagctggggagatgtagttgaagatctggagcgtcttgaggttgttccgttaaaaggagctatgactaacgaggtttatcagattaattggcctactttaaacggtgaagatgttcatcggaaagttcttgttcggatctacggtgacggcgttgaccttttctttaacagaggtgatgaaatcaaaacgtttgagtgtatgtctcatcatggttatggtcctaagcttcttggtcgtttctctgatggtcgtcttgaagaattcatacacgccagagtacgttttcttctttcttttctttaaagttttgatttttttaggaagaacagaggaagataggtttagttagtgagattagagataagaattgtttgcgtttcaagaaatctcgtgatagagagagattgattgtgtatgattggtttggtccgtttaccagactctttctgcagatgatcttcgtgtagcagaaacatctgatttcatcgctgcgaagctaagagagtttcataagcttgatatgcctggtccaaagaacgttcttctctgggaaagacttaggtaaaagagaaaagaaatttcatttctttatgtataagcataacaacgtttcttgataaagtctttgttgattttttaggacttggcttaaggaggctaagaacttggcttcacctatagagatggataagtatcggttggaaggtttggaaaatgaaatcaatttgttggaagagagacttactcgggatgatcaagagattggtttctgtcacaacgatcttcagtatggaaatgtcatgattgatgaagtaaccaatgccattaccatcatagtaagctttttgaatcaaaagcttatacccttttcatcaagaaagtgttctgtttttaataagtttttgattgcaggactatgagtattcgagtttcaacccaattgcttatgacattgcaaaccacttttgtgagatggctgctaattaccattcagacactcctcatgttctggactacactctatatccaggtccatatctgtaaatgcaagtgtatatatctcttatgttactcaagggtagtttagagtctgattgtgtgtatatgtgtggaatgataaacaaacaggagaaggagaaaggagaaggttcattagcacatatcttggctctacaggtttgtgtcctatgaagcattaggtacttctccacacctcaagaaaaactcgtctctaaatcatgtttttgtgaatctcagggaatgcaacaagtgataaagaagtagagaggttattgaaagatgcagagagctacactttagcaaaccatatcttctggggactatggggaatcatctcggttagctttctctctctttctttcccttctttgtccaaaaaactccttaagactctgatgttgaaactggtagtaatctctagtgtctgttaatgcaaagcagggacatgtgaacaagattgagttcgattacatggaatatgcaaggcagagatttgaacagtactggcttagaaagcctttgcttcttgaaggatgaagcagattcgcattgaaaagccgatatacaactaaaagtttctgcaattaggtcaaaagaaaaaaagaaaatttagtagactatatgttgctattgttactctcatcagtttgtgtgtttcttcccttctatatagaggtttgttaactctcaaaacagttaaattgagtaaaacttgttctaaacaaagtattatatgataatagaagaagcaccagtggtctagtggcatgatagtaccctgccacggtacagacccgggttcaattcccggctggtgcaatttatcttttttacaattatttttgccttcacagtaaaatcaaataaagaaaaaggccttttctcttctttttgtttatttttaataattatgataacaatattgatggatgtaaaatgttcttgatttcattatatatatcaactaaatttacaagagtaaaccaacacacaaaacaagaagataaaaactataagaatatgaacgttttctcagtgtgatgcatcagtataacgacatgagattcaaaaacctatccgtagaaagagaatgtctctttcgccaatacttcatatgcaagatcaaacaaacaaacaagcaccaaatctcttcttttaaacgagaacggctacaagtccctcgtcttcaatctctgcatccgtaaatgtcaacgctcgctgaagtttcctcgcagaaaacacttcgacttcagccatgtatatcgctgtaaccggacgatgatctgagaatttctgttcggttctcctgtaatgaaccaacctcattcctttcccgtaggatagtactctgtcacaccaagctggtgttcttttcggcgcctttccatcgtttgcggtgtactcatcggaattcgcttggtacttataagttggtggaaaatgtagagttccttctgaccatccatcaaatgctctaccttttctgtattcctttaccagctgcattatataataatcataagtaacaaaatgtgtcacaacataagttgaataaacttcagagctatggtcggatttgagacagtgtgtgtgtatttttatttgcattagacgtcttctaaagttatatttgagatccaaatcctaacagtaacaaaggtaatccaaataattacctggtcatattcaagtaatttagaccattctctcttggaaatgaggtctctggttttctcatacgatgaactaagccgatagttgagatcacctagccagattattcttctgagaagtggtgaaaacacacaagtaaagttagacaaatcgaaaccgtaacgggttttttgagttaaagatttatttggaagagagaaaaaaagactgactcgtgatcatagataagcttgggaagtccaagagctgagacagagtgaaagactgttcttttatgtatctcgtgtacatcagcattcctctttatctgatcaacctctctttctcctgccgttaaatgcgtgtttatgaaacaaaagaacgtctggtttatcgacatgctcacagacacagctccctgcagagaccacaaaatcacttcacaatcctgaaacatattgtaacataaatttgatggaaacatctactctttatatatataccttgttaccaatatatcccataacgccaacaccaacagtagagactcgtacgttttgaatatgtttccgcaagcttcgtttaacccaaatggtcaaaagaatcccaaccatttgtttactcactagcctcacataagccggtcttcgtttcctctccattagcaacttcaggtccatttccgctagagctaaaacctcagggggaatcccgttgttgtttccggctacagacttaaacgaactataagccttgaaagacttggctgtttttaaagacttcactgtctttatcgacggctgtctatcgagaacacaaggtcctaacatgttcaatggtggctcaggccaactcaaaccgatccgttctttcccgcttaacatccggtttatcgttttcataccggtttgagtagaatcatcgtcgcttatccccttaaagctatcagcacgtaaacaaagttgtctgtctagcttcttaggaatcgaaaactgtctcttgatctcaacaaccggcaaaccggtattcgggtcaacaagagtcttaacttcgccgataactccaccgtcatgttttaacgcccaaagtctatcggtttcctcttcttcctcctcgtcaatcggatgaatctcaacaccagcatcactatcactctcaaaagctacttcttcctctataatatcatgtgtttcctcaaaaggtttaaacctacccggagatggtggatcactataactcttaaccccggagagttttggtctaactctgttcaatgcttctctaatcacttcttcccatttagcaacaggacgatcatcttcagctccaagaatgtttccagcatttaaaggaacaatctcttgtaaccttcacacccaacaaaacaaaaacaaaacataaataaaaatctctaacaaagaacatatctgaacagagttagttttgtccatgtcgctgacaaagaaaagtcaagttttacccaagaacgtagatatcagctggttggttaatttcaatccagtcgtcaatgtcaagatcagatggtggtgagattcctccaacgttccacgtaccaacacaaactctacaatatacataattccgacatgttaggtctccttttacccaaccaaaaaaaaaacttacatgttgaaaaagactatgataacatccgaatcttttactatatagtactgctatatataaaatatacaaatacaaaattgtaccttatttctttgttgttaatgtactgtgctcttaatgtttctgaattccttcttcttaacttcattggagcatctgatccaccccaaacaaaagaataaaaatacattaaattcacaaaattcgtatactttgtttttttaaagttgaataatttagttttaaaaaaaaaaaagatttgaaattcaacaaagggatctcaaaatagatataaaaacccagaaacaccccacagtgaatctcataactacctatgcaatttcggcattaccattgctaataaactccgccgctgctgctgctgcgtctacaacggctgaagcggctgcgattgcgtcctccgcgttctcataaacttttgattctcttcctctcgagccactaccacctgttataaaccggttagctaattaaccgtaaaaataagaagaaccggtgtttaccagagagagagaagagagtaaccttcttcatcggagctagagtcatcgttgtcttcacgagcatcttcgttttcggattcgttatcagtatcagcaccatactcaggatctctaccacttatgttcaaccactttctcatcactagctttgcccataatctctgttatataatataatccacacactttaaatccaattcaggcaacaaaatcttttttaagtacacaaaaagtttcttttttttttgtttacctgagatttctgacgatgagatttcttcattataccggcgggttcaactggagacataagaaaataatcgtaattttcttcagaccagaaagagagaatttattttattttatacaaagaggaaagtgacgaagcttttttataaatctggatattttttaattttgccagaccataaatccaaaattttacttgaagagttccgaaacaacgcgtgagtcagtcctcgtctttcttttcatcattttatgtaagaaaaaacttttttttttttaatagttgtttttctattttaataatggcgtagcaaagcaatattgattttttctcttacgatatggtcaatttttgtattttaataatctagattttcaaaccaatgtttaggcttatttttggaagcttaaagatattttttgaaaatatctacaatgattaattatgattaaaaataactttcaggaatatccgcacaaattagttttgttacgttatggtgagtgatcatcaaaggccactaaaacgagattacatatataataagattagtaaagaagtgtaaaaaattatgaaatattggacttggtataacaactctgatgggatcttacttttaagttatctgaacctttttaacataaactagtggtctcagccattttggactttaacttttggaccccaactcaacattcaacaactgcttctatagatattaaactgggttaatgtattttagaggttctttttattattgtatagtgtaggtttcacattattcaggtgttttaattaacaaataaaaagttaatcggacatgttaaaggaaaatcagaagtggtggccactggccacgcaggtgattgtggcgtggctcatttgcatagtgggtatataataataaccgagcgagaaaggtgcactaacatatcaaccagatcttttttttttacgtctatcaaccagattatttaaacgtgaataatacgaaaacctttttgttttgtaattcaacataaaataaaataaaattaggatatgacagtgtcaaaaaaaataaaaaaataaaaaaataaaaacaaaatataaaagaatataaatctaaatcacatatttataagaaatcatgaaaacacaaaattcctaaaatataatcacaattcacaagtaatacatgatactttaaattatacatatagtatcctaaccctacggtgtatcagtacatatctcaatgggtttataagacatataaaaaaaaaattgatatataaaaccaaaccattaaaatggggaatcggaaagagtgttacagcgccggaatcggccaaagcaccgggaaaatactgaaagtatgtgactaattaaatgttttataaaacttttctttatcatgcaattaagaaaaaactcttttcaattttttaaaaagaaaacttatcaaatttaccccaaaagaagtcaatgttaagtgggcttcgataacctaaaaggggttgaaaactgaaacaagagaaagaaaaaaaaaggtttgatagttcgttaatcttttcataaaacaaaaacaaaaataaaagtaaccatagctctttaacaaaaaagaaaagaaaaggtacccatgcagtaaatcatgggcatttctttgaccaaaaaaaaagtaaatcatggggattacatcatgcgatagatattttgatgaacgtagggcgaggaaaatgtcactaagcaagtttatattcggactaccgaaaagaggaaaaaaaattagaggcaagtacgttgtgccgccgcaaatttggtcgagaagagatccggtccagaagtccggttagagtccggttaatggataaggtgtttgggtcggtgtggtgtggtgtggtctgtggtgcgagaccccacgaaatacacggaccatggaagaagcctacgaaggagttttggactctattgggtccacccacttttaactagacttggatctatgtgttgttgtacccaacctatttgtttcattgcttcgatttctcacctaaaatccaaatcagttaaatcaacgaattaaatttacttaagttttcctttttattgtttactttacaatttaatataagaaaattcaacaaatgtacatcacgtctataaggattttatattttaaatatatgaaagtaaaagttaatcctacatctagcaagataatatatatttttagtcgtttcttgtctataatctatggttttacttctctttaatttaacataatgttaagagcaaaaaaaatgcataatattttctttgaatacaaattttatttaaaaatagagttagtaagtgaaaattttaattagtttgtcataattattacgacctaacaagtgcattgtatttaactgagtagatttagattcaattcgttgaaaacatcacacgcctaagatttggaaaaataagggtgcaagtcacatgaagctccatactacattcttggatgatgtttttgtacttcagtatttttatttatttgagaccctactctctttttttgtttccttttttttttacaccaatttgagagtaccctatcctattctataattatcttataaccccaaacaacaaaacattgttacggaaacatctattttttggtgtggaagttagcatgaagatggcataatatatcatcaagtatcgaatgcttatgctagccctttagccaatatatagataaacaagtagatagaatatatttttaactagatgtattaaaagggaaaaaaatatcacgaggatggatcagtaacgaaagaaaaatgaattaagagagcaaaagaaaacaaaataaaagagaatagagataaagagatcataaggaaaagaaaacatgtttggtcccctttggcatcacatcaattttgattcttgaccacaatccacaatgttataggcaaaatgcaatggtcgatacccaaatttgtatcccgtcatatatattatttatatttgacaagattttataagataagatgacatttcaacttaataaaattaaataaactatggtaaaagaaatttgcaactaacccgtagacctaccagttttaaaaaccaagtgcttcttcattttctcaaatcaaattaattatctataataaaaaaactgaaaagctcatgcttttaattaaatggattttaaataataatattttacaaaagcatatgcaaattataatgatacgtttgtcaaatcactccaaaaatgagttatactcttttacagatttgttagtgattttatctacgtaggtcattttgcaaattttactgatatgtttgtcctttttagcctagtggtatatatatgccactttaaactcagctttatgtgaattcgagaactcactcatgttgaaaatgacatgaaagattaaagatatttgtctagtcaactactgccttcagattgacacattaacattttagctgaataaatattttaaactcaatataagcttaatcaaaatgatttaaatatatatattcgtttaaacatgtaatgccatgaataatgtaaaaggcttcaaaaaattccctttaacgaaaaaaaaaatgtaggagaaagacaaaaacaaaaatcgcataatatcaaagctatgatatacgagttttatctaccaatagttgccaacatatattcttatattagagattgtgtagataacgaaaaaagtacaatgcaaatgaccaaatatacctttgaatatatggtcccaaataacacagtaactcactgttcttctctgtttttattccttgtttttagacttttagataatggtcatacaaatattccataccattgttgacaaaaaaaaaaaaaaaaccatttctaagtaattacgaatgtatttttaatttggttagtaatgtatagaaataaccatattggtaaatggttattggatacggagaataaagtctttagaagttagacctcaattattggaacaagatctatgttttaccgaaaaaagatctatgttttacttacagagacagattaaacctatccaaatgagaggaccaagttaatttgaaactaaagaaaaaaactacaatataataatgagatcagatgaaagtacctgtgactttgtgaagaggtgacgaaacgaagaagaagagaagaagacgacgagaacagaaaaacgaaagagcgatagcaattaatgcttctttgggtgtcttgtgaatatggatgttaatgtgaatgtgagctttttttgttggaaggtccaaaaaacaaatctctttcttccactggcccttttgcttctccatttatatttgtgttttacattcacatgtaatattatcatatatgcatacatttttttatttattatattttatacattttctttcaatgtacacattcttgccacgtgttcttctcgtaaagttttttgtttatgtttttatattcgcaaatataaagtttttctcgacatcgaaatttactaaatctaacgaatcatcatagtctctcatgtagtcctaccgtttcatacaagataataattaatgtcatggcctaattatttggctctgattgttttcggagggagacatgaattttttaggcacaagacaaaattttaaaattattgaaaacgatatatgaaggaaatcgttaggaatatcatcttctatatttgtattatttataacataaagaaaattatttttctttttctagtttaggtgaatcttggtacaatttggacatgaagtcaaaagttgatttcccatttaatctagaaccaacgcacaagaaaattaggtttcaactattacgtttaggggaactttttaagaaattatgacgaatgaaatcaaattaaatgtaaaaaaatatagaaactaaattagtttcttttctatttacaaaaacaaagtaaataattttagattggtaattatattaacagtctatactctatacttaccacaatggtaaaatatgaccaactacagttttaagttttgactaatttgtttgtagcgtcaaaagctggaacataactttttatttcctcagtgagtgacaactggtaaaacagatctaaaggtaaatagtgtttatctctataaaaaccagtccattcacatctctagtttaaccggcgagtaaaccaaaaaaccaacgtaaaccggtggcacatcgagcaacttattaacgtttggactttagacctccgggttttgtaaaccacagccagtcctgactacagctaaggtagttccttaccacatgtaactgacgtaaaaccaaaattaattagttgttaaacttttgtcgtgtgtttatttgatcaggattaataaactatgagaattgtcttacctcacaatccatcttcttaactgctatacgttattttattaagttatctttagagcgatgattacgtcctcataatctcattcattattcacgtacctatcaccgaatgataaaactgataccaaagttttaatgcaatcatatataattgcactaatttaaaaaattaaaataaaaacatataaatgcacttattttggtatttcttagtaagaaatataagatagtggtaacattttggaaacttctcgatcgcccaaaataaataaaattgcatctcatacaagtctaccacaaaacgttatgaaagtttgttagcggaatagagtctacatatactgtctacgatttgtaaccactaatcttaatctatgaaactattaaatcattgtactatgaaggaataatattaaattcggatgctaatcagcgagcactaaattattggattatgtaacaagtggtcttcgacgaatgaccagcatttttaaaggggattttgtatacgattgacaatgactcactgattaattaagcattcagcgcataattaattatttcatttctgataggtggcgaaaatcggcgattaatcataataatcaattagagagattttatttgtatagttttcatgatagtcacaattatgtaaataaaatcgagatattaattagtttgcgtaccgatgggttgtcgtcaggttagaactttgatcatcataaacaaagtatgaagcatcatcatcattctcatctccatctttttaaaataatttacgatttgaaattatgcactttgtctaatcgctgtctactgtctattactttcactatatcccaaatccaaatttatatatgaacaaaacttctttttcatttatttttagaaaaagtctttcagaaattttcctttatcgaaactgaatacgaatatattgtttttattggccgacttaaactatatgtaagctatagagtagtctgctcgtttaatcttgaaaactaagccgacagaaaatattgaaatctctggatagaaaattcttaactaaaataacaattataaaaaatgatacaatcaaaaccgcaaaaaccaagttttatgaactatatctgaatcttattgatcgttttttaaagataaataattattttgttgttgatgaaaaccacaaacttcgagtccctattaggctcccttaatataaaccataccggaagttcgaatctaaaccaagaatgtttatcaaaagtctagagacgtttatgcattaaatcgaatcgccgaccacattatttaaacgttactactatactatcatgagtttaataaatgcgacggtccatttaaaataacgggtccactattattatttgacacataaccacaaaatttattaggtccattatcaatgttgggcctatcgttagctgtcgtcaatagctggttcttaaattttgaggagtatgggtttcattgtcacatttcaaacatcatgcccaaattgatagatttcgtaaataatatggcaattttgataaaactagagaaaagaatatggataaaaagaaccgtttgaagaaatttatcttacgcggcggataagaggaaaaaagatgcaaacgcttctctgtcagccatgtaagtctcttcctatactcactgcttcgtcgtcgtcgtcgttgattcgtagctccggtgatgtgcgagaatgtatcgattttagagcgtcggagaaagtctcgaagtttcaatttcatgtaaccctaagcccctttgcctttcgtggtttctcaatatgtcgcgaatttgctgttcgtggagcttatgggattagattttgctcacgagaagatgtttccggtgttggaaatggaggaatcgtggcggaggaggagattgagctattgaacaagccgaatcctttaccaaaatcagaaaatgaggagagtggtaaagcagacgatgacgcgattctggagccgtttttgaaattctttaaaccggaagaagaaggggaaggaattgaatcggaagtttcggatgagacggatagagtcagcgtagagtattatgatcctaaaccaggtgattttgtggttggtgttgtggtttcgggtaatgagaataagcttgatgtgaatattggtgcagatatgttgggaactatgttgacgaaagagatacttcctttgtatgataaagagttggattatttgttgtgtgatttgaagtatgatgctgaagagtttttggttaatgggaaaatggggattgttaaggatgatgatgaaggtgttgagattgcggagtttgctcggcaaggtaggccggtggtggagattgggacggttgttttcgcggaggttttagggaggacgttgagtggaagacctttgctttcttctagacggtattttcggagaatcgcttggcaccgagtgaggcaggttcttttcttgtgccttgatttattcattctttggattcaagaactgttcttggtttgaagtattttgtgtcattgagaagcatctaatgaagagtgaattgttatgtggcagatcaaacaacttaatgagcctattgaagttaagataacagagtggaatactggagggcttctcaccagaattgaggttgctgaatttttcgtgttgattttgaggatttacatcttgctcacaacatagctcattgttggcttaatttatagggcttgagagcttttattccgaagcaggaactggtgaagaaagtgaacactttcaccgagttgaaggaaaacgtaaagcaagagtttcatcttccactgtaacaattttgtttttctgctgaatcgcagtaggcttttggctttactgttctgcgttttctcaggccttttttcgtgttgcaggtgggtcgtagattccttgtgcagataacgcgattgaacgaagacaaaaacgacttgatactgagtgaaaaagtagcctgggttagttccttcccctttttcatgtcttcataagaaaaaccaacaatgaggctaatgctttatcacataatgcctcaggagaagctgtaccttcgagaaggaacactcttagaaggaacagttgtcaaaatcttaccatatggagctcaagtcaaacttggggatagtagcagaaggttagttcattgcctattgtttccataaatttgtccttctcagtgactactagttttgaattcagtgcgtttgccataataatgtttcgacagtggactgctacacatttcaaacataactcgaagaagaattggatcggtgagcgatgtgcttcaggtggacgaaagtgtaaaggttctggttgtgaaatctctatttccagacaagatctctcttaggtaaaaacaactaatattccaaaatcaactaccacctcagtagtcagtaacaactattttgttttctacagcattgctgatcttgaaagcgaaccaggattgttcatctcagacagagaggtacaacttgagctatggacctaacttatcttttctaacctggtacaaaattgccattcatgcccctcttctagaagttaacaccatgatgttgtcgatgcagaaagtgtttacggaagctgaagagatggcgaagaagtacagagaaaaaatgcctttggtggctacaagtccaatttctgatcgtcctccgatcacaagcagtttcccacagggcaaggatgaagaaatctatgctaactgggagtggttcaagttcgagagtcagtgacaaattcacaaatccagttaataacatgttgtacaatgactttctgtatttgaaattttgatactatgtactattatgagtaaatgtctaagttctttcttcctcctgataaagcttgttcttttacagaagtatgtaaatgtaaagaatcaaagatcaacacactcaacgaagctcactgcaatagaaacttataataaactgtttcaagttttcttttcctgtaatcaaaagagtacagtcacaactcacaagcattgcaaatgctctgaatttgacctaaatggagtagatttattaaggcacacacagatgataatcagctaacaacaatggctcggtgaagaagaggaaaatttctgctaacctcttcgtttctccacggaatcaaaatcagcaatcgatcattcgttcagctgttcaagctcagcttttagctgttcgatcttgagtcccatggatcgttgcagagaagctttctccttctctgttactttcccgagcaaaccttgaaacatctccaaaacctctgccacggcgtctctcgcgcactccgcttcttcgttgaagtaaaccgtctccttcgcatccatagccatttcgatctcttcacgagcttcagcgaacttgagattaatctcgtccactaccttgtttacatctggcggtgaaccgctgctggagccggtgctgtatctcctctgattttccaggaagaatgaagcgttgtttgggatctggaaaattagtgagctagatgatgatgatgacgcttctgagagactagatttcgaatagtgagacgttgatgaaggtttgatttgaccggagacatctccaatcaataacggggaagcggtaatgcttagattctgtgggattcggagagactttctggtgaacagatttcggagagtaattgctgagtgaagacgcatggttcccgccccgccggtaaggtttctccgagattctgtaggtcggcggcgcagataagtgggcaaatgagagagattgaaattgttcaaaacttaagattccatatatgaggaagatgaagatatcttttgggccttataattaggcccaagagtaggtccacgaaagatcatgctacggcacagaagtcaaaagaagacaggtgaaggtcaaactatcaaccaaaccacagaagcaactgaaccataaaacgaagaacttctctcactgaccactccaatggcgaaccactccatttgcattgaattttacgcaaaccagactcctacataaacctcagaactcaaagacagtattgaccacaaactcgcaagccgcaacaccaagaatcttgccttttagaccatatccaatggctcagaccgttccaccatctcgaacgaagccgcttacaattttcaagatgggtttagcctctgcaagcgtccgattggttaaccttgcttctcattcgaagaggaagcttcgtcgttgggctgcctgttatggctctagagattatgaacctgttatatatctccaaaacgacatgacgatgatgaacaatggtggtgtttatgaatacaacggagacccgagcatgttgctgagtggggatcagagacgaggtccgttgtggcagaagaacattctcatgggaggaaaatgccagcttccagatttctcaggtgttatattgtatgatgctgatggacaagttgttcctccggccaagaactctcttcctttgctcacctggaagtgaaaaaaaagatccctaagaatggctaaacctacttatcatttgtttgtttgcatctgttattctatttcttggattgtaatgtattgtaccgttttatggttttctttctataactaaaagatttatggaatatgagttgtatgaaggctcttgctcaagacattcataatataacatatcatacaccaatttgcattagcttttacatcagaatcactgtcaaattgtagtataacattggtgctactgctttgaacacctaacagaggtgcaagtcatcaaaagatgtcatgattgcccagttcatgcaatattgtcacatgtaatattcaggcttcaatacgccaatgtaagataggttgcggtattgttctgcaaaatccatgccatagcccacgacaaattcatctggacactgcacatattcagaagatacaactcatgttcaacacaaagccatgaaatatatattcttaattcaggctagttcctaacaccaacaaatacttttgtttaccatggtttagctaagaaaaggcataacagggcaaataagaacggaaagcataatgtcatggtctcacctattctataaatagctgtatactctggttaaggtggcttaaacattccaaaggccttagacagacgtataatgataatacatatattgaacagagagaaacaagaaacagcttacttcaaaaccactgtagaatttcccctttccaaccagcttataatgaacctttcttctcgatggcttgtcgaggagagtgcaaaccgaaacagatgacgccttttttgctttcatgtgctcaatcaggcagctaagtgtattgccagtatccacaatgtcctcgacctttaagaaaacacataactagtgaatataaaaagtagtgaaatttcgaatgcttaagagtaaaataattaccaagacattatcaaatgagaatgtgaagcatcagtgattcagtgtggtctcctttctaatatattcatcacatttttgcatatcacaagtgttcttcaaacgttaaaactcagaaaccaacatatcaattttaagctgtaaagactcaaacttcatgaaattcaaatgaatactaaaactcaattgctaaagaaactgaatcaaaactgatgcaaaacacatattacccaaatccagatccatcacgcataaagagatggagattaccaagacaacgtgcttgttcgtgatgtcaagctttaagtcaaatgatactctgggaactccactggatacagtaccagagccgtaagactcagctctaatgaaatctatagctattggcaagtcaattcgcctaacgagatcggccaagaagaggcaagcaccagtggctacgccgacaaaaataggagtttcctccgagtcaccggagaaatcagaagtaatatcgattccaagctgattcacccggtgcgcaattacttcatcgctgaagagtaccttctctatgtgcttctctaacgccatcgtcttcctcctacttacctccacaacgaagctttttgatttgggtttttagggtttgattctaattgctattgtaaaaaaacgcgggagcttaaccgaaactaaccgaaactatttaccgtcttctgttaaacagacccggtacaaaataatttggaattgccaaattttttgaagtatatcaaattggcgctagaacgaaatcgaaaacacaaaatcgaaatccctagagagcagacgacgaagacgaagaaggagaaggagaaaaaatggcgagtactctcttcatcgctctccaatgttacgagtgttcaactatgcaggtattaaactctctcgctccctcctcttctatctctgtcaatttatatattggttagtttttagggattttgttttggggttcgaattcgcaggtgaagcagaagaagaaaagtagtaacaagtgggtttgtgtgatatgcaatcagaagcaatcagtgaaaaaggtgtttgctcaaggttataaggctaaggagcttcgtttctttgtccaatcgtttaatatgtctcgcaaagttgccgatgaagaggcacatgctgttggagattcgtttccagaggtttatgttgaaggagaggttaatgaggaggttaatggaacgaagaagcgatctgattggagtcaatacctcgatttcgattcagtaaatgatcgccggagattagctggagaagaagacggtgagtctaattcgagaatcaagcatcttatgagacaaaatagataaatatgtacttggttttgcgattttgttgcagatgtgaagattgtcactgagatgccaagcaatatgttcaaaaggccaaagctgaacaaagagtctaatgctggtggatcatcatcaaatacaggaggtgagaataaagacagtaatgagatcttcaagccttctttctccagacgcagcatcaaaaagccggattttcgatccggtaagaggagttctgctacatatgttggccatatatcagcgtttagttcaagtaaagccgttgcgaatgttgtttattaaaggcctgaatggttttactaaaacaatattctcctatccttcaaatgtgttgcagatgaagtagtgacgaggaagaaggatatggaagagaggaatctagagtcagaaagagttactaagccagcttcgaaatgggacgcctacttaatcgatgacgaaggagaacaccaagcaccaccgcgatttggtgttaaaaaggccttgaaggatgacgaagtaggaggatgggacagagcagtaatggagataaatacggaatatcagatagtagacgacgaggtacatccagatttcatgtgatcagaatgtttaaccagaatgccgattattagataaaatgctaaatgtaaagtttctgaaacgaatttggagttgcaaaagagttgacacattaaatagactcctaacgaaactagagaaagtgctaaagagtaaaagtctcaatgctaagggaaaaactcaaaacaatctatcaaagagatgtagaaaagaaaaagctagttttaaaggtcctaaaaggtattaaagcaactgtctaagaaagcgagagaaacatagtcttgagtaaacagtatgttcactcggatgaggatagagcaaactggtcatcaacagatgacacagctgctggatcagcagagcgtctgagaacatccagagcctcggacactttagccttaagagcttcaggtgactcaagaaggtgcaaaatctcagcttgatccatctccagcaacatcccggtaactttagcagcatttgctggctcctgctgctccacaagtgggtaaagatgatccccaagcatctgtcatcaattcacaatgcaatgatattgttaacaaatataggttataatgcaagtactaaatgagataagagaagaaaacacaggagatcactaacccgtgggtgtttgtcggggctagccaaagccaaatcagatgcgagcttagaaatggtgaggggagttggcttgtgagagcgttgcggagcattgtgagagtttgcagatgcattcaatggcaaagggatgatgccttgtggagcagatgcttccattccattcctcctgttgcctgcgcctcccatgaatctgcttgcattttgctgcagcatctgacagttccaagataataacaagccccaacaaattcatattcgtatgattgtgttaaagataataaacttgctaaaagacataagaactaatgataaaaactttacttgttgttgctgaaactgctgctgcatgttattagcaccacgcctgaacccaacacgagggccaggctgagtttgcctttgaagagggaaaggcatcatgaagttaggcgggcctgcacctggacgcatcccaggcatgaactgaacttggtacccataccccataggctgtgaaggtaccaaaccttgaccgttatggcctatgaacattggatggtgtggtcctgacattggcccacctggtgggtgatgatggaacccagacatcggtgatggaactggtgacattgttccaggtgatctgatttgagtaaatagactctgaaacacgtgaaaacatcaagacagtttaagaactcagtgtcacaacacaacacagtacagagtttgatgttcaaagagtgagagggctaaaaagaacctgaaggtgagcctgtctttcttccttacgttgtgccaaagcaacgtaaagaggtttccttcctatcatcttcccattcatttctttcatctgcgtaatcatcaaccccaatgaacattttagtaccaattttataaaacatttatgtatatgtaaaaagattgtcaattcagttgaaacttacagctaataaagcttcttcaggattggagtaagcaacaaaaccaaaacctctgcttaaaccttgtgaattcatcataacctaattatgaccacaaacaaaacattttaattcattatattgtgtggtataaacttatgtataaagtttagagatgtttagaatcagaaacaaaccttgcaggaagtcacattcccatactcagagaacatctccttgagcttctcatcattcacactatcatcaaggttcttcaaatacagattcgatccttgcaatttctcaaacctgcttatcctctcttgctcaaacttcctcctcaattcctcttccctatcagacttcttctgtgccctaccaacatacaacacatcctccccaaggctgataccgttcatcttttcaacagcaactgcagcagcttcagggctcacaaagttgacaaacccgaaagacctcgagttcccactctgatccttcatcacaaccgcactagaaatatctccatatttcccaaaagtcttcttaagctcatcatcagtaatctccttaggaagattcttaacataaacgttagtgaagctcggcaccgcaccactctcactacgtgccctgtcttgacgacggacaaaatggccaacaaagacttgcttatcattaagcaacataccattaagcttgtcaatagcagcctgagcggtttcctctttctcaaactggacaaagccatatcctttcgaacgtcccaccacatccattgcaaccttgcaagagagaatcgtcccgaaagacgagaaagtttcatacaaagctttgttatcaatcgatgcatcaaggtttttgatgaaaacattgcctttcccactcaatctagtgctcggatcacgattagagagcatgatccttataggcctgtctctgatcggagcatagttgagactttccatcgcacgactcgctgatccaataaaaaaacacaaaactttaattacaaaacagcaaaacaaaacaaaacaaaacagcaaaaagaacaaaaccacaaaagcaaacacatgaacaatattatattcctgtcgtaatccataataataatattaaattcctgtatgattgtttataatatttaccatcttcagggttagcgaaattgacgtaagcgtaaccaagagaacgatgagtcagatcacgacaaaccctaagattgtgaactggagcaacttgattaaagagatccaagagatgtgactcattgacactcggatctaaatctccgacatagagagacgagtttggatgggtttgcaaagcctccgcggcagcagcagcagcagcaaccgccgcaacctgactcacggcagggaaaggaggaggagcagcagcagcaaccgtgggttgattagggatcacttgatcaaccatggccgtcgtcggggcaattccagatgcaaccgccgcagccatagcgataagatttctaggtttttctagggtgagacagagagatttctgtttgtggttttccaaaatttttaggggagaatatttatttttatattttttcctttttttttttgggttactccggtgaataagaagaggagtagagagactcgaaagggtgtgaaagaatgagagttggtatttatacattcgctaaccaaccggtccctacggatcagagtttgatttgacgtggcttttgagttttgactcagctttttaattcacatctgggatctttttgtgggccaatgggctttttctgtcctggccaataatccaatgccacatgttttttttttaatgataatcaattatattatattataaaaatttaaatttatatgatatataaccatccaaatacaacaatcattaaaacaaataaagaaaactgaacacaattttgacgaagaagtagaagggatcatgcgttctaaacggaagccgcaaccgaatgaatctgttaagtctgctcttcatatactcgcaaaaaactacgactaacgtcttatagatgagatctagtgccacatagatatttatgttttttcttaacatcttattactctactttttttttttttttttccgtctacttctccttcttaattattttgttgttatcgtcatgtctgttttttttgttaaaagaggctttattggttcataatttacacgaaattttgatgactttaataatatcatagaaagtaaataaatgaaagattataaactattgctagagagttttttataatcttgttgatttgtttttcacaatctcgtaaaaaaatttaaacaatctctcgattttgatgatactttcatgattttattttgtgaagaaaaatgtaaaaaatcataaaccattaacagaataatttaattcattaacaatcatagattattttgttttaattgaataacgcaaaatatttaataattttataaaaatataaatcaaataacttcagatttatgaagattttatattactttttacaaattctaaactaataacatctacaatagtttagaatctttcatttattcactttcaataatattattaaaatcatcaaaattcttagtaaattaggaattccagatagtgtcaagcaggatgttatcagcaacgtcaacgcagccgcgataaactcaattttatacattaaatcaatatcaacatatttccatagaattgtttaaaacatgagacagatttttggtatgccacaaggctaatctatagaattcatggacaatattttgtggatgagacaattttgatctttaaaaaattccatcatcaataaatacaacagttgaaatctattgaacagagattgctaagtactcgtgattaatagagtaaaatgtcagactctagtcgactaaatattttctaccaccaaaaagtaagttcgatatgggtgatgttgtcattcattttagatatttctgaaacactatctgacatatgtacgaaactgagcatgtcatgcgttacaagactaaattttcatattatcagggaggaatgtagagattaaatatggacaggcttgttgccaaactattgggttttagaaaataagtatcagtttccatcaaaatggcaaaaaccaaatcgcattacacatggaaatgcataaaactataaacttcaacaaaatgcaaatgaagaaaatgattgctctctcttagttctgaaagcaagcaatttggcgcctcaaggcgtatcaaagacgaagagtcttgccaaggaagggaacttgttgggttaaggcaagagaacctctatatatatggtcgatgaaagactacaaatttcgaccacattttaagcgagacgagtgttagggtctgcgaaactaccagccatacttcttgaagaagtccctggttctctttctagctcgagtgaaaactataactatgcatgcgagcacccatggaggaaaggtcccaatggagatgttgttcttgatccaagctggagggtctttcaatagaaatgttattaagagcgtaacaatcacaactccgagaatgattctggtgatgggtttgagcagggaatcctgaaaacaaaaggtgttcaaattaatagtgttatcagatgaatcacccaattaaagctgcatgttttaatgctttttttttctgttcttgcaacaatattatccaaagactttttacgccccaacgaagtcagaataccatgacatccattctagtttctacatgcgtattctaaatctatgagccataggagtgattccaagaaattgtttactttaagtaagaatacaagctttgacctaaacctaaggttccatgagacaccgaatccacgttaattgatattccagggcaattgaagagtaaagaagcctagaaagtctagagacatgtatgaggtttatgagcacaatcaaaagaaaaccatcaacttatctaaatgcagaacgccaatgtagagtaattctacaatccaagggtatgaagaacatgtaaaggagacaagaagcagattgggtcctatcctattccttaatcatgcgttcagagaaggtccaacagatgcaatgcaacaatattcaccgtgagtttattcattcaagcatcagtagggaactataactaagctaaggagatcgttctctgtccttttttcctattgcgtaagtgaaaactcaaaatcaaaacaatcagattacctgaggttcaccgtcgatgtaaatgacggcaccatccctataaggcaacacagaccgaccattcctagggtgaaatctgatcggaacagcacgacctttctcaacgttgaaagcgaagattgctttcaagccatatttctcaagaatagatcgaacctcgagctgatcctgctcataaccgccgagatttgacttgaacacatcgatcggaccttttccacacttatacagatgaatctccacctcaggaaccttcgccgccgcggtcgtcgatctcaattcactttccggttgagaattttcgagcaacggagtagtctcttcaatctcttgatgtggtggtggtggatctctctccttctccttctccgtcatcgatgacatgactaacaattcaccgtccgatggaaaaaaagatttataatcccaggaaagcaaaaaataaatattctgttcataacgacgtcgcttagtaaaaggcctcgtaatgtttgggccttatgatgggcctaaagggtataatagacaataagagattggttattcggttgttaccttttagttcgtcttctcagaggagaagtgttttttttctccggcgaggttggaaaaaaatggaggcagctttgggacttctccggagaatgccgccgaagcagtcggagacggctctatctgctcttctaagcctcattcctcaacattcttccgatcttctctctcaagtcgatctccctcttcaggtattttctatctttatcgagatttgaaaatgtgattttgttgccttagtcgtgcttatctcccaatgtttggtttggtgatgtaatgacaggtgttacgtgatattgaaagtgggaaagatttcatcttgtgtgagtataatagagatgcagattcctacaggtacttttttgctctatttcattgtgtagagagaaaattcaaaatattggatcgctttggtttgggatgatacagtacttcgtgttcatagctaaattgctatttgttggttcttgtaatctttacttttgcaggtcaccttggtcaaataagtatcttcctccgctagaggatgctctttacccatcttctgaattaagaaagcttgaagttgaagccaacgatatctttgcgatctatcgtgaccagtgaggttctttacctacctcgttcaacatgaaaaccatgtagtgaaagtaatttgagttatctaagacggagacatagttagcatctgatctgaaaaaaaggcttgcctagtcgtgagatttatctcatggtttaacaatatatgatatgtgtttcattcttctaatgtatccattagactggagactgaaaaaagcttgcaaagttaccaaaagaacacctgtgttgatcagttttcttttccaggtattatgaaggtggtatatcttcagtctacatgtgggaggatgataatgaaggctttgtggcatgtttccttatcaagaaaggtacattctttctgtagagttcaataacactgaatgttaggcaataaaaactctttacctgagctgttctggtttttatttttcgaagatgggtcaaagtcaggtcatggtcggaggggatgcctggaggaaggagcgtgggatgccatacatgttatacaggtgactctcttaacataccattaccaagcgtgccttatgtgttttaaaatgttgcccattttgtaacacataccaccctcaattgcaactttatcatagtttcctaagcagctctttaatgagacttcatattttgcttctaatgcctgaggttctcaactaggttggttcagaggaggaggaaatggcacaatattgcttaacaagtaccatcatgctttctctgacaactgatgatgagtcttcgggcaaattcggcttatctggatcaattagaagacaagtaagtattagcttctatttagcccatgccttcatagataaatagttcctggtatgaattgtgattcaatggaggaaaaccaaatatctgtaaaagaataacattattctgctactgttgaaattagatgaaaatggagctagcagtagctgacggacacctgtgcaatatggggagaatgattgaagaattggaaggcaaactgaggaactcacttgatcaggttctacctccaatccctgcaccaattccacaaactccgtctacttgtgtaaccgccatatatgctgaaaatggtttcttaattaccggcattcggattgcttagttagttaaagctcatgctacagttgttctgtggtgcttggcagaccccaaaataagtaaacgagaattgtaggataagttttagatcaaatcactttctaacatctcatgaattaatctagaccaagagaaaagaataacgtaatgtgcgtagcttcaagggtttgagaattgtttggtgaaaagcgcaggtttactttgggaagacaagagaaatggtttgcacattgcgtccaccagctgagattgtacaaatgagattgcctgacacctgacctgatgctcctccgatcacgctttatgtaagaaggtctcgatatttgtttgttttggttggtctgatcttaaacgcttctccgagtgttttgtgtggatgtctcttactcccatgtttttctctgacttcaccatcatgtgaccatcttttcccataaatataacgaatgatgcagttttaaaagtcgtataaatattatggaaatgcttggttttctccaaaagtatagaatagcagaatcagtggtggctgcgacatgttgtgaacttaggacctaaagcatcaaacctcatttagtgatatcgcactgccttcgacatgcataccgaatggacaaagaaagtaagaatccttgatgtaatcgccatatgagtccgtttagcgcctaggtgccatctagacggtcagtaactaataacaacctaatcaataactatacaaatatttttgtccaacatataaaaaaagatattaaaataaatttccttttaaccaaaatatcagtttcctttttcggctttcttttttttattcttgttgtagagagagatataaataaatatcgacgacgacggtactaatcgttttgctaaataatttcattcgtcttctcttcttaactctttaaaaccaaaaactgaaaaataaagacaaaaagtctcctatcgacgacgaatacgaaagatctctctcttcagaagaatttaacgaaactcaactgtttcgaattcgatttgaatctcgacccgttacttagcaggaagaagatgaagcagcgcttcaccttcttcttcgttatcttctcttaataatccccaatggcttcatcatcatcccaacgacgctgcgtttttggtaactcactcttcttcttcttcttccattatcactctgtgaattctcttcgattttggattcaattggcttaaagttttcgactttcttcgtctattttagttgggaacattccttacgacgcgaccgaggaacaacttagagaaatttgtggagaagttggacctgttgtctcgtttaggtcagttttatcgttcaattatgatttagggttttgataaaggaaacacttttcttcaaacaaacgaaacacagaagcctaaaaaactttgctttattggattcagattagttacggatagagaaactggtaaaccaaaaggctacggattttgtgagtataaagacgaagaaacagcattaagtgctcgtcgtaatcttcagagttatgaaatcaatggtcgtcaattaagagttgattttgctgagaatgacaaaggcactgacaaaacccgtgatcaggttactcctctctctctttcttctttcaatgttggatggtttttaactgttgtcaagaagttataactaaagatggtaaatttgggttttcagagtcaaggaggacctggtttgccatctactactactggtatgttttgttttcagtctctgatactttactgactgcaattgtgtttggatgaacacaaacttatcgttgttcttctttcttttggctgtttagtgacagagtctcaaaagcagattggagggccagtagattcaaatatgcatcagccagttggtctccaccttgctacaacagctgcatctgttatagcgggtgcgctaggtggtcctcaggtcggttcgcagtttacgcaaagtaatctgcaggttccagctagtgatcccctggctcttcatctagccaagatgtcaagaagtcagcttactgaaattatatcgtccattaaggtgtgaatcttgatatcgttttttctttctttttttgggtgcattgttatactattggaagcgagttgtgtgatgtgattgtgttctctcaatgtcagttaatggctacacaaaataaggaacatgctagacagttgttggtttcaagacctcagttgctaaaagctgttttcctggtactcactcatcctcttattgtgcaaatcatttttcattattgacaaatatttcttatgatacttacaccatatttgaacctttactttgtctacccttgtaggcgcaggtaatgcttgggattgtgagtccgcaagtggtaagttttccatcttatcgaacagttttgtgctacttccttctttatctatctgtcatgtcttaagaggactattgccattcttgaattgtgcagttacagtcgccaaatattgttcaggccccaagtcatatgacagggtcttcaattcaagatgcgcaattatctggtcaaaaccttttaccgccactggcacaaaggtcacagcagctaagtcgtgctccccatagtcagtatcctgtccagcaatcttctaaacaaccttttagtcagattccacaactagtagcacaaccaggtccttcttctgtgaatcctcctcctagatcccaagttaaagtcgaaaacgctccattccaacgccagcaagtggttccagcttccaccaacataggttatagtagtcagaattcagttccgaataatgctatccagccatctcaagtaccccaccaagcattaccaaattctgtgatgcaggtgagtttccacaatatttttatttgtttttttggattcctctgaacataacttctcatgtgtaatttacttacattacagcaaggtgggcaaacggtatcattaaattttggcaaaagaataaacgagggtcctcctcatcaatcaatgaacagaccatcaaagatgatgaaagtggaggataggagaactacttcactccctggaggtcatgtgtctaattcaatgcttccgaatcaagcacaagctccccaggtattatcaatcacatcatctaatgtcgcttagaatgccctgaataaatctattaatcggtaaaatccttactcttcttccagacacatatctctcccgatgttcagtcaacattgctccagcaagtaatgaaccttacgccagaacagttgagattactgactccagagcaacaacaagaggtcttaaagctgcaacaagccctcaagcaagaccacatgatgcagccttcatagcattgaggtaggtttgttatatatatatcatcgacctgtgttgctgtcattcttctctgtgatatttgaatctaatactcgtctcggtttcacctctctgatatatacaggggaaagcaacacggttggtcgatttcattgaatagatcaaaaaggatatttttccgcatacaaatcaccatagaaagaagaaggctctctcacctgaattgaggtgagtgattgtacgattagtgtagcatttatttgtgctgagtttgtcttatagaagaaacattcagccatcaaaatataaaagaaaggaaaagttataagttcaaagtctcagaccaactgtgttcgcctctctcttttgatttttattttgtttactgtctttgtttcctgcattaacacacaactctcgtactcgttcgttggttttaatcctgtggcccctggtttggtcactggtgaagattttagtattttaataaacattttattttcactacacatgtatttcggctacgcttacaagttataaatatggggaaaaaataaggttgactaaaacgagctttgacaaaacaaaaactgagattgttttatttgatgaagaagatgttgatgcttttcttttataaatatgctgttgtgggatcaaaacagccattcctctgattctcttcaagtttatgtaaaaattataaataactcaaatcacagtagtcttgtctaaaatctgcaagtttttatttgtaatcggacatcaaagaaaaatcctgcgaatggttctagcaaaagcccgagtcaccaatcttccaaccaagtcacctggcaactgaagcaacctctgttgtgattcctgtggaagctgccacgtttcattcaaaccccaaaaaagacgttaggacaattattctagtatcacaaaatcttaaatactgtaatgaactcgtaaaatcaagttcagttttgcaacatctgttacctcaggtaatatggagagaatcggaagcatctcttgtgctgatggaagctgatacatgaccagtgatgcttcgtctagaggcgtgagcgcctcaccatatttactcaccgcttttacttgctgcaattttgttgcccaaaacattaattaaagataaaaatagcagaagaaaagagaaatttgttaccgtgcttacgcttttagccttttgcatccctgagaacaatgagatgaggcgatagaaagttctaaggtttgtcatgtcttcttctgtcaaggaactcgatggtcctgaaccagaaaatgtaaaagagtccaaagttgccaatccatatgcatcaagaccctgttgaataatcaatccttttgatcaacaaacaatgatatttgcacacacatattgcaagggatttcgattattatcaaataaacataaatgttcaaatagtaatttttgtccaatatttgcttctcaagccaagcgattgaactgttgtacttttattgaagagctgataagacatattaaatgctcaccttagcgaattctcgaagaaggatttctcttacaaaagaaccctgttcaatgtttaaagattttaagtagttgtaacatcagttttacaatccgtagtacaaaaactaccacttaagtatacctgttccgtgaaagtaaaagcaagcatttgcttcatggcaatattagattctgtccccaccactggtttctgaactaatgctgtctctgtcctaagagactggagaaagtagatgtggataagaaaccaaatgctaatatttaaacagaaaaatcctataacacccaagctattcatttccccaattatcatgcagctttcacagtctttcgttggctcttaggcagtttggttgtatgattattcagctgtttactgactaatttattattgaacaccacatagcccattaactcaaagacacaagcttagaaaccctaataacaaacaacaacgtaactgaggtgctaatgtacaacaaaaattagcacatataaacgataacgaccaatagacttcagtgcattttgcaatagtcaaacaaccaaaaagggattaaaattcagtctcacctcagaaagcaaagactcaagacggtcaattcggaaaacaccttcctggcagagacgcacatataaatgatagcgttcaggaagaaacataatgtgaaacaagggtgaccaatctgattagacaagatagtttggtacctcatataaaagattttgcagagagcttttcagttgtggagagctgtcggttagaatctttctagcaatccaagggtatgtactgcctagaaccttgtagtttgggcttataccgatggcaatgccctccaaaacagcaagactggggaaccaaagatgagaagccaaaaaattatgtgaatgctgcctcagtagacagaaaatggctaatcacatataagccgtggttgagtacttgccaaataattgaataaagcataacgcatagaccagttggacctacaatcttgtgcaaaagctctgagcatttttctatgtttatttaaacaataccatatctacatgacttaaatatttgagaaatctcaaaagctcaaaacatttaagtggctactagagcaaaaaaaatagattaagtacctgcggataactagagaaaaataagggggtattctgaatttgaatcggtacctgaaagtttgacaaatgaatatcagcatctaataagtaagcacaaattctaagtagagttcttttaatgtccctctgtaagccacatattagttgaagtaaagtgttactacattgtttttcccaagtcgccaagcaggtcaccgaagcttatattgcgaactcctctagaaattgcatcttgaaaaacatctgtagaaaagaaagtggaagcaattgtttcagaacagcacgatcaaaactttcaatacaaacaagtaaatacctgcataaaaccaaaagcaaaaacgaaccggttaaagcctttgtcacagcgctcttttctgctgttggtggaagaagcctatagaagttttgcggataaaattaggaaatgttgacaattaaaagttcagattcagatagacaccagtgactagagtaccccagagttacaaagtctttagccagcgctttgaagtcacgatttacaagatgaagacatgcttccatgaatccatcacgtaattctggcctaaagtcccccatcataccaaaatctggcagcaaaaaaaaaactaaaagttcaattaagttataaacaaaagatacttcttgggacagtaaaatctctctttagtttgtagatatcaaacacaagtatatatacagaaaatcagatatccagagtcatcgaaagtcccattcgtatctggagcgtataacatcgaatcatcgaaaatagaaaaaccattcagcaaaatagtacataggtattcacgtttctggttaattcgcggtatgatgacatagattagctgaaacacaggtagaattgaactttaaccaaagcatcagtaaccagtcgttattctttgaacgaaaaacaagtatacaaaaacattatctggaattctggatcatggagggcagcataataacacataacgttagtatcaagatcaacgaatacctaagtatgcaagttgcccatcatacgtgcgaagaaaattcccagggtggggatcggcatggtaaaatccatactccagaagttgattaaacgaacagtaaacgccaacctcaactaaataaaggtcattaacttcattaagcttctgaccctgccatacagaaagtagaacacacaaaattatagtgtgcttaagatatataaaattcctttgactgagaaaacatatacaactctttgacgcaaaccaaaaaaatgatttgtcgattgcgaatgtttgacttcatacctccacccattccattacaagaactttgctggtactgtactctgtgtacatctttggaaccaagacatctttgatgccaccatacaacttcctattcaagcatacagaatgttactttagggaatcccttatagaagatttaaccattagatgagctaataatgttgtagacaaaaatatcatgttttccagtaccaagattacgcaaatcaattatttataatgaaactacaatgttagtcaaaaccataacaaatataggatatcaaacaagggtggaaaagactcaaaccttagcaggatttacctaaattttattccgttttgagcttcattcaagtaatccatctcctgcattcaatttgatttacctgtattcaatataaagctctaagatattcctcgaacacgaattaaatgcaacaactagtccatctaaacaatctttcaagacattaaagaaatcgttagcatcgtcaccttaaccgctgaaaatttctatggaacagaaaagcaggattgcataaagattaaagagaaaacagtcaagtgctcttttttgttaatgacgaagaagagaaacatcaataacttaccaaattcatcaagcaaaatatactcttatgaataaaaatgaaaatgtctacgaaaaacatggaaacctacttgtgataagagtgtatcctttaccttaaacagacttgttgcccattcatcaacaactgcctgcaaatggaacatcactttttagcattggaacgggttaacaggacactctgattaacttaggctccctttttttctctcagacagaaaatgagaatcaaaattctttaaaaaatttcgactagaacaatctgaaatggattctagagtaagtttcaacaaatttaaatgttcttcttctgcaaacctaaggaagtttcaaaagttaaagtaatgttgacataaaacaattttttatcagttccaaagaaggcaccaatttacacacaaatttcaagtcacctcgagatcagagttgaatcttccagcctttttaatcaaacccgctatataccgaagaattaatgtgtccaaagcaattgcagctcgtacaccagggcgctgcactttgacagcaacaacctttccacttctacggagcctagcttgatatacctgaaacgtggaccagagtaggatccacataatagaataagctctcatataaagattggaaataagaaactagcattaggatcagctttagaccatcaagaacatgctttcccacgtacctgtccaagggacgctgcagcaacaggctcaggagaaatctcagagaaaagctcatctataggaagaccaagttcatcctcaatcatattgaaagcaacttcggttgaaaacggagttatttgatcttgtagcagggagagttcatccaagtatataggaggtatcaaatcctagtttcgtgaataaagctagttcagaaaccataatcttcatagcaataacaatcacaaagctccagaaaataagaatcaaacatgttaagaaagacgcttacaggacgagatgaaacagcttgagcgattttgacgtacgcctaaaaacaaggtcaagacatgataagaacactagcattgagcaaattgatggactgatgatgaaatctcaaagaacacgtgagagataaccataccggacctagctccacaagcaatttcctaagctccgctgctcgtacctaatgataccaattcgtgaaatcgaaaacgaagcatgagaacacaaaatcatcattatcattgaagagcaaatcacgaaattggaaaaaagaccttgaacatttgatcagagcgttccaaagcctcatcagctaagcgaagcccaaaccaataactaaacgtagttccgatctgagctaatctacgaagcagaatcagaggtttcttcttatacatcccatcaatcctgggaaaattgtactccgacaaagaatcagcctcatcggcactgagactgaacaaataaccggatttactagtgaaactatctacatctctagacgcagcggagacaacaacggcggagtttcctcttcgcgacggccaagatggttgtggattaatcagcagattgggattggcgggaaaagaaacgattggcatagaagaaggaagccgaagcatctctttcaaaatctacagagttatcttctttttcttttcttcttcgccaatggttgttggtgagattttgaatatcatgcagtggattcttctaagaaatggcaaataatatggttctctactgttttatctcttttttgccggtcacattctttatactttctctctctctcgacatttgctgggattttctgtgtcacacaaatggcaccaatctttttgtacgttttttaagtatttatatgtcatataaatgtactttatttagctactaatcatattttttggttagtgactaaaactgtatcattccaaactattcataataattacgtttaaaacttaagaaaaacatatgaaaaagtttgtagattgtctgtttatttatctgtccttggatgcttcctttgaagaaaaagaaatttagtgtatatataaaagagataaagaatatatcacatccacatatttggtaattgatatataactctgtagatcttattccttttagataccaatgactcttctttttatgtaaaccatcaaaatctgaaacaagctgaataatgaaatacacatatcttaaaatatatttttactagtagtagtaattagtaaatatcataatatcagtttgtggagtattttagaaagaattcgaacataatatattttcgattttttcctaaatgtaaactttcgaattttctctagtatgttcttaatgaaaaaatgtaaacttaccaaatgttgctgatatatttacaaaaatgtaaagttagtgtcgacgatacatgtatataaatataatcagtacacgaaaaaaaaggttaagaaagattagagattggtggtgtggtgaacaagaagatggacatgtatcatttgacagaatacatcggcgtggtatcgggcgtccttatggtagctcttgcttcgtgcttgtatggccattacctacgtcgcatggtatgtccatgttgtgaacctagactacctagtgactctaatgcctaactattatcattttgctactgattatatttatataaatgtattgtcgaaaattgtgcgtccgtttatcctctacgctaaacggactctagatgaataattatttgtttcaaaatattgtaactctattctattgatatttatgagattttacaaatttcttttcaaatagtttgtacttggaagctgtcattttcttaggctttgtttttctttttcgtcgagttcaatattccatccatctcatcgatttatttcttatatattacatgtactacgttatgtgcaaaactttgatgatatcacaactaatatatcacatccaagttttgcaaagcatgtcgtcaaattataaacttatcaaaacatatgcaaccccattaatatcaaacgtatgtaacatcgctagataaccaatcagacccctacgactaatattttcgaattcgatacgttatggtaagatttaaaatcgatgatattttagtgacatttcaaatgattaaacatataacaaaaaataaaaaataacacgaacccgagcatggggttaagatttgcgttttgctcaacgaattagcgttagcgtttgcaaaaaaaaaaaaaaaaaaaataggtttgcatcaacagctggcaaaaaagaaaaagaaaaatcaaaaccggcgagacggaaaatttcagcgtttccgaactttccattagagtcgcgagacgatagatgagactcgttccagaaatttaatcgttgcttctcttcccagctgatctgcgtccaacatcactgtttccaggatcttcagaatcagcgaaggaagaagataagaggacgacgaagtaattgaagttggagaatcgcacatttggctctcgatatttgctcaatgacttcttattcggttgcgtccatttttcctctacgtttctgtttccagatctcttgattctcctctgcgttatcgtaattgtgctggaattttgaataactttgcagaggtagccttcaatttaggatcggagttcgtaaataaggtgatttagcgaagatgatggtcgaagatcttggtgtggaagcgaaggaagcggctgtgcgagaagtggcgaagctcttacccttacctgaacttttgcagtctatttcttcaatcaaggccgattacatcgctcgtcaacaggtttgacatcttgcttttgaattgcaattggaactgaattggcttttgaagtatcatttgcactgagtattagtgattcctgagcaatgctagatttgagttgttaggttttgatatgctattgttatcttttattttcgattttctggaaatttttaatgacctgactagtgatgcttgctgtttcaatcaggcaaatgatgcacagctcagtactatggttgctgagcaggtacagctttaatctggccttctttgtactttaatgtatttcgacttttttgttgttcttaagtaatagctgttgacaaacttcaggttgaacaagctcaagctgggttagagtcactttcatcatctgagaaaaccatttatgaactgcgggataatttcatttctatcgacaagtatgtttttgcttgactagagattcttgaagctgagttaccaacttttgcatttctctccctctaacttctcttcttgtgccacaggctttgtcaggaatgtcaaactttgattgacaatcatgaccaaataaagctgctgagtaacgccaggaataatctaaacaaaactctaaaggtagatatgccgatgagcactgattgtattgcttacagtatttggttcagtgttgtccttctaacttattcttgaacgcaaatatatatagctctgcatggtcgtctcagatgtttaaatgctttccaagtttttgtcaacttatttttacctcattctcttttttcaaggatgtagaaggtatgatgtcaatttctgttgaagctgctgcggctagggattctttgagtgatgataaagaaatcgttaacacttatgaggtagcatgagttcctcttcccatggattccaggcatttctgactgcatcactttgaaaaaaagaacgtttggtgtaagacataatattctgtttttcttccatagagattaacagcacttgatggtaaacgaagatttgcattagcagctgctggagaggaggttgggaggctgaggtttgtatatattccactcgtttcctttctttgctttttgtacttacatgaagtgagcccgaaagctttaattcaagagttactggtgtgctatgaaagaaaataggtctctatgctaaagtaatgagcagtaggtagagctgttactcttttggtagtgcatatgatgatttgatcccgcctctggactgtcttttctttttacatgagcatgcataccaacttctaaagagttgttttgatgggttcagggagtattttgaagatgttgatagaacatgggaaacattcgagaagacactatggggtcatgtttccaactattacaaactttctaaagaaaggtattttgagtaaatatatgattatgctcaacttctccgtgtaattccattttttttaattatttctactgccttattttagaactatgattcttgctggttttttataagagtaaggctaggaagttagatcaaggatgcaagcaatgtcaaaagatgagatggacatagttggactgtaccctttattctgtagctatatatgagcatttatatgataatacatagtttatgtaatgctctgttctctgttttatgttcttagccagaccttggggattaagtacacgtttagactttgctccatgttgaaataagctattttcctgttgttaagctcttaattctgctaagatatcaaatcttacatatccttttggtttatcttaaacttactgatgtatctttgttctgcagtccgcaaacactggttcgtgctttgaggtatgatcccccaccagagacattctttacctttgtctatggcatatattcccaaattattacgtttcagtaattttgttgcaaacaaatctattttaattagcaaggaagatagtgtatacctattttctggtgattagcatcaagatcagttcaaactggtttagtaggacagcgaagtcattgtgttactgtgacaatcatttttagacaagcaaattgtttctttttacttcctttaatgcaacatgcattgcaatatcatggattttattttggcattagaagtttcttaaacacaaagtctcctatccagaagaaaatgagtagactaatttaaagtgaactagttaactagaactggtactaactttcaatggtttattctatcaaagggttgttgagatgcaagaaattctagaccaacagcttgctgaagaagcagcagaggctgagggagaaggtgcgatggcatctgtagcaaatcctcgaaggcctggcaagtgagtctgatattttttgttcgtatttgtcttgatttgttgtcttatctgttattcaaaatatctttcacttttttactaggggtttgactaagctatattttgcattgatttaatgtcctgaaaagcaatggaattttattaaagtccccataatcatttgtgacatgtcctatatttattctgttgaatccaggaaatctactacaacgtcagcgtcgtcaaagggtcttgctcaacagaaattaaaagtccaagggaaaggctacaaggacaaatgctacgagcaaattcggaaggcggttgaagatcgattcaacaggcttttgacggtgggactttctttttgaaaatttcatttgatggcatagctacaagtaatgtgtttctctgtgtggtcatcctaacactgaactattgaacagcttgtctttgaagatctaaaagcagctttggaagaagctagaatggtttgtgcgactgtttcccttgctttcatacacttttcttcattttttcttttctgcagtttatgaaattatattcaactatctaatatatttttgtttctcagtagatcacctttagttgactgaattagttttttttttggttcttaataaatatggttgatgaactagtagtatgttactgttctgatacaaaagttccaaattggcctgaccgtcttatattactgttcctgttccataatgattgatgtcaacctcgttttcttctgttatctttcacaaatatatatttatcaactgggttttcactttctttttatggtgttccacaactagattggagaggaacttggagatatttatgactatgtggctccttgttttcctccaaggtttgttcctatctcgttttcctcaagtggacaatgaaagattacagcttaaaatttattctgttccccaagtgaaaaagggttccttagcaatcttctttgctggcagatacgagatatttcagcttatggtgaacctgtataccgagagattcatacaaatgctcagattgctcagtgacagagcaaacgatctgacaaatatagagattttaaaggtatgtaaagcatgattcttagttctcccatgttgtgtcgcaactcaaactttgcagatactgcttttggtgctttggctctgtgttttctgactgaatatcaaggacatttttaatcaaccatgcatgatatttaagtaaatgtcaagctagtccgagttatttgacagggaacaccatgggaaattataagagggggtactaatattatgtgactgtctttgtgttgcctcatcaaaatgcctcattcgttttttaccttgtctctgtgcattaggtatcctttagagagtgatgtatcttttctttctctcttcgatcttgctaggtgactggttgggtggtagagtaccaagaaaacttgattgcacttggtgttgatgattcactagctcaagtgtgttctgagagcggttcaatggatcctctaatgaatgcatatgttgaaagaatgcaagctacaacgaaggtaatgacatacacgtttgacctactctgctagtttttgacgttaaaaatttttataattctttttgcttaaacttttgttgccaattctttggttgcagaaatggtacatgaatatcctagaggcggataaggtgcaaccacctaaaaaaactgaggaaggaaaattatatacaccggctgctgtagatttattcagaatacttggagagcaagtgcaaattgtcagagataacagcacggatgttatgttgtacaggattgctttagctattattcaggcaagttaaagaggttgcaaagacatttctttgttcggctatgaactgaaaatattccatttccttactcaggctatttatttactatatatactcagaaatttcaaatcgttctttgctttcttctaagactcgtgaaagttaatgttggagactttacccattcccagctttttttttcatatctcacccaaaatcgttgaattccgtttacccccttttttctcttttctattttcccccctctttcattgtgtctaacttttatacttcttaaatttcgtaacttttgtagcattgtgcatgttctaaattttgattcatattgtgaattacttcaggttatgattgatttccaagcagctgaaaagaagagagttgatgaacctgcatctgatattggtctggaacctctatgcgctatggtatgtcaaaagatatgactcttttgatgacactatttctttctcccattttcagacgaatatttatatgttaatattgactacagataaacaacaaccttcgctgctacgaccttgccatggagttaagtaatagcactttagaagctcttccacaaaattatgcagagcaggtaatccagctgccagtttctgagctcaatttcgttgcaattgattattttgtttggatatgtcaaattccactgcatcatgcccactctcagtcccactatactccacgtctatgtgcacatacactcttgtttgcatactaataaaatgcttctctaatgtggtgtttctgtcaggtgaattttgaagacacttgcaaaggtttcttggaggtggctaaggttcgtcaaagattcctttttctccctggtcttcaatccaaatatagtttttgcatctcgatttatggccttacagttgcccagatggctgttgaaatgaaatttcaacttgatcttgcgatctttaaagttaaaatttatgttggattttacacaagtcccatctggtcctttgatttcaggaagcagtgcatcaaacagttcgcgttatctttgaggatccaggagttcaggaattacttgtcaagctttaccagaaaggtatctactattctgaagaactaatctattagctttactaatgtgtgaatagaggcagtcgagtcgttgtcacctccttgatactgttgctactggtttccattgatttttaatagataaaactattctcatatgcattgattttctacatgttatataatgtaatagttgtgttctttataacataatcatttcagaattaagatatggtcttctgtccaacttaattctcagtgagatcactaattttacttgatacgtgttcttgacttgttcctcctatggtaatgtaaataacctagctattttactttatagaatggtgcgagggacaggttaccgagtacctcgtggcaactttcggtgattatttcacagatgtgaaaatgtaagtttttctttcccccttttgtttaacaagagccaaaaatgctacaagtctattgaagatgtcgtggtgaatactggatgcaggtatgtcgaagaaagatcatttagaagatttgtcgaagcatgtttggaagaaacagtcgttgtctatgttgaccatctcctaactcaggttcccccatttattctcaagcatttttaccttttatatttcatcagcatacacaaacactgaacctttggggttgacgtgtgtaattccagaaaaactacatcaaggaagaaactattgaacggatgaggctagatgaagaggttctcatggatttctttagggagtatataagtgcatctgtaagttggtttcagcacttaactcatttttaacctgaataattttatatttctttgaagtattgcttaatatttccactggaactgtgttacagaaagtggagagcagaatcagaataatgagcgatctgagagaacttgcatctgcagagagtctagatgcatttacactcgtgtactcgaatattctagagcaccagcctgactgcccggtaaatattatctaaacaaagcctgctctggctttttacaatatcagtatacacagaatctctaatatatggtatgcaggccgaggtcgtagagaagcttgttagtctgcgtgaaggcataccacggaaggacacaaaagaggtaaacataccaaactctcttttttggaaaatgctgggttataattgtagcgaatcacatggatttttaaactatggttacgagacttcaaatggcgaagaattcttaaattgacgaaatggttatggtgatgaaaacaggtggtacaagagtgcaaagagatatatgagaacacactggtagatggtaatcctccaaagacaggatttgtattcccgagagtcaagtgcttaactgcttccaaaggatctatgtggcgaaaactcacttaatctgtaaaacagcgttcagcgtttgcgtccgtaactgcttttctagttgagatgatgttctttctccaaattatggcgtttgcgtccatgtcttctttttctttgcatggtatctttcctctgtaaattctgtgttttctcttgttttgttctttttcttacctttattcctggatttgaaagttgaaacgctcggtggccacttgcactaggatattatcccgttgtatttaggaggcgtatttttttgtcgcaaattttaattctactgtttcatttaattttgataaaatcttcttaaagttcgtttctctttcataacaaggtagctcttattgtttttagaattatttctgatttgtgaaattttgaatttgaagcatatttttatcatgaatataaaaaatgttggggattataaaaaagtttgtaaattcactcattggcagctgatttagccactcacaatatctaaataaataattgtaagcattatcttgaaatattttctgaaatgactgtttcttttttactttaattaaattttgttctagaaaccttttgatcataatgaaaataaagagtccatccaccacatggggtaagcataatgtgtgatatttaaagggtaacaaatgtaatctgctttttattttactttttacctctactcaaattgtatgggcagttttttttttttttttaaatgataagacaagtatctgtttaatggtattgtgatgaaacagtagtaaagtcatatcgggcacgccatactacttccacagtggaacttggccaaattttgtctttgccgtctctacagtttcttccaccaaattttttgttgacaaaactcaaatctttcaatctcatctctgccaaagttgggtttagaaagaatatcagcaaacactaatatctttattgttgcatggtttatcaatcacaaaattcacaaccattgtaaaaaaaaattcacatttttggtatgagattgctcacatgatagtgaacctctttaacattttaactttactttcataaatacgggattacgaatcttacttgcattaaaaatttagaaaaggtttttctacttaaagaaaaaagggacccaacagagagaggtttgaccaggagaaacgggtgcatagccttaagagctttcaactactttaccccaaacccaaagcgatgtcactttcaaccatctcttctctcccccgaacccgtttttttgaccggtcagttcgggcagcagcaccgttacgggcagcttatattcctcgtcttcctcctctacaccactgcatgcccataaataaagcccgttgagatctttaaaaatattaaataatatatcaacgaaaaagctattttattcataagaagaaaaagagaggaacaacaacaacacactaatcatagtttctctggcaggcttgttgttgcggcttaataaaaagctcttttgttattattacttcacgtagattttccccaaaaagctcttatttttttgtttaaaaaaaaaagtttcatctttattcaacttttgttttacagtgtgtgtgtgagagagagagtgtggtttgattgaggaaagacgacgacgagaacgccggagaattaggattttgattttattttttactctttgtttgttttaatgctaatgggtttttaaaagggttatcgaaaaaatgagtgagtttgtgttgaggttgtctctgtaaagtgttaatggtggtgattttcggaagttagggttttctcggatctgaagagatcaaatcaagattcgaaatttagcattgttgtttgaaatggagtcgagttatgtggtgtttatcttactttcactgatcttacttccgaatcattcactgtggcttgcttctgctaatttggaaggttcgtggttactcaattactcagctttactcgtttctcaattactttctcgattcttttttatttggaggtgaatcgctatctttagtgtctgcattttgatttatgaaaattgttgttgttctttgtatttgtaagatttagtggctagtactttgaatacactgttttgcttttcttgttcagatcaactttgtatattgtaaaggcatgttctttgggttgaaaagctgggttatttgatatcttaagattgatgttgttgatccaaacattctctgaaagacttcatttgtttttggttttgtaaagaatttgtttaattattagcctctaatctcagagaggcctgtttgaatagttctctcttgaaattagacttttcaccaattgatgctaattgtgtagatttgttgttcttgttataggtgatgctttgcatactttgagggttactctagttgatccaaacaatgtcttgcagagctgggatcctacgctagtgaatccttgcacatggttccatgtcacttgcaacaacgagaacagtgtcataagagtgtaaagctttcttctactaatcccactttttaaactttgacctcagcgtggttaccgacatttttgtttcttttgtcaaatacagtgatttggggaatgcagagttatctggccatttagttccagagcttggtgtgctcaagaatttgcagtatttgtaagttccacttatgcatcatgctttaacaaaacaaatccaagatttgacagaagaagcactggagttaccttttgtaattgaaatctttttaacaagtttcttattttcttacagggagctttacagtaacaacataactggcccgattcctagtaatcttggaaatctgacaaacttagtgagtttggatctttacttaaacagcttctccggtcctattccggaatcattgggaaagctttcaaagctgagatttctgtgagtatacatatgctttaccggctcagttacagtctttgtttaatcttaggttttgttccaatttttgactctttgctgaaaattttacatgcaagaatagccggcttaacaacaacagtctcactgggtcaattcctatgtcactgaccaatattactacccttcaagtgttgtgagtcctctcattaactttcatttatgtctacttcattctccctcagttgatttgttgagttaatgcacttaaccttgatggatgcaacacagagatctatcaaataacagactctctggttcagttcctgacaatggctccttctcactcttcacacccatcaggttctatgatttatcctcttcagttatttcagttgttgtgtcagtgtctgaacttattctgaaactttcatttccttgtgcagttttgctaataacttagacctatgtggacctgttacaagtcacccatgtcctggatctcccccgttttctcctccaccaccttttattcaacctcccccagtttccaccccgagtaagcctcctctttttagtttacattataggaaacagaagatgaaatctttgcttctctgtcaatcctttttctcatataactcatcttgccaataaggcaataaccaaatgatctaatttgatttcaggtgggtatggtataactggagcaatagctggtggagttgctgcaggtgctgctttgctctttgctgctcctgcaatagcctttgcttggtggcgacgaagaaagccactagatattttcttcgatgtccctggtgagtttattattcgcattagtttctgttcttagccagcaattttgttttgcagaaaagtattggaacaactgttaatgaaaatcaatacataagtcattgttttttaagttacaaactcttttgagtaaaatctcgattgcaaaatctctttgcagccgaagaagatccagaagttcatctgggacagctcaagaggttttctttgcgggagctacaagtggcgagtgatgggtttagtaacaagaacattttgggcagaggtgggtttgggaaagtctacaagggacgcttggcagacggaactcttgttgctgtcaagagactgaaggaagagcgaactccaggtggagagctccagtttcaaacagaagtagagatgataagtatggcagttcatcgaaacctgttgagattacgaggtttctgtatgacaccgaccgagagattgcttgtgtatccttacatggccaatggaagtgttgcttcgtgtctcagaggtaaaaactaaacatcttgtgctctctctcaattactttgacgtgaagtgttttttcatgttttcctttatgggttcataattgttggttacactaatgacacagagaggccaccgtcacaacctccgcttgattggccaacgcggaagagaatcgcgctaggctcagctcgaggtttgtcttacctacatgatcactgcgatccgaagatcattcaccgtgacgtaaaagcagcaaacatcctcttagacgaagaattcgaagcggttgttggagatttcgggttggcaaagctaatggactataaagacactcacgtgacaacagcagtccgtggcaccatcggtcacatcgctccagaatatctctcaaccggaaaatcttcagagaaaaccgacgttttcggatacggaatcatgcttctagaactaatcacaggacaaagagctttcgatctcgctcggctagctaacgacgacgacgtcatgttacttgactgggtaataacaacataaaacttccatttgaccccaacaaaaaccattgaaacgagaatctaatctcaaatacttgtttgttggtttaggtgaaaggattgttgaaggagaagaagctagagatgttagtggatccagatcttcaaacaaactacgaggagagagaactggaacaagtgatacaagtggcgttgctatgcacgcaaggatcaccaatggaaagaccaaagatgtctgaagttgtaaggatgctggaaggagatgggcttgcggagaaatgggacgaatggcaaaaagttgagattttgagggaagagattgatttgagtcctaatcctaactctgattggattcttgattctacttacaatttgcacgccgttgagttatctggtccaaggtaaaaaaaaaaaacataaaattattgaacaataacaaattttacaaggtaggtagtttttttacccgtaagttttcgttttttttaattgttaatgtaaaatgaaatctagcattcaaagatttgtgattttgtgctatggttcgattaaaagggaaaaaaattgtaatctaaagatttgtgtaagattactgtctattgtatgaagtatgaactatgaacacaatatatgtacatccaaaaatacgttaaactaactccgctgttttgctacaaaaaccctttcaattttgttctactaaacgtcgttagaatacacaaaagcgaaacagcgtcgtttatttataatgcgctactcacatgacgccgtttcacttttgtgtatacaaacgacgtcgtttaatagaaaaatttttggaagggtttttgttgggaaaaaaagagaagaagggtttttgtactttgtgtcttcttgttccatcatcgtgacacgtcacacctccattcatctccgccgtcctcttcctgttcttagtcgcggctggaaaaaactgtggtgagagagagaagaagaagaagaagaagatgagtaataatactaataatacagagatgaataatctagcgatggaagaagaggatgaaggagagattttccttggtgaatccgatgtcctccgtgaaatcgatgtcgacgaagaaggtttttttttatctccttcaatcgtgatttttttatcgtatgtatatatgtgtatgtgtatgtgactcttctattttcgattcagatcttcctgaagcagatgatgatgatatggacgatgatggtgaacaatttggtaacagattcaccacctcgtgtttcctcaatatgaaattttatggttgttaattctaccaaatcttactttcagatgaaaacgatgactctgttcacacattcactggtcacaaaggtaacgtttttatcattttatttctcaattaaatgttttttaactttcatgaaactaagaaagttttgtcttttacaggtgagctttatgcattggcttgtagtccaacagatgctacacttgttgcaactggaggtggagatgataaagcatttctctggaaaattggtaatggagattgggctgctgagcttcctggtcacaaggactctgtctcttgtttagcttttagctatgatggacagttacttgcttctggaggattagatggtgttgtacagatctttgatgcatcatcagggactttgaaatgtgttttggatggtcctggtgctggaatcgaggtataaataacttgtcctatatcatcattgtaattgagatcctcaggtccaaatctagtacttactgtgtggtatttttcagtgggtgagatggcatccgagaggacacattgtgttggctggatcagaagattgttctctatggatgtggaatgctgataaagaagcttatcttaatatgttttcgggccataatctaaatgttacttgtggtgacttcacccctgacggtattgatataagcttctaccttatatgcttctgtggattatctaattgagtctacctgttttaattgtattgtttgactgtgtgtgggtactgtaggtaaactaatttgtactggctctgatgatgcaagtttgatagtatggaacccaaaaacttgtgaaagcattcatattgttaaaggcaagcgaaatttaaacatgttactactgcacaaatactaaatctttcgccttctttgactggtttaaaatgctaacttcttgctttgtgtaggtcatccttatcatacggaaggattgacatgcttagacattaactcgaactcaagtcttgctatcagtggctcaaaagacggttctgttcacattgtgaatatagtcaccggaaaggttcgtcctttactgtactgctgttaccaagctttcactggattgttttatgatctatatcatttcaataagcaagttggtgcttctcatatctatttgacatatcatctaactttttcataatcataccaacaggttgtgagctccttgaattctcatacagattcagttgaatgtgtgaagttttcaccaagctccgcaaccatccctttggctgcaacaggtggaatggacaagaagcttataatctgggatctgcagcattccactcccaggttcatctgcgagcacgaggtataaacccttatagtttctctgagatagcatcaaaacagatattgaaactaaaacaactcctctcttcttcttttttcgattacaggaaggtgtgacatctctgacttggataggaacctccaagtacttagccactggctgtgccaatggtacagtgagcatttgggacagcttattaggcaactgcgtccatacctaccatggtcaccaagatgcggtccaggccatctcagtctctaccaacacggacttcattgtttcggtatctgtcgataacactgctagagtctttgagtcatctgagttccaaaacaaagtgacataggcaagtgaggagaatacttgcagatactatccagacatgttgctatctgtgttcgttgttgtggtcttaattctatgctttgtgggggaaaattttgacaagaaagttatcaatgtctaaaattccatatgtacacggcttaatttattgataaatgtagtctctgtttggaatttgtccttcattttacagttcttatggttcgaatgagattgataaatgttactccttacattgatatcgttaatgaatgagattcatgctaatgttccactagcaattgaactacttgatatcatgagtctgccaaatcgactggagaagtcagatttagggtctgagcatcaccatggaattataaccgaactctttataaaaactcttctcccttgagaagtaagaatgaaacgggcaagctatagagtgagattactacacaggagaagaaacgaatctgctgaaaatgcagccaccggtaaagttggattaagtctctaatacatccgactcctcttcttctcagtctttaaactgatcttgctccgcctcgattgtgccttatctcttgaacctgagtttccaaaactcctcctaccagatcttggacttgaatttctacgaccacgctccagatcctggttttgatccacttcatcatcgtcctcgtcatcatcaacaaagtctccttgacgatcatcctcgacatcagaaccagaaatgtcatcattctcagccttcgcatcagtatcacaaacttccccttccactttccccttatcttctttcttgctgctcgaagaaactgccttgttatctttcttaactgtattcatgagtttcatgtaacggttcctgcttgtcaccaattcattactctctatcaacatccccctcttgtaaccatctctaagaaccacagtgtgagtcctaagcttactagacaagtaaaagataccaggatgattatggagaactctcttaaacctcgatctcaatcccataaactcaccaagatgcaaaatagcatctttctcaaccttcttcgacacaaaaaggttcatgatctcgtgcaaaacagccgccgcccacttatcagactcatcgctagtcgcagacagatgaagtgcattctcataaggagaaatatacggcaacttctgccaatcatcaatccatttcttcatcttcttatcaaccacaaaaccattcgaaaacttcatcggaaaagcaatcgccgatcctttcgtatactctcctttacgtaatgttctagctttcttctccaacacagatacagcatgctcattgctccaacaaaccagctctagctcaccactacatcctcttaacttcgatttgataactctaaagtaatcaggaaactcaggtaccatagtttcaacataatccttaggtaaacctaaatcccatttcaacaaatctagaatctctaatggaattttgttaatcctattaatcatcagcaatttcaaaagcctatcagctaatccttgcttataagtctcactaccgtaaaccaattgctcatcggcatcgtggtttagaatctccggcgtgaggctgatgtgaggatgaataccaattcctccggggagaaactcttggaaaacggaagggaagctacgtatgaactcgattggacgaagaggaactcgtagtgaatctttctgtgaggtgataactgagatcggaactgattttgctggctccgatctgattaggtctttgatactgagaagtggtctgagattcttctctctttctaccgcgtggtcgagtcctctgtctcttacgaatttgtaggtatcttccaccgccgacgtatcggcgaaggttcggtggccggaatgacggcggatagaaatggaacggaaaatggatttcatcggcgatttgattttttagggtttaagagggttttggctcatcaatggtgtttcgaagacattgatgtggagctgtgtgtgtcactcgagactcggaagtgaagagtttttattattggttatgggcttttaagttgggcgttttaggcccactgtagttttttctgtgacgttgcccatctttttttttataatgatgagcccatctaaaatgttattctacaaaacaataaaagaaagaccaggattcctttgcttaaaagaccagggtcctttgctaaaactatattataatgaccaatgaaatcataattaataatgaccaattaaaatgatgacaaaaaaaaaaaaaacccaattaaaatagtaaatttatattatagtcatcaactttaatactttgttgcaaaataaaaggaaacagtcgcataataatccactaatcacaaacctttaccctttcttctcggggccaatcaaaaacttcaattaaccagaaaaggtcagattctccgccgcctcacacgacgggcaacttcagttcctgccgtcgcgttagatcccgccgtcaatcggtcatggcgaccggtaaaacctcttccgccgcgaatcttttcactggctcgacgcgttttgatttatcatccgctgattcgcctccttcaaaactctctctctcctccgatcagctcaaccactgccaccaagctctcggcgttttccggggaaagatccaaaatcctgactcgatcgctcatgagtttaccggtttacaggttatagatccatcctctaaattgagaatattcctcttcctagtgtttcttccttaaaaacaaattggatcataatacactctcttcgaacgcaggctaataggatgtggccatcggagctgctgctaaacagtacagtggctatgaacagtgtcaatgttgagaaaaacagatacagtgatgttgttccatgtaattttcctctctttttttgtgtggatttgctagttagtggtgtacagttctagattttgattttgctttggatatagttgacaagaacaggattgttctgaatccatgtaaagactcatctgcaaaaggatatgtgaatgcaagcttaattaaggtacacttcttattagtctgtttatctgtatctttttgtggtgatagatttttgaaggttttacaatgtgttaatgttatgtagacgtcggagtctgagagtatttctcagttcatagctacgcaaggtcctttaccacacacgatggaggacttctgggagatggttattcagcagcattgcccaatcatagtgatgctcactcgattggttgataataatagggtaaacttccttgtcttgcttgtgtatatgagtctctttttagacgattggatattaatatgatctgttgcaaatatactagtacaagcgaagttgttgtgagcatttgtttctcaagttaaatttcttcgtattaaattttagcaagttttaaatgttccataaacagtgatgaagatagaaactatctcgttgatattgattgttgaacttatcttgtttgttttttcatgctaacttatctaattacttgttacagactgttaaatgcggggactattttcaagacgaagatggacctagagaatttggcaacatatctcttacaacaaagtggataaagactactgacacttcattgatgttacggaatcttgaggttaactacaaggaggtaagaatcttgtatcagttttcttctgtttatttttaccagatcaagttatttcttcgagggttaagcatgtttcaattattgatattgtgttttacagacagaggatcagcccatgtccgttttgcatattcagtatccagaatggcctgatcatggagttcccaaggatacagtggctgtccgtgaaattctaaaaagactatatcaagtaccacctagtctcggcccaatcattgtgcactgcaggtacgatgcatgtcaatgagggatacaagtgttgttcaacgtctcctgagagaattgtttttttctctctcagtgcaggtataggaagaactggaacatactgtgcgatacataacacaatccaaagaattcttgctggcgatatgtctgcgttggatcttgctaaaaccgtggcactatttcgcaagcaacgcattggcatggttcaaaccatggtaaatctttcagcgttacaatttttagctaccaaatttctgtatctcaccacataatttgttctgaattgttcaattccttactcttttttgaaggatcaatacttcttttgctacaatgctattgttgatgaattagaagatctaaccgcggggacaaatgctggaacgagttcctaaaggtacgcaatttcaacaatcaaatctgagtgagccatacctgttataatctatgaatactcttatcttgtctatcttttgatccagctgaagggttcgtctgcttagagagggaaaaaggcttctacccaactatatcaatttcgtaatgtgattcaagaagaaacccgcgtgaatctctacattcaagacttttcaatttctgtaaatttccatatctgataggtttcattgttacttttgttgtggaaatgctgattaaaaagcaaatgaagtcgccaatgcgagattcttcaaagactatgaattcggtttgatttggtttgaagtgtaaaagaaccgaagattaatttaatggtttagacttaaccgagtttctttcgaaaataaataaatcagaagcggttaaaattggcgtaaaatgtcccgagtcatcgttgctcgcgggaaatctagctagtgtcggcgcgtgtctggcacgcgcagtaaagttaagctataaactcccaaatcgagacgcgagtctttcgcctttggcttctggatcctcgtgatgatgatgatggagaattcgaaatcaaagtaagcaatcatcgtcacttcttcgaatacccctactcaaatcgagaatcacccagaggtaagtttagcttctccagatctcaacttatatctctctctctctagcgcgcaattggaattgaatttttgggggatctttcctttgatcgcacgaatttggtcaccaatttgatgcattttagcggaatattgtgtatctaggtttaaatttggcgttgaggatacaaatttcgctatgtcgagagtttagtgtagtatctcaagactctgagccctagcagtcattactaagaatccaggctaagttagagatggtgtttttgtgggggaatcataatttattcgcgttaaattcttctctcagtgaaatgtgatgatcccttctctagtctataaagctttttgtctagatgttgaacatatgagtctggttctgattgatggtttagtagctatatcactcatgattgtttcaggtactccgatcggtcgcatagtgaactttgtcatgttttctttttctacttgtatagtggttagtgaaaattatcctcaagaagaaagttttcatcatcttattgatccagtgtcagctacctgaaacgggtcagattttgcttattatgcggtctatttcgtgagtaaaggaatttgctttagtgatttggtgaacgcgcttagcttagttcttgttcgttttttctcccctgtgaaggctccttttaagttctttttccacagaaatgacatcactcgcagttgctgaaacctttggattttgtcaaaatgcaggatttctaaagagaaagtttgcttgtgactgaaaacccgcatacaagataatcaccggggcaaaaaaatgagttttgcatgcctcgtgtgccatagtgtagagagcccatcccactcatttagaagctactctgtttctagctcagacaacgagggaagatgctctgtgattgcaagctgcctcacaaggaaatcactcattcaagctgcaagatcgaaccctttccctgcatcgtcatcaaaggtaaccccacaacccaatttccaagcaggtgaaggagcctcaccacggttagtacgaagccgtgcagtgagaagagacattgtcagagactggaacttcaacgaaattgagacagagctttgaaatcagatctgactcttctcttaggaatagtattagtttgttcatcaactgttcttttgtacctcgtgttcaaagttttgtatttggcttagaagaatgcttttacaaaccaataatctaatattttcctggccgtttattgaattgtggtattacaaatcaagcacacgctaaagtgagagtagtcaataaactttggaaaagcaacaacagatcgatcattgcaatcgttaaggaagaagtgttcacgtgagatgaggaaggattaggtgagggaaggcacgtgatagtatttgcctttacacaagcacttgtagacgagagggcaagcctcggaggcggagcacgtagaactgatcacgacaagcttgcatggtttacatggtccacacgcattcgaacagtcaggtatgcttgatccgctcgccttatctacaacctcgcaaatcacaatacaacaaataaaagaaccaaccaagatgtatataacacattcattgtctctatttataagccatgtaatagccaaataatacttacagtgaaaaagatccaactggaaagtatcactactaacaaaaagatggagaagaagaatcgcgattaaagataccgatttcattccgaaaagattgaagggtattatttttagaaatattcttaggttctcatacatagaaagggttttgaacaaaagaaaatgtggtgaagagatatataagagagtgagagtaaagattgaaagggattttaaatgaaacagtgttggattcacatgatccatctctctcttttcaaaggctttcacattctttgatcctttctcattaatttgaatcttgttactattttgttttatctaatttggaatactgataggcacaagaatgtcccataataaaaccctattcgaaaggtactttttaaaaatgaagtaacaaaatctcagatgtctcgtcatcatcaagtcctacatgctatcaagcgtgaccctttgagaccttgcttttaatgaagtccccactcttgttacaacccaatataattcactctcatttactactccattctttcatataaaatgtttataattaaaaaaaaaatcatgtagaatgagatttctacatgagagtaaattagaatgagatatcttcaagattcgtgacttggtgacaaggacaagttaagaacttgtagaagaactgatagagttctctttatttagagtgaacataatatcaaattaaaattctaacctttgaaatattaccattctttgtcactgtgttattcacctagttccaagattgatctgaatttgtagctcatgacacttggtttacaacaagtggatatctaaaccggtcattacagataaaggtatgaatcggataggtccgtgtgagacaaatttttataattccatagttgagacttgaagtgcccgacaaaaaaagagtcctttgtatgggaaaatctggcaaaggcatgtcctaaagttttttgggaacatatgtgtctatgtcgggctttaaatcattgcgattttaaatgcaaaaaaaaagaatgtactctacaataatgtaccctttcctcatcatcttttttgacccaacttaacataatttacacaaataagatcttctaaaaattacttgctgattatgaaaaccacactagaaagtggaataaatgactatatgcatgcgctcaattgtgtttggcttaataatatagtcaaaaaagttctcttacaagcttttattacagtcctctttttcaccatttctagcaaaaagccaaatccgataatttaactattttttaatcttattttcaaggactaaaaatgattgagcttccaagatttgtttcaattagaaaaattcacttaaaaaaaaaacgaaacggatacaaacaaaacattgaacaaacgaggtcaacactcatcactaatgaagacaaaaactaaaataacccttcaaataataagaataagtcgtctctcatgtttttgaccccacaattatccaattttattacaaaacatcacccaacttctcatcatccaacaataacaatgaagactcttcatcttgtccaactttcctcatctccaaactcgtcagtctcattgccttcacggcttccccttcccaatccgtcctcgccaaaaccgcatacaatatcgaaaccacgcaagccgcttgagctgaaagcaacccaaaccacaacccactaaacccaattttcaaccaaaacgctagtccaactgccacgggagtcccaacgaaataaaacgacccgagattcacatgtgccccaaccgcaggccgacctgtccctctaagaatcccgcagcccgtggtctgtggacaattccctagctcgcatagcccgacaattggcataaccgaagcaaccaagaccttgagtggctcatagccagtgaatagtccagcccaacgctcttttagaataaccgtccaagccacattcaatgctcctactacaaacgcgcaagctagagccacgttcgcggctagtctggccttgtaaggtctacctgcaccgagctcgttcccaacctgagaaaatcaatgaaaccaaatcttaaaaaagttattgaagccaaacttttgtcacgtgtaaaggaaagataaggacatcaatgaggttgaacagtatcatgagattggcaacaataaaatagaccacacttgactactctcttttcaaccacttttttatatatttttatttttaggtatgttaacgtccaatcacataccacggagtgacctattaatggaagttgatgtaacattttcccattacattgcacgttttttatcatctcttttcttcttttcgaaaaagcgttaagaaacttataaagaaaaaaacaacaactaggaaacaaagagccttctaagaacttcccttgagtaaatccataattagatacaagaacaaaattcaaaattttctcgaacaaaatactaatcactaggaaacagagaaccttctaaacacataataaggtcctcgaaaaacacacacagaaaaaagaacttatgtcaattacaagaacaaaagttcatatctttcttgaataaaacattcttgcatctactgaaatgttttggtaccttcaagttccaagacttttgtctttttagtctttaatttaatataattacttccactctttccaatatcaatcataaacaccacataattcatttttaaaaaaaacgaaattaatattcaaaagtttcatgattttgaaccttcaaatgcaaaacccaaatcaacttagtcaaatagttttctagacttaaatcttcaccacttaatcactaatcattagtctaatcatgactcaaatcaactttgtagctttgactcaaattttgaccacttaatcatctttaatttaactataattttgaccatttacattcacataacagaaagtataaagatacatacccgagcagagacgcatccagctaaagccataggaaccgtatacataagactagtagtctgaatcaaaatcccagtggcagccacagcaagcttaggattctccaagtaaccacccatcacaatcacaatctcataccaccaccattccaaacatatccccaaacaactcggaaccgccactctcatcaacggtcccaaccctccaaccaactccatcacagacgacgactgagccaccaccgccaccatcgtagtagacccaccatcaccatcaccactcactctcttctgcaacatcccactaacccaaacataaccaaccaaaagcacaaccatgatcaaattcgtcacaacagacgcaatagccacaccaggaacaccccaatgcttcaccatcacaagccaataattcaatggcacatggaacgccactgctgctagcgtacaccacatcatcggtttcgtcactcgctgcgaccttagataaacacgtaacggctgaaggagagtattggtcaaaagatcaggaagcgcgtagagacaatattcagccgctgtagcggttatctccgggttttgacccatgaaaagcatgatgggtccaaggttgatccaaaggaggcttatgggcagagaggccattaagagaatcacgaccatacggtgaagagagagcgtgaggagatcccagtttttgctaccgtaggcttggctacacactggctcgagacccgaggcgagtccaaccataacagagtatcctgtgatgttggtgaatccgatggagagagctcctccggctaactcgaggctaccgagacggccgaggaagagaacagacacgacggcgcgcacgtagacaagacagttcattgctgtgattggtaaaaccatagcccagagctcttttagctcttcaatgacttgaggaagagttgggtttttatgggaagtgaaatcatctgactggattttgtcttccattgaaaatggtggatttttagtttactgagttttctgagattcgaccaaatagtagtgagctgataaacggagctagaggaagctagccaaaaacagagctttagaaagctctggatattttaaagaagaaggaaagccatgggaggtgaaaagttgggagttttacgagtgaaacagaggaggagatgggaagacgtgaaacaggggagctagaaaggaaagtgaaagagcaaaaaagaaagaaagtaaaattcgcaaaaaaataaaaatctgttcgtttgtctcctgaaagtgaaaggaggaaagctgcattaaatagaggcgaaagagttaatatatggttttaaatactaattcaaaataaatagacgttttagtagtatcgttttttatataataaaaaaatatttgtatttaattctataattattaatattctttagagttttttgtttttgtttttctgtcatcattctttagagtttttattataagatcaaaatactttttatagttgttttgcaaaaaaaatttagttagtgtgtatatatttattaaatactttttatgcaagagtatgtagtttaatacaaaaaagttaaaaatatatagttttgattgtcattatatcaaaaaattaaaataatttaacggttttctgtcaccattcatcacggtaacaaaatgcaaaagataagaattacaatcttaaaaagcggcaaaaagtgacaaaatttgaccgttcaaaatggtttttagcggtttattgtgtcttttgcatctttaaactaaattttttaatttcttatgttttcactttatttaagtatttgttttgtcacaattactctaattgtttcaaagttatataaaagaaaagtctatttggatatgaaatttttattaaaagatatcagttttctctagatgcttcaattttaaatttgtgaaagcatatatatagaaacattgataatgaacttacatttgattttatttaggtgttgccacatatgattttgttatctcttgagacgttaacatttgtattgattattgattatatgtacgtagttatgaacggaatgattaagtttcgacttcttgccttttgtttggatatccgatcagtaatgaagatacatatgtatatgttattattatgtctatatctcacagcaacaaaaatcataacctctaaacattttgtggtgaactgaattatcaaattaaagaaaaattattttatcgaaagttatctaaacagagtctaacactattcaataccattcaatcttcttcaatatttacaatttggttattcatttttttctaacattatagatatttgttttgttaatcttttgaatatgtttttttcggtaaatttgaattttaaaacatacataataaccctaaaaaatagtgttcgagttcatattcattgttagtttaatggtgaactagtgatgaagagtcgtggttttcattgcaaaaggatcgtggattattttttttgtactttgtagattactctctccattttctttataaggctgcaaatggttgtcttaagatgaatagttggaaaatattaagttggaaaaattgagttgagtattattcaacatgttcctctacaaaaatgtagttgaatgagttgaatattgttgaatttgttcaatttttcagtttttaaagttgaattggttgaatcattttttcaactcctttatctcaaatggtaaaaaatgagatgaatgtttatttaactttttcaactttttcattttaatcatgaattaaattgcaataaaaagattttgaactttattttttccaacgcatgatattttcttaaaggcttaaactactaaaccactataaattaattattgttttggataaatatatttacctatatatatgggggcaatggcaacttttactgacagcaccaaatgcatgaaacactcaagcctttgtatgtaattaacacacttatcagaagtccattgggaactggactattaacatgaaatctagctaagaccctgagagttttaatagatgtgtaagagccgacacgtgtgggaggcaagagataggttggacgtgcgcagccgcctgacaaaataaataagtgtggttctgttaaaagttggacattacaaatcaggtgttggggatagatcaaattaattttttacaagttgggatacggaagaaaaaaaaaatcattttacaagatgttggttttcaaaacaaaatttattatttttattagtcacgaggggaatctttttttcgtcagacaattctaaaatacgaattcgtcaaatttattacatgtctaaaactaaaacacagttgaatgtgaatgattgagaccatcactatgtagaattaaattgattctcctaagtaagtattttaataactaggcttgaatgtgaatgattgagaattagaacttcaaatttcgttttgttttaaaatttgaacaaaacctttaaacaatacgatacgacgctgaaaatatgcctcataagtcataagtcatcatcactcataacaaatcaacaccaactaaattagaagttaatccattacagaattattttggattaataaagacttaaaaggcaaagaatgcacgtacggctacccataaacccagtataagatagtgactggtccgataatacgacaccaatcaatctatttcttaaaacatcactaacactagtatgttttttgttggctttataggcatttgtttatatttcggcttgtcgatcacaaaacatagaatcatttaaacaaatcgaccaaagcatgtgccttccgaatcaacataaattatgtcgttagtgtctcctacgtcataaccaaagaggttggtgttgcctcgtggccaattccaaggggctaaagttccacaattttactgatatcatgttaataatataatccttcaaaatcgatcaaataatttttaaaaatgtttttggctcctatcctaaaatcatatagattttttcaccaaatttttaattaaaataaaatattgtaggtgtaataaacaatgattgactatgtgtagagaagaatcttggatagggatggagaagggaaattgaaattggtcgtgtgagtgtaatgtagattgtattacataatcacataaagtttttacaaggttaaattatatagtttatgtgtggctaatatgcgataaacgagtattctttaggaaataggcatatatttaatttaagtaaatggcagacaacacattctttttatttaaagctatgcgttttatgaaagtagattcctatattttagtacaattttattctctaatctaatattcctcatttgtgatagattagctaaactgtttatctgtaacaaaaaataacttttttttgctaaaaatcttcttttgttatataaagcaatgatgaattagtgtagtagccaccacgatgaattctattccggattgaaattccatagacaaacaaatatgttacgcgagactcatatacaagatgataaggttgatattgttgtaatgtggatcaaagaaaaaaaatagaggatttcaatgatttcaaatatatagcataaatacaattatattctacaaacgaaaaaattatatataaaaattgatttagtttgtgcgagatgagatattcaacatagtaaagcatttggacataaactttcatttatttgttttcaagctaaacttttaagatacatcctctaattttgagaatattatgagtttatgatatatttatatatagttctctactaaacagttcatatatgaacataggtggtatacttaaaaaacatttttaatatattctggtaccaggagaatatctttatatatatatatatatatatatatatatatatatgagttactaaaaatttccaagaaataaaacgtaataaaataatgtgaccctataaataataccataggatttgaacgatcggattcagctccattatatgagaaaggtaaatgccaaactagttaggtaaggaatagaatatatttcatgattattggaacactttaaagagttagtatcaagcataaattcgattaagaaaaaacaaaaaaaatacaaacttcgtactcgttgacacctccctatctaaaatgcgtttatagttaaaatcaaacgagtgttgggaacataaaaagttataatcaaacgagtcaaacaaaaaagaaaataaataaattcaaacgagtcgtcagggcaactctttggaattc

SEQ ID NO: 1015 - DNA, 105937 bp, Arabidopsis thaliana
gaattcgtatgaactctctttggttagctgtaaatgcattggagcttatgtgagaaacaaaaagaaccagaaccaggtaattggcctcttcatcttttagccaccctttgatggtatctcttataatgtttggactcatatttttcgaaaatttcagatatgctggctttggcagaaagtcagttcggataatgataggggcttccaacgcttcttggacaatgtccagtataagtctagtggtatcttacgctatgagcgtgtctttggagaagggtttgttagcacagggggactcggtatgctctttagtcatcgagtttgtatcaactttgcagtattgatggttctgtttttgaatttaagttatacagaaccattaagtgaagctatcttttcttcttattatacttgtttcttttgatatagagacaacaaaggaattcgtggatatgctggatctgaaacctggccaaaaagttctagacgttgggtgcggaataggaggaggggacttctacatggctgagaactttgacgtggatgttgtgggcattgatctatctgtaaacatgatctcttttgcgcttgaacacgcaataggactcaaatgctctgtagaattcgaagtagctgattgcaccaagaaggagtatcctgataacacctttgatgttatttatagcagagacaccattctacatatccaagtataagcttccgctatttcttcttcccttatgactttaatttggtatccattttgtaatccctggtcttactctcaggacaagccagcattgttcagaagattctacaaatggttgaagccgggagggaaagttctcatcactgattactgcagaagccccaaaaccccatctccagactttgcaatctacatcaagaaacgaggttatgatcttcatgatgtacaagcatacggtcaggtatacagagatagaacccgtctcctcctatacttatttaaaaatcaccaaaagtcatctaaactcatatgattcaacagatgctgagagatgctggtttcgaggaggtaatcgcggaggatagaaccgatcaggtaagaaacgattttctttcgagaatgactcatatgctttaaaaaagatgttgaaaccaatttgctgtttgccttttaatcatcagttcatgaaagtcctgaaacgggaactggatgcagtggagaaggagaaggaagaattcatcagtgacttctcgaaagaggattacgaggatattataggcgggtggaagtcaaagctacttaggagctcaagtggtgagcagaagtggggtttgttcatcgccaagagaaactgattatggcatttactataagttggaaataaatttgggtatgtatgtagatcatcaaaacccagtaccctgctattatctctacaagctatatatatgtggctgtgaggttcctttaatgtctccattttacagcatatccagtttggtatttaatatatgtgatattttgaaatcggtttgatcaagttatacatagaaaagctcgagctcgatcaccattattgaatagaaacaaaaacaatgagccaaagtgatagccctgttattttactagtcgtcagcaactgcgacttgttatattgttcttgatagtcgatgtgttgttgttttggtaatagcttgctacatatttttttatttttttatttgtatgttattcttttttcatttttttttcatgttattacctagttattctataaatcttcttttattgtcttttaatgtttcaatcaaatataaatatatatatatatatatacatacatgtatgtaaaaatattcgtaaacttaaataaataaaatgtacatgtgcatgccaatattacctaggtattattctataaatatttttatttagtctctcaacttttcaataaaatatatatattctactagaaaaacgaattaatttatcaaatatcatatacttttctataaataaaacgatttataaaatcaactataaatattttactataaaaagaattaagttataaaattatatatagagtttctataaaatatatttacaagtaagaaattcatatactattctataaataaaagatttataaaatcaaacagatctcgtttctataagtccgtgtgttcatgacacatctagttattctataaatctcctttctgtagtctcttaatttttcacgtttaccaatatattcactatttagtatacgagtaacgaaatttaagagaaaagaaaaaaagaaaaaaaaatggccaaggcaacttcttcacttgtcgtccccatcatctttcttgtgatatttgctttaggtatgcatttatctttaaattttattcatagagtaatgagttgacatatgtatccaatattgtagacttgtaattcatcgtggtgttagccttagttatacatttacctttgtggtttacttcaaatatgttcacgtaactctaccgtagtttgtagttttggctagattcattggcaaatatatcatatatatatatatatatatatatcttagttcagtatattgatatctcctaaatcttaatatatatattttttgttaattttgtctgatatagttgagcagaatatgggatgtaatgattatattgttggcgatgtgtgcgttcattgtcgagaaagatgcctcagatattatccagttacaagaaaagccgagtgttacaggaatcattgtctttgcatcggcccttgtccggatgataggcctcataagcgattccaaatgttaaactcttccaaaaatgtaaaagcacaaatcctaagttgaatgtcaaaatcataatatttctaaaaaaactattttcaattgaagctttgattataataaaatttatagaacacaaattttgaaatatgtttgttgttgatgtggtgagcccacattttttttccacattttttgtcttttatttattaattgatttaattcatattgtgaatcttgctacttccacgacaagtacaaagcagaagaagcagcaatacacaaagattgacccataatttctgtttttcttctttcctctataaacctttttctttttctagttttggtatatgtgtaacattatctttttttgtgtgtatttaaggattgattggttttttcgctaccacccgcaaatgatatggttgcggacgatcgcagttgttaacgtttaaaacaatcacaaaaaacattttaaactgctccgaatctctataaaactctcaaaatcgccgaatttcaaaagcttcttcccgatagcgtttgtagttgcagacggtagtggttggcaaaaaacatttttttatccaaatcttttatttactactaaaatatacataaacaacaaatatattaaaaaatagtatcaaaccctctatatattaacattaattctcaaaatcctaatatttttctccatcaaaatcatatagtcaattcatcaacaatggcaagatacaaactaagtattgtaataatactattgatccaaaagttttgaagtaattcgaaacataatttatttattttgtaattttgtcatattacttgatgttggtttttatgaaccaaaatgcatgaagtaataagcatttaactgataaatttattcgttttgaataattgtgtacagttttatatggtttttattataaattatatttatattattttttattttatcataataatataaacttttcaatcaaatatgaaatatgtatatatatatatatatatatatatatatatattcttttctataaatatgtttacaagtaaaagattcatatttttttctaaaaaataaaaagatataaaatcaaatatatatatatatatatatatatatatatatcttactataaaacgtcgaattatatatatatatatatatatatatatatatacgttctataatatatttacaagtaagagtatcatatacttttctattcataaaagatttataaaatcaaacagatctcctttctataaatccgtatgtgcaatgcatgacacctctataaatcttctttctgtagtctcttaatttttcacgttaatcaatattcactattcagtatacgagtaactaaatttaagagaaaagaaaaaaagaaacaaaaatggccaaggcaacttcttcacttgtcgtccccatcatctttcttgtgatatttgctttaggtatgcatttatctttaatttaatcatagagtaatgagttggcatatgtatccaatattgtagacttgtcattcacgtaactctactgtcatttttagtttcggctagattcattggcaatatatcatattgtatatatctttgttcagtgtattgataactcctaaatcttaatatagcttttgttatctgagtataaacgaaattaattaattttgtttgatatagttgagcagaatacgggatgttttgattatgatgtttaccaaccgtgcgatcattgtcgagaaagatgcctcaaatattatccagttacaagaaaggccatttgtcggaaaaatcattgtgtttgcattggcccttgtccggatgataaagcgattccagatgttaaactcttcaaaaatgtaaaagaacaaatcctaagttgaatgtcaaaatcataatatatctaaaaaactattttcagttgaagctttgattataataaaatttatagaacacaaaatttccagacatatgtttgttattgatgtggtgagcccacaaattttctcacaatttttatttatttaattctactactatcggtattcttaatattctaaaacaataaccaaacagagtattaaatctacttatcataaatatatatttcaaatttttaaatattgtcttatatataaagaagttttctgtaataaatgcattgaattcatgtattggaatattgttctgtcatcaactagattaaaaagctaaaacttataaaatatatgacttacacaacttatttaatttttcttctattgttctaaaaagcggtttagacgctaggtgctcaagctaaacataataaaatatatattagtatattatcccaatttttaaatatgttttattttcatagacatagttataaacatttatttatattttaatataaattattctttagttttggtttacaattttatattgtaattttctaatagatattttatgtaatttttatgtataatatcatacttttagtgttttataattataaataattgaatcacttaaaccgcttatatcacttaaacatcggttaaacgttctcgacgctaggcattggatcaccgcatatataacgccttgcgctttcttttttgaacattgcctataactaaaagatttacattgtgtcgttgttcaacataaattttttcttcatatgagtttttttataccttctatctaacttttttcatttgactcattcaacaaaaagagtgacaacgaattaccaattccatatctaattccatttggatacactttcaataccctacacaagtaatacacacccttcacattaaacccaaagtgagccctcttggtgaagtagagggtctaacattaaacccattttttcaaaactcgaaaataagaatttattttgaaaagacacttttaaaactcacataattaagggtataatagtttcaattaatataaatcatagttggacaattctaataaacaaagatatatatggacaaatcacaaaaaaaaataaaaaaaattcaatgttccccaaaaatacccacaaaaaaggaatatacagaccaaatataaaaaagagggaaaatacagaccaaatataaaaaagaggaaaactacagaccatatacaaaaccaaatacaaaaaaaaaggataaatacagaccaactgccataaaagaagaagagaaaagaagaccaaatacatatccattgcttgactagaggagagagattagctttctcatttacattcatactttaaattcgtgctaattactatataaattcgttgaattgcatttttctccataactagaatacagtgataacatttatgaacaatcaatccagtgaatatgatgaatatttgatatctttgaaagttatcttgtaattataaacctgtataaatacctactctttccctaagatcagatatatcttgtatcaactttcatcttctgatattcaccaaaacttctatccaaaaccaagttcaaaaatatgaattgcctcatgttcttcaaaatgctattagcattctctttcattagtctattttatgttggtaatgcacaacaatcatatggcaattcaacggtttcggcacttttcgcttttggagactcaatacttgacacaggcaacaataatcttcttttaagtgtttctaaagtcaatttttatccatacggtagagactttataggtggaagagctactgggagatttggaaatgggagagttttttctgatataattggtatgtatatatatattgatctctacttgttgatatacttgtaacggatgaattcaatgtttgtaatactatgacacaaatattatctaatagcaagtctttgttttcagctgagggtttgggattgaagaatctcttaccagcatatcgtgatccatacctctggaacaatgatctaacgactggtgtttgtttcgcatctggtggatctggacttgatccaatcactgcaagaacaacagtaaatttttcttagtttgtccaaaagattataacaacttttattttatctatagcaaattttaatagattatattttggtgtgattagggaagtatatgggtgtcagaccaggtcacagacttccaaaactacatcaccagactaaatggtgtagtaggaaatcaagaacaagcaaatgcagttatatcaaatgctgtttacctaatctccgcaggaaataatgatattgctatcacttattttactacgggggctagaagattacaatacactcttccagcctacaatgatcaattggtctcttggactcgtgatctcataaaggtacaaagttagattgttttacatatatataggacatagtaagagattaaaattttggtcaaattgtatgtgacatattctattgttccccctttttttttgttatttgaagagtttatatgatatgggtgcaagaaaatttgccgttatgggaacattaccgctaggttgtttaccaggagcaagagccttaacgagagcatgtgaattatttgtaaatcaaggagctgctatgttcaaccaacaattatctgccgacattgacaatcttggtgcaacatttccgggtgccaaattcgtgtacgtagatatgtacaatcctcttttgggtctcatcattaaccctcaagcttcaggtaataacatgattcataattcaagaagaatactcatgtgtatatatatacgttacatttacaattatattttccaaaaatgtagggttcattgatgtagctgatgcgtgttgttgtacgccaacgcacttaataccgtgcttggatgcgtctcgttacgtgttttgggatgtagcccatccgacccagaagtcatacgaaaccatcgctccacagattattgaaaatatcaaagcaaagctcgcatgatcaagttatcaagctcttttgttttgataataagttatcaagcttttttttttctttttttctttcggcaagctttttagattgttatgattaatatcgatcggtaggttttaatatcgatcggttacctcaaccacaacgtcgctctttggtcaaaaaccaaatatttgttactcttaataaatatttgttttagatcttcgtgttgacttgatccctctcatcttttatgatccaaattaattaaactttgtcgtcactttatttccgatattgaatccaaaatatttagttaaaggccataggctttttgagttttctagtagcgcttactagccaatatcccgaagatacatgaactatatacatcaacgttggattttttcaatgaacatcaccaatttcatgtcaaaaaaaaaaaaaaacaaagaacatcagtatcaacaaattaaaaatctaatctcctgttttagtttttttttttttttaaatcacgtgcatagctttgttttgacattagaacatgacttttccaaaatatttcagatttatgaatgctactgtactatttcttttcgattcggtccatattccttactttattcagagagccttcaaacaccgttttcgtggagcatctttttatgtcgattgtgataatattgaagtttttgaatttatttttcttacagtttttgtctttttttgtaaaacgaaaactctagatttaaatctcacactgcttcatatagctagattcctttgcctgccactaaatccaaaacctcacgtgaattttagttttgaactagtccccatttcgagaattttagtgtaggaatagcaatataatttaaacgatcttgttaattataaaatacctatcagttcataaaattaaatttaatttgatatagtttggaaattagtgaactctacaaaagtgttttaacttttaacgattagaacttttattgcttagacaccagtacgtcttgtgattaaaccaatgtggagaagaaaatgtaaatggtatcatgtatgactagcaaattattgacttaagagtcatataaaacaaaagttcgaattaagttctttagtcttctgacagcatcgagaggtgagataagtttcctcattactacattccccaaaacacatattcgttaagacgttaacgttcgttgtctacaacaacaatgtaaaataactttaaaaaaaaaaaagtaagtaactaaatgtacaaatcttctttaggactgatggatttagattgatatatgatagttactagttacgttgttaaaaaaaatggtattaaatcactaacaacgaataattcattttatagctactagtcaatacgataattttagttttcagctaacaatattaatagttgataattctctactttcaacttatttcttgtacaaaccgtattatgtaatgtaggtaagcttattctcatgattagctcatttgatctaattttaatatttatataaaaaacttataaaccctaataaaaaaatatctgaccaaaaaaaaaaaaaaaccctaataaaaaacaaacagtacactgttttttctctctataaagagaaaatctccaaaagcaatgaccaatgagaaatgtgaagttgctcttccactaaagttgaaatcagaaaaaccatcaatggcttcttcatcatctctctttctcctccctctccttcttcttgtctcccaagcttcaggtattatattcttccttttactctatttttaacctcaaatcttctaaatttaaattcatagattaatcacatcaaacgaaagtaatgacatggcttttagcctttaaggttaagtggttaactttacttttgtttgtgatgataagcttcaacggttatattttacaacaagtgcacgtacactgtctggcctgggatccaacctagctccggtcagtcattactcgccggcggcggatttaaactgtcgccgaacagagcttacactctccaacttccaccgctctggtccggtcgcttctggggccgccacggttgctcctttgacagatctggccgtggtcgctgcgccaccggagactgtggtggttctttcctctgtaacggagctggcggtgtacctccggctactcttgccgagatcaccctcggtcatgacatggacttttatgacgtcagcctcgttgatgggtatgtctcacttaaaaccaattttttcaattcgggttcggcttaaattttggttcagttataagaaaaaccactatttaatcgtatttttaactatcaatgcaatattatattttaacatattattgaataagtaatatgaatttgaatgaaaaacgattttgtttggccgttaacgttaataaggagtgaataaaagatgagaattcttaaaccgaaccaaatggaaaccggttatagttttcatgaatcaaaccagcctatgaaatagttttttttaaaaaattaaaattaatttataattgtttagcatcttttaaataactaagcatactttattaatattaaacaaactaaactcatcattgtacttaaattagttacagtataagagtataactaaaccgaactttattcataacttaacaaaaccgaaactgaagtgaatttcaaataattttctcttacaaaacctgattgtaccaaaaaagccgaaaccaagcagctctaacatcaatagttttacacatatttgttactcacataatattaattaattatcttgttaatcaatgatgttagatataacttggcgatgtcgataatgccggtgaagggtacgggaaagtgtacctacgctggttgcgtaagcgacctgaaccggatgtgcccggttggtctacaagtccgttcacgtgacgggacacaggtagtagcctgtaaaagcgcatgctctgcgtttaactcaccacgctattgctgtaccggcttgttcggtaacccacagtcatgcaagccaacggcttactctaagatcttcaaggtagcttgccctaaggcttactcatacgcctacgatgacccaactagcattgcgacatgttctaaagctaattatgtcgtcactttttgccctcaccgcggccgttgattaaagggattgacatctatgaataattttgcttgactatttagtacgagatcttctttttgagttatcgacccgtttttttgttttggaatttagtgatttcatcgatttgttacaaagaacatgcattatttatgcgtcttttaaaaaattagtgatgtctaattcgtttgttaagtactgcactttataataaaacaagaaaacagatttataaaaggaaaaaaaaaacatataataccgtattaaaaccgaatagttcaaccaatcttaattttttttccaagaaatataatttgaagatacatttagttaagaatcaaaattcaaaaggaactataggtttaagtttaactagctcaactcatgcttctatgtcatttagaataaaatctcaaaagtattagacagaaaacgagatttggatacgctctagcaacatggcagattattaaatacaaacccattgaattattaccatgcaagtttgacttaattcccatcgtgaagcaaataaatgaataataaaatttcaaagtaattaagtggacattatatacaccagtgccctttttcatcgaataaaccaaaacaaatcaggagaaaaaaaaaagaaaaaaaaatcaagaatatggcctcgaacatttggagagatgtattaaattgggtaataccggctgcgtttatgactcttggattaacatgtctatcgctaatcggtgttgctatttttggaggtgtgcgattggtacggtttgctaccagagatgagaaattcgattttgtgtccgatattgttattgtcttatttcttgcctgtgccaccgttgttttcctctttctcgcctaccatagcttcaaacaagcaattcttaatgtccgacgtaatcgctcccaagatccttcgacggttctaccccctgattaatagtaatttttatcactgtttctagtaacacatagtataaactaaagttaatactcttgtataggcacaagaaacaagaaagcgtatactcgttcatgtcgtttcttgtttagttttcgtacataacagtttgtataataaaactatttaaattatttccggaaatttcataaagatagacatggttcaataaatatcttaaaattcccaatcgttttcaataatatattattcaaatgccacagtcgtaatcttaaacggagaatcaatgtcttttctctcccacttatagtttcagattcccacatagaggtagatattgacatcttactctaacaatatattcttaattttgatacgcattatgtaataataataaataatgctacatgaatacaaactatacaaaaaacacactataatttaataaccaacaaagaaagattaagtagcaagtttagagagttttttttttttcattttgcttttttgttgttgttaattctctgtttttctcttcatacttttctccataacatttttcataattttactagttgatgactctactaccattgatcaacctattaataaaaaaaacttattacaaaataaaactaatagtaattgataacaagagtaattagtgaaggaaaataactcattcagaaatattattagcaggacaaaaaatatcaaatattaatggttaataaaaataggaataaatataaatagttaattaattaaaagccatgaagggtagccatagaaaaagcatcaagcatctcaccaatcaaaagcaaatgatcagaaaaactctataaaaacgtcaaaaacagaaactcaaatcacaaaacaaaaaatggcaaacacaaatcttgaatccaccaacaaatccacaacaccatcaacggatatggagctaaagaaagtcttcgacaagttcgatgccaacggcgacgggaaaatctcagtttcagaactcggaaacgttttcaaatccatgggaacgtcgtacactgaggaggagctaaaccgtgtattagacgaaatcgacatcgactgcgacggtttcatcaatcaagaagagtttgctaccatttgtcgatcatcttcctccgctgtagagatccgtgaagcgttcgatctctacgatcagaataaaaacggtttgatttcgtcctctgagatccataaagttctgaatcgtcttggtatgacttgctctgttgaagattgtgtgagaatgattggtcatgttgatactgatggcgatggaaatgttaatttcgaggagtttcagaagatgatgtcgtcgcctgagctcgttaagggaaccgttgcgaactcttagagttccgattttctttttataaaaatttacattttaagttttaaaggtttttaacaacaaatttactttatatgtaagtaagcattctgctgtgcaaattttaaacttgtttcttttttttttcttttttttttccggcattgcatttaaattttagatcaatttattatgagttgcataatttggatgaaattttattggagaaaagactttcactaaagaatcggttataataattatgaaagactgaataatgaaatggtcaacaaagacgctatttgtctggaatctgattcttcttttgtgtggcctgaaaaacgggaatctaattcggtttaaaatacgggctttttaaaggcccagctttgagttgagcccaattagaattctattcaccttttttttagtagcttgagagattccacttttttcttgtcaactgaaattgtgccaatgataagaaccaaggccttattagtctgtctctacaagcacaacacttttttttttttgttcctgtatatgtttaaaaactaaaaatgaattatgattataaagtaaaagtgactcaaaatatctatctcaccataaatcatagttattaccttaagacatggcgtgatcgagtcgattgatcgaggcattgagcatttatataccacacacacggttacataaggtcgggctatatatgaaacacgtgaaatgtcacatttcatagttcttttaatggtgcaaattctgatgtctccatctcaccatttaatactgctgaattaacttttgccccttccattccattgtatattctattgtatttaacttcacgtaatttagttcacgacgttgaccttttttttaattagcaaaatcagtggatcatacagtattttctaaatacttcctaatcgtaatatattcattttactatgaaaataaaatctgaaatcagattcattctcatcttgaataatcatttttctgcgttaaaacaataattcgcgtcgaaacacagttggtatatagaggaaaacaactttaaaagcgtgtgagcttaggtgaaaaatgtcaaagagaaaaggaaataggtaggtatgattcaatttgaacatcatgatttttaatctgatattttctaatcaacacaacaaaattacacatttaaggggaaaaaataaaactgaagcatatgcagtagtatttggtaatcccaacaaacaaaaaaacaatcagaaaaggaggataacgttatcattatgttgtaatccatgatttcacatgccaacagctgcacttatgataaagaacccctctcttattaatcttcaaacctaatcaacaaattattaagtgagatatatatatatatatatatatatatatattacatataaataaattattatatatccccaaatcttcgtcttattatttttgtttttgtttttttgtcgtctccctcttattaaaaatgaagctctccattatatggattcagtagaattattataatttcttggacgccatttttctcaccccaagttttccttctaataaatacgagtgagcaatgcgtaagtataaaaacccgatttgactatataatattctcaaaagaataatactactaaatctgattttcaaccaaaagccaaattcagcggaggaactgtcgttttcctttcttctttacttcttcacctttctcctatttcatcttaacatataatcatcagaagaaaaaaaaattctaaaacaaaagaggaacttgagaattttatgcttgagacaaaatggcagaagatacgtacgaggaagagtgcgactacttgtttaaggcggtgttgatcggagactcagccgtcggaaaatcaaacctcttgtctagattttctaaagacgagttccggtttgactctaaaccaaccatcggagtagagtttgcttaccggaatgttcacgtcggagataaaatcatcaaggctcagatttgggacaccgccggccaagaaaggtacacggacataattttgtgacctcgtgactactctactctgttccttattttgtatgtttctttgagctttaattttgaccaaatcaaaaatattattttacaaaaaaatgaaggaaataaattatgtaatataacaaagaagagtgaactatcaatacttttattaggttaaaaagatacttataaaaatacttgtaacattccttaattattatttgtaatctaatcattgtaatttttatgagtaaagatttcgagcaatcacaagttcgtactaccgtggagcattaggggcattactgatttacgacatcactagacgaacaactttcgacaacatcaagaaatggcttttcgagcttagagacttcgccaatcccgaaaccgtcgttgtcctcgtcggaaacaaatctgatctccgacaatctagagaagttgaagaagacgagggtaagactctagcagaatcagaaggtctctacttcctcgagacttcggctttagagaatgttaacgtcgaagaagcgtttctagtgatgatcggacggatacatgaggttgttactcagaggatagcttcggaaaacaaatccaacggtgctgcgacgcctcacattaacggtaatgggaacggtacggtccttccggttggtaaagaaattgtgaatatacacgaagtcactgctactcaacccttattaagctcatcttccaactgttgtttcaagtaaataattaatgtatttttttcgtttattgttttggaatactttgatgatgtttttatttgcctgtgtattcgtgaaaattttgcctaggttgagtacatgaatttaaatcatacaattaaatccaaataaatatgaaaatcaacatataaagtaattaaataatcaaataatcaaatccgatgtcgtccagcggttaggatatttggctttcacccaggagacccgggttcgattcttggaatgggaactttttttaaccaaaaaacaaaatcacataaaaaaaagaaccaaatacaactgagataatctgtcaagactgtccaatatttcaaacaaattcagtttcttacgggcaattttttacacaaattttatcaaagagtgttgtgaagaacaataactcaaatatgagtatcacaaatcagtcatcttttacttctttctctttgctgttttggagtctaccctaactttcttgcacacatacaacaaagagaagccaaactcatcaaacactaaagtaagatataaaagatgaaactgaaacagaataagcagttactaaacagccacctcttgagggagatttcggctgtaaaatggaaactcgaagagaaagaccgtcttgaaccatcctggtaagttcccatacactcctcttgggaacagaatcagaggactaaagatcgacagaagatagaaacaagttagctatatatacaacacatcttcaaggcttatcaaacggtatctaaagcaagttatcgttaaaccttgttgtcttcttgtaggatctgtaagctcctgagtttccatgttttttgtcagccgatgcctgtttatattcaaatcagccatatgtgattcagaaattgtctaagtagagaggaagagaacaagggagaacctcgagtaatggtatgccgctgacgaatagaagtagcaaagtgagaaagagtggtccgaatatgacaagatactctgcaccttcaagcacaggcgatgcagccacaaagattccccaccacagtaacatctgatgaacatatatagccacaaagatatacagcaatgaacgatcaccaccatttatgccaaagatgaagaactcattatataccgaaatactaacctcaccgaagtagtttggatgtcttgaatacttccagactccaacatcacaccattttcctctgttttcaggagagtttttgaatgatagcttctgttgatcagctgcagcttcaatcaagaaaccgaaaacccacatagtccaaccgataacatctgcgggtttaagagatccaccaccatcacttgcattaacaagtgttaaaggtaagctaaccgtccaaacccacacagcctaccatgaaagaaaacaacaactctagtttgagaaccacaagcatgaattccaaataggctaaaagagagaatagtataaacagttcacctgaagagtccagaaaatgattagtctcactatatttccacgctgttcatcaaagcgacgatcttccccccattgcaagatcctaaaacaacaagagagtaatgctataatgatcaggaaagaaacaaaaaaggaattttgcagtcattggtagagacctcattagaaggaaaatccccaagcgaagaccccataccacaactagcaaagtcaatactatctggatggagaaaagaaaagagtctcaactcagaaacaccaaaacaatgaaaagaacagagagagaaaataagacaaagaagaagagcagagacttacctgtcgaaaatgccaagaggctttgagaacaagtgttaacacagcaagtataacgaagtttgtgctacctgaaccatacagagttaagtaattaatataatgactcctacataacagaaaccgaagctactggggattaaaggactgaaattggtcgtaccagcaaagtcagtgacttgatcaaatttgaaaagagccgtgattacgaagaatatgaactggtaaatcacctacaaattatggcaaacagagttttgcgaaatcagacatgaacaaagaaacctaactctgttcagaaactatcgcacaacccagaaaatgaacagaggaatttagattagctgagaacttacagtgacaatagcagtgagagccagaaaatgcgaatcgagaactgttcccattctatcaaacgaaaacaaaaaagcagagaaaacttccaaatatatattctttcgatcgaagagaaacgattcgttatcctttctattgtttccgagtaacaaaattgagaatatatcatataaaaaaaagtcattactttaacatttggtcattgggtgacttggtgtatggctaatactcccatgaatttatgtggctgcgagctaaacaccatgccgtttacttgtgacacgagaaaagtctcatttgtacacgaaaatacttgtacgcaaaaaagtgtgaactttatacattatttgcatcatacaatagtttggaaacaataaactgtatcaacctcgatgatatagtcaagtgttgcagatggaggaatctccaaaccctgtccaaattcgacatttctgtctccaaatcctaaggacggtggaattatcactttacgtttacctccagccttcattgacctgagaacatgctctataccttggcatagtcccttgctatacggtcttgagtccattaccatcgctagtgacttgcctttgcctccaaatgtgtccacgaacacttgttcagtgccatgtacttgtccctttacatcaaacactaccaagtatcctgagcttggagtagctccacttccaacttgtagatcatagtacctacacggttcaattccatgaatagacaagaagtttcaggtcacaataagagcagatatagattgcatttcacctcgaaatgttacaagtattttccaaaatgagatcaaaataagacaaaagtcccgtttcaaaatgagaaccaaattgaacttttcaagagattgagttcgtgatgaatgttaaggtatgcaaagaagtttcaggctaatcaaagagcagatatagttaagaaccacgtcaaaaagtattaaggattccccaaaacaacatcaaaataaaacaagcctaccatagagaatgctacaatgtaacactaaagggtaacgatttagacatgtaaatcccaacaacggaagctcacaaaattttctatttgctgaaacatatgttatggagaatgtaccttatgccgtttggtaagatgatctcttcttgcttttctaaacctctgccaaatccaaaaattacagaaaaacatttcaagtttgtgaagatgataacaaacccaaaaaacgcattcaagaacaaataaactatgagctcaagtctttgattgtattatcaaatccctaattgctaacattcacttaaattttccatctttagttcttaacaagagaataattcgaagtcttgatgagtaagagtaaccttgtgttatcctcttcctgaaacacatcgagtcgtgacttcttcatctgctcggagacaacaccgaaagctaaaaacccagcccaggtaaacccggcgccgattccgaaccgtcgcgtcaccggagaagtaatccaatccgtcaattgctgctcctgcaatgtgaccaccgccgttggttgtggattctccgtgaatgtgacgcttagcgactgcgatagaagactctgtttcggatgttgggatggagagacgaaacggtggtgagaaggaaccgtcgcagtgaagagagtcgccattgtcaaagatttttcgtaaaagcaaagttttttaaaatattatattattttgattcatatatcccaataataaagatcagccttatcttgttcgtgtgatgaataaagacagagctcaatgattttttttaatatatgttttcggtcaacgtttcgacgagtttgtcaattgttttttctttctctctttgtacagtttcaatattggaaaacaaaatagaggaaattacgcatgaacatgaacatcgcttgcaagcaaagacaacaaaacacacgagcacaatccttcaccttcttcaatcgtcatcttccatgaatctttctttttcacaattcacaagctgtgtcaaacactgaagctgaggcaaaaagtagcagagaaggaacatttgtagcttttttttccttcaaacagattgaattcgtcaaaaatgtgtttgccactttggtcgtcttcttctgttatcaatccttttgttcatgttcagttggtaatgaagaggaactggggactggtcttgggatgttggaacctgttacaggtttctgtagccgctttagagacgccattatctctgcaaaacttggccttaactttgaatccctgataaacacacacaaagccattacatgtgttaactgagacatggtcaagtgaaatgatgttgtttaagcactgctacttcatattgtggctgaaacattgaaaaataatctatactcacgtctgccagcatttactgatgagatctgcaattgctggatctacaaagtcgggaatgtcaagacgtcgatgctgaaacccaactgccccaactacttgcatcgggttcatctttccccacggttgttgtaacgtaaagagttcccataagatcacaccgtagctgtaaacatcgcacctgtttcacgtattgttttttcctgacattaggcctgcttctgacaaaagggaacaaaatgaatatctagtagcaaaagatctaagagcatacttctcatcagcaggttcgtttcttagcacttctggagccatccattcagcctttataagaccaacacataattagattaacgaactggcaattacaataactgtaaaaagagatgattaagacaggggagactataacttgcttcttaccgtccctgctgttgactttgaagagaggtatgtactgtgtttcatcctagacaatccaaaatcacacacctgatatatatgaaaatccagtatttgttatgtaaacttatagctgttacatacgatataacattatccacttggtaagaaacaataaattttatggagagaatctgaccttcacgacccagtttttgtcaactagaaggtttggggacttaagatcgcgatggacaatcatcggattacagctgtgcaaatagttcattccacgagcctgaatacaagtaatatgttacctcaacactctactgaaagaatcaagaagttacaaacaggtgatatagtaagagaagaaaagactaatacagcatcaagggccattctcaggcgcctcctctcgtctaattggttatttggccggtggattaacctatacaagctacctctgcacaagtttggaaaaaaatattataatgtaaagatccaaaaacgaagcacaaccggattgaacctgttcaaaccatccagattttagaacttaaagcaaatacttgaacaacactcattgatgcaaagaagattttggcatttagaggtcacaaaatagataaaaacagaggcatgcgcatcatgaataaggagatggaaatcgttgtagccatgagaatcatatcaaagtaactgaatcttgcaaagatcatagtattacctaggaagaaactctgtaacaattgaaagattcggtgggcgagtcacagctcccatgaagagaacaatgttgggatgtcttagctttttcatgattcggaccttgtatcacaagaatatataagaagggtttgatatagaactaatcaacatggaaaatcaggtaaaagaaaagattagaagaaaggctcgtacctcacttctgaattcctccaatgcttctcctgttaaatcttgatcaaggaacttcttgacagccacttcctaaagttcaagagtttcgacgatatggaactcaaactaaggaatttctaaactcttttttcatcgagttcaaattcacagtataaattggaaaagcaaatataatactcacagtcccgtgccaatctccccgatacacttctccataagatcctgtatcaaaagaagtaaagtagttaattatttgaagatgtagttacaccaaagcagataacagatgatgataagtcaggtaccaagtccaatacgttctcccacagtaatttcttcccacaaaatctcacagtcagatacatcatcacagtctgacttagaactttcattgccaatagatttgtcagatattctttcccctcctgaatttggcccatgattagagtccccactaccttgaggctcatgcccaccagaaccatcatccccgtcgctattcgagcctaattcaagttgcctggacacggctgcagctgttgccacaactgcagcagcagtggccgtggcagcagctgcagcaggaagttctatgggggaggagtctgagtttgcagacttggcagcagcagcagcaaccatggaagatgcaacaacagcagctgcagctacagcagcagggacggttctggcatattctgtcgaagatgcttcagaatgtgaagaatcagactgacttacaactttgccattatcacgttgatcatgtgcatttgttttagattgcactcttggtaatggaggcaaaaacctcactggaccaaaaccgttttggtgtcttccttcctgagttgtctctaaatcttttcctctctctttcttggcttcagtcgagtttttgctttcaacagttgcctccaattgctggggatagacttcggaaaataaattgggaggagctacaactccgctttcaagtaatacatcatgaagcttctgagctaaccgtggattctctttagcagcatcaatcatatattgtgaaacatctttgactttcatcctttgtgcagctggggagctaaccccttcagtccaagaaggtgatctcatatgggtgaaagaatgaataggcctgctagacagattttgaaatggagccttttcaactttcttctgatttttcacatcttctctagaaatatttggatgaacaatgagatcgcctccacctccggattggtttctctccccagaactcttggtactagaacgatgttcccctgttcgaaactctgtattctcttcatatgagctttcaataccattgctggaagaagctacatgaattgaatcattgtctccaggactagcggaataggcagattcatcatagtctatttgtagtccagctgcatcagctggaataagcgtgccgggatctcccataagatcaacaatgtactccctgaaattcacaattgaatagcatataacaaagtttctttctttaagcctcaatattagcttcaggaggtgcagattagataacaatatacatgaatgatagacaaatattgaatctacacattaatgtgatgattacctgccatcatcagccttaataaagttcattgccacatcttcagaaccggtatattgctgacctttgactattcgacaaggaacaccaacactatcacacaatacctacaaagtttcatataaagaaagaaccataagaaatgaaataaacttaaaagtgctgagattcagaagaaaaagtgcatactttgaataacaaggctcggtgacgagccaaaccaatagtcagagaaccaagtggcaaaaccatgcttccaagagttgctttcaaactatagctaagactcctccaagctctcaacatgctctctgggtgcacgactggtccacccatgtaatctcccactaaaatagccagtttccttaccaattcactattcacaaaaccagaggaagaaactgatcttgatttagcagcaatatcaagagccatctgttcaagtctcaacagattagaatccccacttctgttcacaagaacagcttcccatgtcacaccgtctgaaacaggtgtcccttgaagatcgagcaaaggaggtattctttctgctgaggatgcattcaacactccatacaagtcataaaaaccatccaagatcttgtcatcatagccaagacaattgtaattctgtgaatgcaacaataccaaaatgaaatgagttcttgggagtaactaaagagtttctgttatgcagagaaaacaattgaatcaaaagcttacccagtagcgataagcgatgagttcagctggagagttctcaggagcacaagagcctaaactgaattgcttaatagcctcaatctgagtagcctcaggatcttctctagcacttaactctaaagccaactgtatctgattctcttcttcaacagctggatctttggaacctaaatccacatgttctgacccattaacaacaacagtgtcatcaaccgtggcggctctgttcttggcattgaaagaattaggaggactagggatttttctatgaccaacagaacttaaccaattagataaaccagaaaaaggtttgatttcagggctattgctgtgatgagacctcggtgatgatgatgatgatacatcgatagacttatgatgattgctcttagttgttgaaattgatccttcagcttcatctgattgattgggcgagatatgaagtttcttaagaaagttcttcatgttcatcttcatactccaaatgctagaacaatgatcaacaggtcttaaaaccactccatctcccaaattcttcaaagtttcttcttttactttcataaaccctaattcctccccggaatttaaatcaaaagtttgaaactttcaccggaattcacgaagaccaatcaaaaagaacaaagatttcaactttattggacttcaaaaggcaaaaacttgagacagcaaaatttgtagagagcttgagctcaaaacacacagaattttttttttttttttgataaatcaccaaaatggttaaaagcacacacccactcaaatgcagaatttaaagaaaaaaagcatatgactgacaattttctccgtactgatatgaaccgctaattctcctccttcaaccaacttgaatatgtatctctctatctatctctgacgccactttctctgtctaaaaagttggacaaagaaagaagtggagagagtggctcttctctagaagaaaattaaagtttgcatttttgataattgaggaggagagttacttactgtgacatgcaaaacaaaacagaacaagaaaaaaggcgtatctttttcactaagcttagtgcgtgaacttgaaaagatgatgacgaaacataattaaattgcaccaagacagacttaacgtcaattgaggcatttaaaacggttactttttgtttctataaacagcatagaatctacatcaatttattcattactatgtcaaaaaagaaaattctgagaaaactgtgagatacattttttgtccttaattcactaatatataaataaaaatacttacgggaatgttttctttaaaattttgcattagaacaataaaaaaactatccaaagtggtttaaagcaatttctttgattcattttaaacgctagcaaccgcaaactcaacatttgcatatggtagtaggagaaccaatcaagttctaaatcaattttcatttttcgatcaaatatatcaaaagtctttttggtcatataattaaaactgtatttttattttttttaataaatagtatagcgtttcgatcttttatacttgtatctcttttgggaataaaagaagaatagcaattgtcacggcaattaaggaccattaactttttatattttgagaatgactagaaatagcttaaggtgtcaattctaaagaaaagacaaatgagaatttaactgaatattcacttgaaaagcacgtggttaattgtatattgcagtgtccggtgaatcttactaagatagagctcaattaattaacgagttagataattagtactccgttatcttgcttttgatgaaactctattttcgtgaagagacaccgttatctcttcgatcattcaacatatctatcactatatacatatgtaattaattagtttatatagtggttacgacttacaacttacaatagagatagctatgtatgtcatatatgcacaaaatatatgagtttattatagtatatgattaatgtcaaaatatggacaaccacacgtatgcatgtatgatttatgtaataggtaatcattgtatcttctttgaacttattaaatggtgtgagctatgagccaatagttgaccaacacgaatatttatgatttttccagtgatcaactctatagtgtccacacgattgtgaggttcagaaaccatcaggtaatttttttttaatgtatcattaattaaggtaactctttatgtgtcttggaaattgttttccaccatagaagatgattatttgttgaaataatttatacgtaattttttttaaaaattaaactttacattttaatttttatatactggaatgataaatacggtaaaaaacaaaaatatactattaccgtggttttcatattcatccccccccccattcgacttaaatatgttatctacttttccaactatgacacttctcaaaaatctattttatagtataaaggatctgtattccataaaataaaacaagaaaaaaggaaaacgattggaggttttaagtgctcaagggtagttggctaacaattcaattttgggcggcttgagatttgtccgaaaacataagaaaagatttttgatttggaataaatcttatagtaacattaaaacatacaaaaaaaaaaaaaaaagtaaatggggcttgagttttgtccgaaaacataagaaaatatttttgatttggtataaatcttagtaacatttaaacaaacaaaaaaagaagaagtgaatggagagtttctatttactacacgttatgtttggtttaagccaataaaaaaaagcgtttacgtaaccataaaacatagcgtgtgtgattttgctcagaaaagaagagtttaataggccaaagcagcaagattaaaagttaaaagttaaaaccgtaaaagaacattcgtttctcccgggaggtttgactaatttgactgtaccacgtgaaatggacgcgcgaatgataatgcgtctagtgacgcatgccacgtcatagttatcctatcagaaagcaaaacaaaaaaaacaatctttcagtttttgtttttatgtcgtaaaaagaatttggtgcattccaattggtgacagccacacattttttttggtgctgggaccacttccccacctatcacttttctcctctatctcatactcctccttcgttaaatcattgaaaaaaatcttgctaatgtgttttaattagtttaagtttctatatctatgcacgctagtttaggaattaagtatggcattattttgttgaatgcgtcgaggtggttatccttttttaagaatccacttataattttttttctttaagaacccacttatacataaaatgatacgtgaaaaaatatatggtctcattgtctatctacacatctttataagtcgaaactcataaccaccatccattatgtgttgtctagattatttttttttcgctttcaaatcgcatggttaaatatgatctgagtaaataccactgaaaaatatttagaatgaaacatcctaatcatccacaaatttatttttgccttggtttcacatatactgtgcccaatctctaatacataatattttgatctgtttaaaatattttcttattgtccggatctaaaagggtatccctagtgttgatataggccaaggcccatttatattctatagcacgtgaacgcccaaagttagtggttcacaaatcacaaatcaaaccgcaaatcatgtaaaccacacatcaaaccgatttggtcaacaatatcctttctcttcccaataatttttgactcatcagagaataatttggtcttcgtctctgcgcgcgtctctgtctgtctctttcagattcaactggagcaagtacgaaacataaatatcaataaattaaaggaaaaaaaataacagtagagaagaagaacatgttttcaactcctcgggagcaaaaaaaataattcagcaagagaaacggcgaataaggtggaaatgatttgacgaagaaacgcttggctgagagtaaaatcggaaaaacaaaatctgtaatttattattatcagcctctaaatcaatgggtggtggtggcaatctcgtcgacggtgttcgtcgttggcttttctttcaacgtcgtccttcttcttcttcttcttccaataatcacgatcagattcaaaatccccccaccgtttctaatcccaacgacgacgaagatttgaagaagcttaccgatccgtctaagctaagacagattaaggttcagcaacgaaatcacttacctatggagaagaaggtagattttgtttccaattttgatatctagatttgattcattccgagaaaaatcatgaataaaatctagcaatttctcagggaatacctaatgctgaattcttcacggagtatggagaagcaaatagatatcagattcaagaagtagttggcaaaggaagctatggagttgttggttctgctatagatactcacactggagaaagagttgctatcaaaaagattaacgatgtgtttgatcatatctctgatgcaaccaggattcttagggagattaagttgttacgcttgcttcttcatccagatgttgttgagattaaacatattatgcttcctccttctcgaagagagtttcgtgatgtttatgttgtctttgagttgatggaatctgatcttcatcaggttattaaagctaatgatgatttaactcctgagcatcatcagtttttcttgtatcagcttcttcgtggtttgaagtatgttcatgctggttagtttctaaacagtctctttcacttgtgttatcattatgatataaggttattgaagagctacgtctctgtttgtttgcagcgaatgtgtttcatcgggatttgaaaccaaagaacattcttgctaatgctgattgcaagttgaagatttgtgactttggtctagctcgtgtatcttttaatgatgcccctaccgctattttttggactgtgagtcatttatcaccaagactgtgaaagcttaagttgcattagggtaacattctgtttaagtgctggtggactcactcttactaactctgtttcaataggattatgttgctactcggtggtaccgtgcccctgaactctgtggatcatttttctcaaaagtaagcttataactctcagaagattggacttctattactgtttaatttcttttacgtctcatttttcttccaatcctttgatatctcttagaatatgatgtatgccttttgagtccacttttgtatgaaggcctgctctagttagctatctacaagtgtgcaggataaggtttgattacagatctgatgctaactctacttttgcgaaatacagtatacccctgcgattgatatttggagcgttggttgcatatttgctgaaatgctattagggaagccgctatttcctggcaaaaatgtggttcaccaattggatattatgaccgattttcttggcactccaccacctgaagccatatcaaaggtcagttatactattccagatgcttgttttagttttttcaaagtttagaactttgaattatagctctctttcttctgtggaagaagaaaaaaaagattattcactagttgaaaaactattggatcaagcaactttgagttgtattgtaaatgaatatgctatcttcaaattgtcagatcagaaatgataaggcgaggagatatcttggcaacatgaggaaaaaacagccagtcccattctctaaaaaattccctaaagcagatccttcggcccttcgcctgttggaacgcctgattgcctttgatccaaaagatcgtccatctgccgaagaagtatgcttaaattttgctttatttcttacatgaggtagatggaactatgtttgagaacgttgaaatgtgacagtactagaggcacatagatgcagaacctagaagatgatgaaaattcaaagaacaaactgaaattctatgttccctcttaatatatgtgtgcctatatttttacaggcattagctgatccatactttaatggtctgtcaagtaaagtgcgggaaccatcgacacagccgatttcaaagcttgaatttgagtttgagagaaagaaattgacaaaagatgatatcagagagttaatttaccgagaggtgatgagccttctatatatctcttctttggtttagattctcctctcttggtgattctaatggattacttaaaaaacatagatattagaatatcatcctcagatgctggaggaataccttcgtggtggcaatcagctcagcttcatgtaccccaggttggctaattgatcaaatataaggtatactatggttttggtttcaagaaatttggctgagaaaaatatatttccgatgcagtggggtagatcgatttaggaggcagtttgctcatcttgaagaaaatcaaggtccaggaggaagaagtaacgcacttcagagacagcatgcttccttaccaaggtacaaacagagatataaaaaaaaacctcagtttctttcattttaataaaaacgattgtctctgcaccaagtgatggtcttatcaaaatcatgaaacagccagcattattgatgttcttgtatttgcattttcagagagcgagttccagcatccaagaatgaaacagtcgaagaaagaagcaacgatatcgagagaagaacaacagctgctgtagcttcaaccttagacagtcccaaagcttcacaacaagctgaaggtacagaaaatggaggaggaggagggtatagtgcgcgtaacctgatgaaaagctctagcattagtggttctaaatgcataggtgtacaatctaaaaccaacattgaggtaaacaaagggaaacttcatatttctttataggtgcatgaatgtttgaaacctagtgttcttgtgcaagaaatttaagtattgtgttatcttgcaggattccatagtagaggaacaagatgagactgttgctgtgaaagttgcatctctacacaattcttagtgtttttctttttctgtttaatttaagctataccccatagtagagttggagaagcaaaagtttggtttgtcactctcactcggggtttggggttttggttggtgtatttaatagttccggggagacattgtaaagaatatataaaacttggtaaccgatgtaattctttgcttttgtaaccgggtagatcattggttgaaactcgaaagtcgaaatcatgtaaaaatttggatatattcttgccagttttgttacttatattagttatattcctgaaaaagttgctttgcatatacaaaaatggagaaataagctgaattaagaaacgttgaagcaagttactcttactcaatccaggtttggaaacttgattagcatttgcagagacatggctaataatgatacgcatgacagacgtaatggtttgagtgatataggcaccaataacagaattaaaggaattgtcattattggatgaccactggaagatgaagaatctgatggaggttgattcatatcactgagagactcacagaggatttgttatagactgcaggacaagcggatggagatttgctccacttggtcaaggttgaagtagatgacgattctttactgaagatcgcttacctgaagttggaagcctggtctgaggttgttccttaattagtacttagtatggattgactaattttggattttgattaattgttctgtggattatgctactttttcatatgtcaagatctaaactagaatcataagcctcatgaaaagctgtcaaaaccatattgtaaaattgattcagaaaatttgttatttttcaaggtggcaaatgaaaatggggaaagttgagaacaaacggttaagagaaattgaggtaatcgtttatttaaccaaagatactaatgtctaaacctctccttctaatatgattattcatatgtacgattttacaccataccagtgccccccaaaaatataccaaggaaacacagtgacactaatgaacatgtgccacgtagtatccgacggctatggcctatgatggcctatggagcggatcggaggtacaaaggaacccaattctttgggttaggatccgagccccagacagagaaggcgctcgaacatcgcatccattgatcggttaacctcgggaagtgtcggtctatcacatcttttaaagtctctgtagtattgacccactctaacccttccttagtataagtcttctcattgaagttcgtagtgaaaaacctatctgcttctagcctcctaaccaaatttagcaagtaagttagagtttagaaaagcctttgttttagtaagtgtagtcaaaatttgatttagagcttagaaacctggaggcgacaaggaggaagatgaagaaagcagtttcgctaatggcgaatcctttgatctttttctctgcgtgcaaccccacgtttagatcaagcttctctatatcgtcttcgtacacttctcttaaaaccttgatagcttcttcatcatctgtcaactcttcccatttgctgatcggactcatcaacagattctttctgaattcgttgtaccgaggaactcctctctcccggtctctataaactgagaaaaaaatcaatcaatcgtttagagaattgcagatatatagaagaggaatcattgattttgacttactctccaaggcagccatgtctataaggtgaggtctatcttctccgtcgatatcttgagccacaaggttcctcatccaattagggtagttccacaatgtcaatgcgccacaagattggtgtcccattgaaacaagtaactgctcaaacccaagtttcgaagccttttctcctgcttttttcccgatcagttccgtcatcggtatcctataaaacaaaactgtatatgtcaagaaaaactgcgcttggattgacctaaaaaaactgtacacaacatcctatatcttactctcgttctattgcagggttttctttgtctacattctcagagttcatatctcggagtataagtgtctctggtagaagacaatgcatcctgtaaacactaacgaactcttcggtaagggaataaggaactccatgatcattcggtttcttcagaccaactaatccgctaaatagaggaccaaatcttgctccaaccatgtccttcactttcttcccaaaaaacccataccagttgatcctcattccagcagtgagtgtgtctgtctttaagagttctattgtccaatcgatcgtatgaaccttagcgataaccgctgctgtcacaagtctagcagtccggtagagtttctcatcatcaaaatctggataccgttcctgaaaaaatgtaaaaaaacttaacatgatttgcataaacagagttagaaagaaggaaaaaaaaaaacagagttgctgcttgcaacacaaggaagacactaaacgtaagtaatgggtcaagttaatgacttactttgagcatatcacagacggagttgtgttctttgacaaagagagcttgcaacagagagaaacctgaccagctgtttcttatgtcaccggagatcggaacacctctttcgtccctctccaacaagccatccccagagatttttagctttccgtccttgaaaaccctaactcttctcattccagtctcgtcatttccatatattacactcccatccctatccccaaaataatgttatataaaatcaaactcggatagtaattaaacaacaaataagcagtaactaaatgattgagatactaaccaccaaggggttctagtgttgacagcgccagatttgtggtgatcatcggtgggaactttcttcgttctgaggaacttgaatgacttcaatggacatccacttgctacttcttctggagcttcaagctcaatctggtttaggtgatttcaatatctttattaatctataatcttaaagttgagggaaagaactgtaaattttcaagattaaaggggttaaatttgaaaatatcaaaacctggtgggtgtcttctaagtgatcaacccaatcatggatcatgaactggatccaagaacaagctatcacgttgaattggtccccattgtctatgaatctttttctcgctaacaactttgtcgccactacacttggatgtggatccaaaatctgtcataatacacacaatcatatcatatattatataaaatacattgtgatcctaaaacagacaaaaaaaaatatgtatcatgcagttgtgcatttactcatactgatgtaattcaatccataacataatttcgtagatgaattacgtatcatgcaaaaccaacactaatccaattagggtggctatcatgaggtgcatccactccaataataacaaaactccaacatttttttttctaaattttcagggaaaaaaaagtattgacaaaaaaactttattgcatcaacaaacacataaaatcaatcaaaagctgacaaaataaaataaaaagcagaggaacattacatcatgatttcaattttcaaccaccggtaagtagtgattaaaaagaaatgcgtcacaaaatttggttctagtgtctcattccactactatttacttttgctatattatatatcacttcgctttattttatagatttaatcaaaagtacaaaattaatttgcatgttgtgaaaaagtgattgtgaatatgaaggagagcaagaaaaaaacttacgccgtactgagaagtagagggaggcatattccggccgatgaagctgccttggctgccgatggtgttatcggagggatggttacacttgccgtcagccgtacgataacagaactcatcggtgtcgtaaccctgaccgttgatcggaccgacatgtaccagattgtaacgttgatgtagatgtcttcgtaaccccaagtaagccactcctaataacactggaaatctatgccacaatcctagcttgtccactaagtgcacaatctgtatatataattttttttaaacgatcaaattaacaaaataataagaaaaattataaaagcgatatgataacttattttcttaagagaagaaaagcatatatagttcatatatttagagagatagagagatcagagatgtatttatgttcttgttaaagagagagatgtatttacatagaacaaaaaagcatcaaagtaagacatcttggaaacaacatgatgaagctgaggatgaagaaaccatgaagaggatggagagaaacccattttttgccttgatttttttttgtctccctatctatcttctttggatcatgtgtttgctttattctttaaatgatagtcacacaattgtaatggttgtattcacacgattactctcatgtatttatatagacccacacgcatactcacatttacatatgtatgtatgtcaagttaatcttgaatatgtcattttattaaataagtcaacgagtaaattctaaataattaattatttagccatcggattgactattcgtttcatcgtcgtgagcatcacttcctaatgactaggtggcaaaatatatttcactaagatttcttcagattaaattcaacattttagggaggatttgtataaaaagagaatagtatctgcaaataaatagtaaaatcatggtcaattaattcactatatatggatatttatttccttgttttgatcaacctttcttatcttgcattattagattactttgtaaagaaaataatattgactaacaaattattcacactgtaatttatagtgtagaatcattgacaggtggattgatgcatttattcatagtatttttattatctaaaaatcccaattggcctggtggattactatctactctagtatcaatagtgcatgaattgactatgattcaacatctaatgtaaatatgttaatttatttgccaacagagttctccttatatagttatatatataaagttaacaactataataatgcagtctaagaagtttgatcttttgacaagtacatgtagtacaaaggtcgtgttagtgttttcgttgggtcaacacccgagttcagatagatatattgcatgttgctggaaaatataatcaagtgataaatcaattatcagtacatgcataaatttttagtaaatgatttaaatggattgatgaattattaaaataaaataaaaacacttaaagagtgaatagaaatatcacttttactctctctctctatatatatatatatatatataaattaaaatgtagttgttatagatctagtaaatgtattctatcaaacaaatttaagtgatctagtgtatggtaaggatataagtgtgtgtgtgtgtgtgtgtgtgtgtgtgtataactatatatacatgtatacattttaaatgttgtacattcaatcacatttcttaacatttttctcataatttattcaatagtaatactaaagatttcattgtcttgttgatgaacctttaatttcttgtatttatgtaaagctctcctagtttgacttatcttctacttaacctcaactacatttatatttattttacgatactatcaaacaatacatattagtttaatgtatttatattattttagatacaaaataaatttaagaatctatttttatagtatttttattgatgacatttccatatgtattaatgtatatattcaaggttactaatatttattaggtatttatgttattgatagattttatttataaaaggaagcattatctaaaagtctaaggcgtgccaaaaatttcaagctggttatgaaagacattgacgataaaattatactctaggaatagaattttaataaaataaatgtcaactgtttcttttcttttttttctttttgatgagaaatatttgcatgcaatgctccacgaaattcgagaaatgaatttaagtcggtcgggtaacgaccacctgcatcgttataaatacttgaacgcatttttgttgttatacgtaaccattttataaatagttgttacagacggaaaaagtgagttgtgtggttgaatttttgttagtggctataagttcaatccacagaaatatcaaagaaatcgtttatttgaatcctaataataagatatgaaaattaagatacagttatgaatccgatctccagttacatatatataaaaaatttgatatgtttttctgactgaaaatatctattgtttgttctgtcatatcttgtattttttggtcccgtatacgtatcaaattgtaaggaatggggacaagaaatatatattttatattggttaactttgacgaaagaacaatacaggtatgatctgtgtataagtatcagtgtactaagatatactgatacgaattaaaagcgtaacatattacaatgatacaagtacaccaacttattactacgtggctcttgttgccacttaaaaagttgtctagctaggtagagagtaacttgccacatatgtatggttcgatctagatccttctatatatatatgtatatcaccgtccatacaagaacttcttgaacaattaaccatcgatcaaccgctttcagagttattatgcaaagtaataaaaattagaagcaacgaatttaaaatgttatcgaaccttccggtaagtatgtataggtacgtcattcccttttgtttcttataaccgttcttcgagatttaatttgagacctattttggttatataatcaatcattaccagttgactttcacgaaaccaaaaatatatattgaacccaactaaaaggtgattttataagccctacatgaaactaaactaaaccggcacattaaaccaaacaaaaatgtaaaccggcatgtagaaagaacctttttaatgataatttggactcggatctcaaaacatagttgaaatgattactaagacacgacaagtgtatggatgtgtgatagtggtgtgtcgaaggggttgactttagatgaaagaaacatcaaagagtgagagtgaactaataaatgtgtagataagctctagctaatttggcagttatccattcttgtggtgaatttcggttataatataaaagaaagtataaagaagattaaatacatggcactctaaatttctcagaaattttggctgaattgatttttataaagtttgttagatccgaaaacttaattcatttccttaattctaagacttgtctgtttgtttagtcttgcaataagttttttgtggaagatcgtgacaagacaccaatattatgctaacattttcctttttcattaatttctggaacgtagtttacatattcttgaaaatagaccagtaaacttctttgcctatttaggttctgaatggtgactgagttttgcggtacgagaaaagtacggtgcggttcaaatagtaacgaaaatatatagatacatatgtatacgtagagattttgatactgttacaacactattgcggtgcagttttgggtgcagttttggttaccattcacagccttaatttgttacattattaacaggaaaaaaaaacttgaaattctttactcttcagtcttcagcacactttgttagaaaacatatctttgtcgtttatttcgggtaacacgtaaacaactataccgtaaactacactagaagatgagtggttagaaagtgagatattttcatgtgcattcggtgtcatgatatccattttcttcttcactttttcgattctttctaatccttgaccaagtcttgtgtttaatgttaccggcttaagcatatgctagcgtgatggaaaatatcacaccaattgtacaaatttctacatttttctcttttatttgcaggagctttgctctccagcggacagccccacatcgatgatttttccacatcattaagttttaaaagtctttgaaattattgtaagtctgttaagttaccatcagatactattctagaaacttacagatatttcacatttgtataaaaaagtcgaagtttgaaagaaattaaaagcaattacaaaatttagctagatgtgttatcggaaaacattaaacgcaactgataggtgtttcgtagaaacgtgataacaagtacaatgtcataagcattttcgaccaaatgttagtctggcaaattataaaactaaaatatgttacttcgaaaagtgtctctataattaaagtagtccaccaacccttcacggaattttaggtagagttacctgatttcagatgtagggtagtcagtctttatcgccaaattttctatttacagcatattgaatttgataaactttatattcattgatgtatctgtagtatatttttcgaaatctgtattatattatcagacatttgtaaaataaaataatcagtaacttcttccacttcttcttctggtttaagattcagttttttttacggcattgttaacaaattaacaattcaaaataattgaatcattctcataacgagaaattgctcgatacatacgttggtaaaaaaaaaaaaactattcattcgaacacaagtagctcttacaacatttgtgtgccaaaggcccaatagaaggcttagttaaatcagtcagtcgttacataaatatggtgagagaattgaacgattagggttgacattacactattaggcctttatttgggcctatttaatgggctagatttgaccttatgttaatggatattttgcttacagggtttggtccagatctgcaacagacctcttctgtcgtaagaggaagattgacaactttattttttccatgaagggtcataaaaacgaggcccaattttgaaaacttcgaaagtacaatcaaaataatgaaaatgtctacatcccagtttagcaacgaaggcaagaccagccaaataagtttctacacatacaacaccaagagacctcatgtttgaagacatactatgtgtctacaagattatcttattgtgctgaaaccatagactgaaagtctgaaacatcgaaggctggttgatagttcttatgaaaacttttggaccggatcgacatggtgatctaagttttcggaattttgtttttgggatcagtttacctgtgtttttcggatatttttgagtaagtttactctttaaactagcacataactgtatctcgatttcttttgggttggagactcaaagttcgagactcacaactgtagcacatgtaacttgtttatggaagtataacaatattaaatttaaaacaaacaaaaatcataatctttttagtaaactaaaaattgtcgaattatatgtttaaaacatcatttttttaagtgaaatttggtttacatgatgactcccttaaaagaaattgtttagctagggttcagtttcaattattctgcctaaaaccatttctttatcaatcaaactataataacaaaatttgctgtagtttacgttcgatttcaaattatatggccaactcctacaggtgatccgaaaagacattcaatttattgatatgtgttatttttatatcttaatcttaacttttattaacttttaatgttcttcaagtttataatcttcattgtgtaaagacaggaatcaagtactcgagttgacaaatgaatcgtataagttagtgaatatctttggtcctttaaatccgatccgatcatcattttacatatatgacagaaaactattttcgcaattaactaaaggactgtgattgtagaacaggatttagttgttagattagatatgagaataatcatacaaagatagtcagtgcatatggcagcaaagattgcaaaatttaaaagtctccaaagaaccaaggatcttctcatctacccgaggcagttgcataaaccctagttttttacaagaaaaacaaataacacgctaaacattgcttcggaatcaaaataataaccatataattctcaaattatagcgaataatccttaccaaaaagaaattataacggaaaattaaagatgaatccgaataaataattgttgagtagaaataaagaaaaataaaaaatagagaaggtgaaagaagatgtagagctcccttcaatccaaagaagagtaaaagccattaaagggcaagttaaagctcctgagatatgcaatccatataaccaaatccttttttactttacaaggattagggcttatgggatccatagcttagcagcttttctttaccctgctcaactcatgtttgaactttaaggagctctacttccatcgtcagatcaagatctatcgaaaaacaaagtatcttgtcaaatatattatggatctgacataagcaaactgtaaagacctttaactcttcataaaacaatgagaaagttttgatgagaacgtggattaacaaaaacaccaaaagaggtaaatctcttacattagagctatgaaggagatataaagacagaacaaaagagaggaggaaccctaattattaaccctaaacatacttagagagaaggaaagagagagagagaagaggccacgtcatgttttggaagaaatgatagatagagagtcgtaattatagtggtttagatattcgtgatagaagaataaaaagaaaagaaaaaaaggaacaggtgggtgcatctgaaaagacatgggaagggtctgacattgtttgtgttagattccctacgcgtcacatgcgtccttctcggcttttgtgcttcactctttttttttttgggtaaagataataaaaataacaattattatcgttcctgccaactactagtccactacatttttaagatgtaactttgaaaatgaatttggccgaccattctttatttcttttagaaaataatgtacaagtgtttccgtttggtgacctaattctaaatcatttgttagccctaacaactagaaatttcaacacgaaatagtgaaataggttgatgtacggtcaggattataagtctgatgatgtgggcacgaaagcaggtaattatttctctgtctgagcagaatctattgctagatttattacaacgaacttgtcttattaccctcacgagtctcgtctctttcacaattcaatggcttatttttaagtgtgtttttttatccatcgtgtaagtttttttttgagttgtttaaataaaaatttgtatgatgaaaaatgttcactagcaaaatacttgaccctgaagtatcctaaatttttctggttcatactcaaatgttaggcttactttgttttctttggtcacctaaaaaaaagtggactgatcagcctaattatttgtgcaaactttaatgattgggctgcatctctttcttatgagcccattatatgggcccagaagttaacagttgcttgtctaaccttctcggaatagttatttgggccttatatttgggcttgattccacgcttcatgaaacggaagttaatccggtagtgttctcctggtccatgctgcggaaaatatgagcaaggttaatttggcaacttgttgatgcagctttttattttcttggattttttttttaatttctaagtatgtttaggcaatgttccaatattcatacagctaaaaaaatgttaatattcacaatcatcttttgtttaaccactaacttataacattttaaaccgaagaataattgacgagtcaatgttgagtaaaccggaacaattttgcttttcatttataaacctttaaacgacgtcgttacgatagacgcttccagcttcgttttatttctagctttagagcgtctctttcctttttcgtttacttttcaatattttcccctaaaaatgtcgattccttctgtaattgctctaacggctactttttctccagagcatcataagatacctcaacgttaacgataacaaattaattaagatcagtttcgatcaattgcttgtgatccgattagagagttccggagatggaacagccgaagaaagttgctgataggtatctaaagcgagaggttcttggtcaaggtacttatggagtcgtcttcaaagctactgatacaaaggtgaagatgattcctctctcaattcttcatattttttgtcgatcccatcgaaactagggttccaattctgtcgtgtgtcttttgacgtgtctcttcctgggaacaatttggttaaatctgatagctcttaggttttaaatcagctaaagtttcgatctttacactaatatgtgttcttagaagtcaaagtttgcatttttatgttcttaatggatttaaagtgtgtagtttttgtttaagtttgtataaggaagctgatttgttttgttgtggcaatttgtagaatggagaaactgtagcgatcaagaaaataagacttggtaaagagaaagaaggtgtgaatgtaacagctcttagagaaatcaaattacttaaagagcttaagcatccacatataattgagttgattgatgcgtttcctcacaaggagaatttgcacatcgtgtttgagttcatggagactgatctcgaagcagttatccgagatcgtaatctctatctttcgcctggtgatgtcaaatcttacctccaaatgatattgaaaggtcttgaatattgccatggcaaatgggttctgcacaggtactatcattggaacttagaagcagaacttgttctatctctaataaggtctgttttgatttaaacttatggatgatcattcgtatttgtttcagagatatgaagccaaacaacttgttgataggacccaatggacagctgaaacttgcagattttgggttagcacgtatatttggtagcccaggtcgtaagtttacccaccaggtatgctttgtttgttgtgacaatgctatttatgtagtagttctgctatctttcgtatcttgatgtcctttagcaattttcataggtgtttgctagatggtatagagcacctgaacttttgtttggtgcaaaacaatatgatggtgcagttgatgtttgggctgctggctgcatttttgctgaacttctattacgcagaccatttcttcaggtgaacctccattttgattgtgtagtaatccagtgcatctgtctacttgtttatctaacttacttattccattgcagggaaacagtgatattgatcaattaagcaaaatctttgctgcctttgggactccaaaagcagatcagtggcctgacatgatctgccttcctgattatgtagagtatcaatttgtccctgctccttctttacgttctttactcccaacggttagtgaggatgctttagatttgttgtcaaagatgttcacctatgaccccaagtctagaatatcgattcagcaggctctaaaacacaggtacctaaaaatctcccctatggataatgcataagaacaggttatttagttttgttctcaaaccttgatttctttttaaaggtacttcacatctgcaccttcacctactgaccctttaaagctcccaagaccagtttccaagcaagatgctaagtcatctgatagtaaacttgaagccattaaagtgctgtcaccagcacataagtttagaagagtgatgcctgaccgaggaaagtctggtaatggtttcaaggaccagagtgttgatgtcatgagacaagctagccatgatggacaagcaccaatgtctttagatttcaccatcttagctgagcggccaccaaaccgaccaaccatcaccaggtaaaaacaattggttttattacagtcagttcttggtcagcttaaaaaatgaaaacttttgatgaattcttgatttttggatttgcagtgcagatagatctcatctgaagaggaaacttgatctcgagttcctataggatatcgcgtaacaggcttcttcttgacgtcgttcttcaggttcctatagcctataggatctctcttactggttggttccgttcagtaattcctgaaatttttcatatcacaactagtgatgacgaatagtttgaatcattctttctgtctaaaataaagaatataaagcacagatgattaactaatcatcatgtacacccttcatagaaaaatctctgtttttggcctatgtttagaagagagctctgatcccaaactcattcttcgttcatttccaatttaaagtccagaatttttagtatcgaacacgttggtgtattacatatatgaatttttgatctcattacactaatgctcgatgagaatggaaacacatccaaggaatttcaataactatgtaacaatggtaaagttttctaaagaccaatgtacggccacatcaattagaaattcccaataagttcatatgggcatacaagaataaagcactcattaagctcatttgcaactgctttttcctcagacgtttattgatcattggacgtcaccatctttgtcatctgaagatccgactctgttcgtagctttctttgcctaatcatgtaaaacaagaaacagaatcacattatggcagagttattatacatataaaactgagccgatcagttaaaaggttttacctctttatcccagtttgtgaatatagtgactaaggaaagacacaacacttgaacagacaatgctgttacgattcccagccaaagcccctacaatatgaaaataccacaaaataaaagtttctataaaactagtcttgtgtttgaacttgagaatgagaaggagagtttaagattattacccgaccaccaatgtggaaatggaaaccaagtaacaatcctaatggaactccaacaagataatatgatccaagattcacacatgctccaattttctgccatccacatcctctagcaacccctgcaaccataaatcaaaactatttgaccaggattcgaaccggacatatataaacaaggaaccaaagccaatcttctatcattcaaaacctgagagtacgcattgtaagccatcaaggaagtttccacatgcaacaatcggtatcattgatgcggcatatgcgatgattttcgggtcgctgctaaaagcatgacctaagatcttccgaatcgacaacaaaactgttacaaccacaattccctcggctactgctatgcctacaatgacatatacagccagttttgccacttgtggattccctgctcctaactcgtttgagacccttatgctgcaagttaacagaaacacacaaagtgagataggttggtttgatgagatttttctttttatgagctcttggatacattttgttactgaccttgcagcgccaccaagaccaaccgaaatctgccagattgttagggaagtatttagactgaaaagttgcagaaatgaggttgatcaaatataaagaagaagtacacaaactctgagtaccataagacaaagataaccgaaatctaccagattgaaagcaccgaagtttctaaaaccgggttaggaagaaggcctgaggcaagaaccagaagctcgaaggaccaaagctccaaactgtttcaaacagaatttgattaaaatgcagatactggaacctgaacaatgcagcattttatgtttgatgacttaccagaccatgaccgctgaaggaaaagcaattttagagaaatcataaagttcttgaaaagcctctttcgaaaacccggtccaactatgcgagcaagaaggcgaaaacttgacataacacgagaggagaatgacgttgaaccagtaagagaccgaaatagcaagagcagctcctctgtatcctaaaccagtcttcaacacaaacaaccaacagagaagcaaatgaagacatgtagtgataccagagcagacaaagacagggaacacattgttctgcgcttgcaagaacctgttgatacattgaagcagtccgtaggcgaagaggctcgggatcatgtatttagcgtaggagccagcaacacttgcaatggacttgtcttgatggaccaatacgagaatctgttctgtgttagcccaaatgattgagagaggaacagagagtataagaagtacaaacattgctctctgcatttgaattcccaattttccatatagttttgctccgtaagcttggccacatagtgtctccaatgcacttgctgttcccaactgtttcacatacacacaaactttgaacaaagttacaaaacagaggataactaaggttatgttattgaatgcactctttttttttttttgactggatcgtgagagatgggacgaagaaacgtacgaggaaggtgaagccggtaacggaggcaaaggaggtggcgatagaggcggcagagagaggaagagagccaagatggccaacgaacatgacggagatgacttggagagagtattgaagaaggctaacaccaatgagtggagcagaaagccatagctgcttcttcacctcctccttcacacgaatcatcgtcgtgtctttctctgtgatcagaagcggaggcgtcacaccatcttccattttctctctgtttctcacaaaaaaatatgtcaaaaaaaaactaagagaaatagaataacaacaaactatctctctctttgttcctagtctttagggtttgtggagccgtcgttgatatttatgcattttttaaggaatgaaatcttttaattatgtggtaaatagaaattaatttcttttctacttccccctgaggcagattatattttgttttattaaatgacaacaacaattgaaagatgctcacaattcacaaccacgcatttttttttatattcaaagcttccgattatatagacaatgacgtgagtggctcctagttgctcttctcttattctattctccatcgagtcaggagaccacctcagactctgtctccggtattactagcaaaactctcctttagctttcttcaccaaaagttgttatgattacataacctatgaggagattggaaactatgaggagaggcaccattattgctacatattacagagattaaggcaatttccgagaaagtattgaggattttagtactaatgtacagaaagttacaaaagagtgtgtttaccaagtggggaaaactgaagtttccaaaacaggattttggaagtaaagcctgagactgagaggaagaccattttcttgtatgaccaaatcgttatgattccatcaagatatgatcaacattaaagatatgatatatacaagaagacatgaatcatatatgtgtaccaccagtctaaccaaaccatgaatgcagatggaagaccaaagaaacaccataacgttctcaagagcctctggggagaacccggtccatgttttggcgcaagaaggcgataatttaacgtaaatactcaacaagacaacattaacccaaaatgaaagcgaagttgcttgggaagcttctctgattcccaaaccagacttcaacaccaaaccccaacaagcatgaacgtgaagcaaaaccggaacagagcatgagaggaaacactctgttttagctcgcaaagaaaagcacttgagaatcacgcacccgataaggtctgggatcaagaacacgatgtatgatccaaaggtttaggcaatgatcgcgtcttggtcaagaaacacaagaatggatgatacattgatccatataatggataatggtaattaagcataaaagtacaagaactgccgcgtttcttctagccatttccctccaccgcctccaccgcagggacgtctacgattaacggattcgccggagactcatcaaaattggaatagtggtacgtagttggctaaatcgtaatcgtttatggcttttaaagcagtcaccaatcaaacaaaacctttgtatacgacgaatttcacaacagacatagaaaaggcccactgtaataaccttgtaaagcccaatagaattatttagtaaagattagcgcgttgtcatcacgcgctgaatttccgcacaatgtgtaatttcaattgcagatttttttggagtcgcataattcttcttcaacccctaaagatttgagataatctctgaggagtttctcagagaaaaaatgcttcagccaagtcctcctcactactcttcctctagagatgtcagacatcatcatcatcatcatcatcatcatcatcatctagctctgagttctaaagctagggtttttccactttcacttccctgtaacttctcctctagggtttcttttaagcttcaacttcactgcgccgcttcttcctcttcttcagtttctccacctcgatgctctaaacctaacccaagctctcgaaaacgcaaatatggcggcgtaatcccttccattttgcgttctcttgactcttccactgatattgaaacaactctagcttctctttgtctcaatttaagccctaaagaacaaactgttcttcttaaagagcagactcgttgggaaagagttcttcgtgtgtttcgatttttccagtctcaccaaagttatgttcctaatgtgattcattacaacattgtgttaagagctttagggagagcggggaaatgggatgaattgaggctttgttggattgagatggctcataatggtgttttgcctactaacaatacttatggtatgcttgttgatgtttatggtaaagctggtcttgttaaggaagctcttctttggattaagcatatgggacagagaatgcatttccctgatgaagtcactatggctactgttgttagagttttcaagaactccggtgagtttgatcgtgctgataggttctttaaaggttggtgcgctggaaaagttgatcttgatttggattctattgatgattttcctaagaatggttcagctcaatctcctgtgaacttgaagcagttcttgtcgatggagctttttaaggttggtgcaaggaatcctattgagaaaagtctgcattttgcatctggttcagactcttctccgaggaagccaaggttaacttccaccttcaacactctgattgatttgtatggaaaggcaggtcgtttaaacgatgctgctaatctcttctcggagatgttgaaatctggagtacctatagatactgtaacgtttaacacgatgatacatacttgtggaactcatgggcatttgtcagaggctgaatccttgttgaagaagatggaagagaaagggatatcccctgatactaagacatataatatccttttgtctcttcatgctgatgctggggacattgaggcagctcttgagtactataggaaaattaggaaagtaggactttttcctgatactgtaactcatcgagctgttcttcatatcttgtgtcagcggaaaatggttgcagaagttgaagctgtgatagctgagatggacagaaatagcattcgcattgatgagcactctgttcctgttattatgcagatgtatgtcaatgaaggtttagtcgtacaggcaaaagctctgtttgagaggttccagttggattgtgtgctttcgtcaacgacacttgcagcagttattgatgtctatgctgaaaagggactgtgggttgaagcggagactgtgttctatgggaaaagaaacatgtcaggccagaggaatgatgttttggagtacaatgtcatgatcaaggcttatggtaaggccaaacttcatgagaaagcactttctctcttcaaagggatgaagaaccaagggacttggcctgatgagtgcacttacaattccctattccagatgcttgctggggttgatttagtggacgaagcccagcggatcttggctgaaatgctggattcgggctgtaaacctggatgcaagacctatgctgctatgatagctagctatgtgcggcttggcctgttgtctgatgcagttgacctgtacgaggcaatggaaaaaacaggggtgaaaccgaatgaagttgtttatggttccttaattaatgggtttgctgagagtggaatggtcgaagaagcgattcaatactttagaatgatggaagaacatggcgttcagtccaatcatatcgttctgacttcccttatcaaggcttatagcaaagtggggtgtcttgaagaagctaggagagtgtatgacaaaatgaaggattcagaaggtggcccagatgttgctgcatcaaacagcatgctaagtctgtgtgcagatcttggcatagtttctgaagcagaatccattttcaatgctctcagagaaaaaggcacatgtgatgttatttcgtttgcaacaatgatgtacttgtacaagggcatgggcatgctcgacgaggctattgaagtggctgaagaaatgagagagtctggtctactaagtgactgcacttcatttaatcaggttatggcttgctacgctgctgatgggcagttaagtgaatgctgtgaactgtttcatgagatgttagttgaaagaaagctcttgctggattggggaacatttaaaacgctcttcacgctcttgaagaaaggtggggtgccaagtgaagctgtgtcgcagctacaaaccgcatacaatgaagctaaaccactggcaacaccagcaatcactgcaactctgttctcagccatgggtttgtatgcatatgcgctggaatcatgccaagagctcacaagtggtgaaattcctcgcgagcattttgcatacaacgcagtgatatacacttatagtgcatcaggagacattgacatggccctaaaggcatacatgagaatgcaggaaaaaggtctagaaccagatattgtcacgcaagcctaccttgttgggatatacgggaaagcgggaatggtggaaggtgtgaagagggtacatagccggctgacgtttggggagcttgaaccaagccaatcgttgtttaaagcagttagagatgcttatgtgagtgcaaacagacaggacttggctgatgtggtgaagaaagagatgagcattgcttttgaagctgaaagggagtgtagttcaagatctggagaagaagaagaagacgatgaagaggaaaattctgaagaagacgaggcattttgaagtgtagccacagatgtatgtaagaaatattgtagaatataggatttagtggaaatggactgtacagtttcacagaagccaaaggaaatatgcatacttaagcctcagattgatctctggtaaagaaatgtgtatcttaaaactgttatagaaagaaaaaaaaaggttccacagggtcaaatctataaaagcgagcacctttggctatggttttggtagaggaattagcatacgctccttacaacaatagattgatttgcatcatcgggttggtcttctgttggttttggtctctggattgaacatctttctcctgtcttgcttgctcttattttcaattgtatagcatcaaagcccatgaaaagagccagatgttctggaattgattccaatttggaatcttgtcagttactggtgatgaatatcaacatggaagatatgaaacagagtagccagcaaattccttccattcggaacaaagagtctctcagcttcagtcaaagtatatcagttattgatctcaagaaagtaatagtagtgagcaatgaagatgatgatggagctctagagttgaagaacagaggagtggaacgaaccagtggagaactcttgaagaccacagtgtcaatgtgtttattgttgtctttgtctttctctaaaagttgtaaaaaaaaagggtgtgaagctaaagctaaatggtatgtaagcaatgttttgcaattttaaatttacaaaataacactcggagtttctgaaagtttaattttgacccataatatttgatatttgaggcattgtcctggaattaaaaccaaattgaaactccttcgcgtgtgttttctgctgcatttttacctcttagcgtctccggcgaaaacccactacgactgagtatggcgctcgaaatcgaagctcgagagtaagatttcgctttctcttacaaaccctagttttcgtttagtgtcactgatatgaattgtgctccaagaaccatcgtttacgaatgctcagatggatcttaggttacatgtttggagaaaacatcttgaatgttggtttttttatatcctccatactaaagttgtggtttttaaatctacccataatttgttttagcttggttcttctaaagctaattgcttctgaatatctagattcctccgtagctattcttcgtttaaattaacgtcgtatacgaaaatttgagggagatcatcgttagagtgttttgattctttgcaatgcgtctcgaggaaaaatccaatttgtataaatttgaactcttgttaattctcggcttggattgaaaccattgacagtattattagccattttgttagtaatattggatggagaacgttttgatgctatatgtcagctttgtgtagatcttcatccctaatagctctctattgtgttgaatgtctcagtgtaataaagattatgcttcagttctgcaaagaaaattccttgaatcagacattccagacattacaaagcgagtgtcaggtttccttgaatacagtagacagcgtcgagacgtttatttctgatattaatagtggaagatgggactcggtactacctcaagtttcccagcttaaacttcccaggaataaacttgaagacctttatgaacaggtttgttcttttactctgtgaaatgtagaagtgtataaaaatagtgattgtcattgtaagttttgtttattttcggggtgattttttcagattgtattggagatgatagaacttcgagagttggacactgcccgagctattttgagacaaactcaggtgatgggtgtcatgaagcaggagcaagcagaaagatatttgcggatggagcatcttctagtcagaagctattttgatccgcatgaggtatggaaactatattatgctcgactattcaatatcacgttgggtgttgcttttgttgttgctgtgtcacctaagcatggttgtccgcaactgttcaacagttcaaacaatgttgctatatctgttatctcttgcattttctgtactctacttgcgacttttgatatctttcaaaatcttaagtagaaccagtgagcggttaaacatgaagttgtttctagatgagggtctcaaagtataacacatgctcgtatttctgagtacaaaagtatctttacatgttactagctcttttacatgttgatggatttgacttttctatctgattagtcttttgaggtgtattgtctcctagtcattgttcatgttatgcacaaagagtggcgtttttcatgtaatcatttccttgtgataatcatggtttgctaattttacctttgtttctaaggcttatggagactcaactaaagaaagaaaacgggcacagattgctcaaggttggccatttcttctttattttctacaataacaattttcttcagttattgtatgattaattacctgaaggaaccaagtgatgttctggaatactctctctattgcatgcttaaatattattatgacatgaaaagaagttatgacgagaacttatttcctgtttaatggttatagagtttttgttttctcttgctcagtatgtactcaaggttcactaattgtttgttctcctactcgatcagctgtggctgccgaggttaccgtggtaccaccttcacggttaatggctttgataggtcaggctttaaagtggcaacaacatcaaggtgattatctaaggaactgtggatgctaccaaacagttctgtcaaacttcatctcgttttcttttacttttttgcctacattactaatatatcaatggaatcaacatatgtaccctctctcatttcctaaaatttacatacacttgtgtcaggcctgctccctccaggaacacagtttgacctctttcgtgggacggcagctatgaagcaagatgtagaagacacacatcctaatgttcttactcataccataaaggttcatattcacactttaatagcttctttagcttagtggtctatgatctgttgctcatgattattttgggttttctcatcagttgagttcttgtctaattttcatatctttttccttgtgctggtgctggtgcagtttggtaaaaagagtcatgcagaatgcgctagattctcaccagatggacagtttcttgcatcttcttctgtggatggttttatcgaggtgagttgatccggaatctgtatgtatgataatacaagttattagtctttaaaataattctgtgactaggattgctcagacttgaaaagcattacaggtatgggattacataagtggaaagctcaagaaggatttgcaatatcaagctgatgtaagctctcatgtcttcttttcattttttaattctaactcagtacggggtcagatgagctgttagtacattttaatcaaatgaaaataatccttactgcatctgattattgaacgtgtgacaagtctgtgagaatgatatggtggattactttttgctttttattccaaaaatgtcgcccatgagattcctgaagcaccaagtatatggtggattactgttatctttgaattttaattttttctccaatgtaactcctaaagcaccaagtatctcgtctgagacttcctggtatacaaaatatcagttttggataaagagttcccattccatcctctttacttactatgattaatttctgacaggaatctttcatgatgcatgatgatcctgtcctctgcatagactttagcagagattcagagatgcttgcatctgggtcacaagatggaaagattaaagtaagttccagctgcatatgtttccttaaagttgaattttttgtctgaagatagactattgcggcagtttggtagatatatcttcttcctctcattggtcccatatgtattctgattgaatacaaatagaaaaactagacttagatgcatgtcacttttgcagatctggcgtataaggactggtgtatgcatacgtcgttttgatgcacattcccaaggagttacaagtctttccttctctcgggatggaagccaattactgagtacctcctttgaccaaactgcaaggttttattagttatatctttatttttttattttgtacttgcgatatgaatctcgtcctatcaaaaacttgaggctttatatttctttgatggtagaatattcttttaacttttgattgcatcttttttcttcttgtttttgttaatattttccttttcatttggtagttatgtaagtttattggtagagcttctagtcgaatataatatcaaattcttattatatattttgctttattttatgcagaatccatggtttgaaatctgggaaattgttgaaagaatttcgtggtcacacatcttatgtaaatcatgccatctttacaagtgatggaagccgtattatcactgcctccagtgattgtacagtaaaggtaaattcttcggctttggctgtcagcagtatcattgtttctcatttggactctctgccccttctgccgtgtaataacagtcttgtttccttgcacaggtctgggattctaagacgacagattgtctacaaacattcaagccgccacctccgttaagggtatcttttcttatacagatttatgtacatcttgtaatactttttctgatcttctgtggcaaactctttggttaccaagtctgaattttgaaatatagggaactgatgcatcagtcaactctattcacttgttccccaaaaacacagaacacattgttgtgtgcaacaagacatcatctatatacattatgacactccaaggacaggtaaatttccagcaacggtctcctgcaaatcagtgtcattgtcatgccaaaactaagattgttcacatgcttctatattggaatccttttgcaggttgtgaagagtttctcatccggtaatagggaaggaggagattttgtagcagcatgtgtatctacaaaaggagattggatatactgcatcggcgaagacaagtaacactctaacctcctatatctatcgttttatttttggataagttccacgagtttgatttcaaaggataatcttatggttcctttcttttcgggtttcatcttctgcctttgatgttcgtaatggtgtttgcacctacaggaaactgtactgcttcaactatcaatctggtggacttgagcatttcatgatggtaagtttatatccgtaacagacatgctccaaaagattttggatgttggaaatttgaaagttgcatttgagacaaacacataacagtaactcactagagtaatgaagtcccttgtgtgttataatgtttgattcatctgttctccattttagagctcagattatcatcctctctctctctctcttaatacttatcttagttgtcttttattagacctggtttctgaatagtttatgcttatgacaggtgcatgagaaggatgtgattggtataacacaccacccgcatagaaacctccttgctacctatagtgaagattgcactatgaagttatggaagccctgagttttctcatcatcaagtcttgttttctgtatgattagtctgtctttatttgatttgcactcttctcgggttagaactagtgtaatgtgaaaccatctttgcaaagatctcagccattttgggaacactacccacagactctaaaaccagcatttcagattttaagaccgtttcacctggccttgagccttgtagtagtttatttaacaacgtgtctccttcctctttgaccttcccagccagtcaactcccatatactttttagtcttaggaaagaataaagtcaagctcaaaaatatataaaaaaaaatgaaaacttgggaagttcaaaagaaacaaataatgattctcttaacttgatgaattactcacaggtaaatttacaaatgatgatacgctaactgctttccctagagaccattacaacgggcaaagcagttcttctggcaacttattcaaaaggaaaattgtttctcttaacaaatctaagaaaatattataagaaaaaaagaggaagaatataagatcagaagaaatgaagaagagaaagtaactgtactagccagactattgccatgtccttttgaacctacaaaaataacagtaaaacaaaatacatcaaatctataaactaagatcaaatatatgagatggtgttgtgtaataaaaaaaaaacttactatgtaatctcccaaaaaaaatggcaagacactaagctccaaaccatgagaaatcatcaccaaaaccaccatagtcaaagtccaagtcagtcaatggagacagaatgccactctgatactgaggcaactcactccctgttacaccgtcttcatttccgagtaaaccaaggggttgaagtactcctcctggggcctcctcgaacccactgttgtgaggtggtgcttgtgtattcatttctatctgtgtatggagaatgtcgtcttcctggttatgtacaaacactgcagagggattgtagaagttgtaccctgacccaaattgaagctcttggttagggtttggtccataaagcattggcctttcgtctacaggcatcatagtttgttcattaacaagtggaagataagtatagttgttattgaactcaggaaccactagttccagaccattatcctctggtcctaaggcaatatttgggtcgacaacatcgtcctcttgatgagtaccgttgatgttatattctagcagaggggcatcaacatgattcatatcaggtaagatgtttctttgttgagcttcaggttgttcttcctcttgtcgattgacagttccggatctaattcgaggtcttttccttctgcgatgtttctctgctttatcttgatctcttactgaatgtgagatggctgttggttgttctttttgaatctgatttcttctactgtctttagatgaaactgaacctgaagcttcctctgtcccatcaacatcatagtcactgtcactgttgaccacaggtttcctcctgtcagcgttattacccctacgatgtgtctcagtcacattggagtttccattgtcactgctaggctgctgaatcaaagattcctcttggttcaaaaccgccaaccaaatcgcactctctttagctgtcatcttgtcctgtaaacatttcgactgacgaacatgcctcttaatctttgcaatatcaggtaacatatgattgatcactgccgttaaaactccaaccttccacatcttcttgagatcatgaggttttcggtaaggaggactctggcttttaggcagaccgagtttcacccaccattcttcattccccgttggccaccaaggcggaggcgtccctttctccaacggatacttcctttgaggaggatcacaatgttgcatcaaagaagataacaaagaccctaaagtagcatcttgcaaatcctggagaacaaactgtgaattcctattcccatcagatttcccaaacgctaaacactcctcttcgtatttagcaatagcagcaggaccgttcttatcaaacttcactttctctttccaccaagctcttatattgtcagaggaaccactcacaggcttgcccttttccggtattataccatagacaaacccgcgaactttgcagacttccataagcttcaacatgtacttaaggataccatcttgagctctagacattttcttcctctgagcttgatcagagattttcttaggtgtctccttcgtttgagctccttgagagccagctttttgtcgctctttgattcttttaagcctgacacgatctttccacatccgtctctcaaggtcgtcagcatcaatctcttcatcactcacatcaatctcagcaacattatcactagctaaatcatcaggctcattctccatcctatccacaataagcaaactctcaaaaattaacagctttctaaagtttttgatttgataaacaaaacaaaatccatatatatcattatcttatgttgtcaatacagaggaaaacccaagtattcattgattcatcagctgattgagattgaactaatgattcatataaaccctaaattcacaagcatgaaagggaaattaatgaaattgaatcaaatgttcttcacctgatgtctgctacggacatagcaagatcgcccatttaaacaaaatcaatcaaaaacctttaacaacgataatctgaagcgccgaaattaaagaaatttagggtttttattctttctcctgtcgttctcaggggaagaagagagtaaaaaatggctgcgaattgtggagaggcaaagttttgatttagtcggaccaaagccaaagtattgttgtggcaataacccaacccccaaaggccaaatttttttttttttttttgttgttgcaaaaaccaagttgttttcttcggtttctgtttttttttttctttaatgtaaaaaaatattttgttactttatatctgttgtcgagtcaatctctctttctgtctctcgttttttttttctcaacacggatttttattggctcaacaaatagaataatagtatttattttgagtaattagttacgaggaataccaatgaagtttattgtatttaactgtccggattagtaaaaaaaactcaattttgccattaacctattcttttccccataaattaaagtcttttgggttttaatttggctttaaataaaaagcacattttcttaacttttttgggtttaaaatttgcataatgctaaatgctaacgtataccactcaatagcaaattgttgtcctacatagtgctaaatgctataactcaagcaaactgttcatcaagtcacttgacttctatcaaaacatgatgcatatggcagatagcacataggtaaacataattaaaattattttgaataaatttctattctaaacttttaattagacacacatttatatttttgtaatgttttttatgtttattttacaaacacactattcattttgaatgttttaatccaattattgtaagcaatctcaaaacaagaatagtttcatgctcattaagagattaagagaaatataaagataaaatttgatagctcatgaatgagttttattgtccaaggaaagaaaagaactttagattgtcaccaaaattagtaagactttgatgcaatcataaaatgggaaaaaaaggagagtagcctctttgacaactctctgagttaatcacattaattcacactataaatataagagattacttgtttagataacctaattacatgggcttctagacaatgataagcctttgaactataaaccatatgaattaaaccttttttatggaccctctaataattattacgttcaactttactcatttatcctagtcattttccacatccgatccaacttaaaaataatggtatcatttttctgaaccaccagtgtataaaggagaaggaaaaaaagttaactgatgaattagaaagttgcagcatcattgggaccagttttgcatttacggccaagagctacccacacgaccaccactacgattttcatgtactgctagtattgatttattagtagtttaatacagctcatttagtcacttgttaaaaaatattatactaatcttagtatgttaatctacacttaacgtgccttcaatacaataaaaagaatataattggataccaaaaattagagaaatggacccagtggctattaacttctcacactggagagagagtgacatcaaactacaaaccaattttattttattttttttccaaaacggaactgaaagttgtttgaaaatccctcattggctcttcttctacatttatatttcttttactatacaatatcttagctctctgatacaactattaaatgcttaatatatgaataatacgtggtttagagtaactaacaaacgtaaataaaataacaatatttctccctactcgtggcaacataagctgaacagagccaagtacaaacaagttgactttctgctacaaactttgactatcccgacaagaaaaaaccttaagattgatcaggaaggatctcatcggttcttctatcttgtctctgaccattcttcttcttcttcttctcaacaacacttctgataatttaacattgcatctcctactcattctcatcgtcttcgtcttcaatcttctacacgaatgtcgcagtgaaattttttgactctttcagcttcttctcgccatctctaatggcgatcccttccttcctctctccaaatttacacttttacccttctaccaaactcgttccgagtcgactcactctttcctcatcctccttcgtttgttgtttatcagtagaccgccaaattaaccattcctccgtctccaacgaaacctccggcttacgagttgtcatatccgccggaggcaccgccggacacatctcttcagccttagcgatcggagacgagctaaaatcagccgacccacttgctcgaatcctcttcatcggattcccaaacagtatggagagcacgacggttccatccgccggattcgatttctcaacaatctccaccgtcggatcatcatcgtcccgaccattcctctgtttcacctctttcctcaaattccctctccgcttgatccaatccaccttcgaatcctacaaaatcctccgcgaactaaaaccacaaatcgtcatcggcaccggaggacacgcctcttttccggtctgtttcgccgccgtgatctcaagaactaaattcgtaatccaagaacaagattcaatccctggaaccactaactggattctgtctttcttcgccgatacaatcttcgctcctttcaactgtacagtcactaacctccccaaacgagtcgccgcgaagtgtgtcgtctacgggaacccgataagacaaacgcttagacgatactcgtcgaaaggagcggcgcgtgtgagcttcttcggacagtgggctggagctgtgtcggaaccgaaagttgtgcttttgcttggtgggtctttaggagccaatgccattaacatagctttgcttaactgttactcgcagttgttgtctgaacatgagaactggttctttgtttggcaaactggtgttgaagcttttgatgaaatggatagtcttgttagaagtcatcctcgtctctttctatctccgtgagttatacaacaacatttttaactgtttagctgcttttgtattgactaataactcaaaatgtgttttattatgtggtataaggtttttgaggtcgataggtgtggcgtatgcggctgcagatttggttatctcgagagctggtgcaatgacttgctcagagattatggctttaggcaaaccttctattctggtatttgaaatctataagctgattcatcgaatttgctaatggagtgtgttgtttcttgttttaaaacattgaatgttcttttgttttgttttttaagataccatcaccgcatagcgatgaaggggatcaagtaaggaatgcttctttaatggcggacattgttggatcaaagttaataacagaagaggagctagatacgatcactcttagagctgccatggaagatattctaggtgactaaaaactctacaaagtagaaaacactcacaaatttcaactctcattatctcattgagttggttccaaatgatagggaatgaagaactgatgatggaaatgagcgagcgggcattcaaagctgcgaaagcggacgctgcatcagatgttgctaaacacattatttctattatcaaatccaaagataagtaggtatgttgtatgaaccgtgttacagattacactagtgttgtgaaacaaagtatgtgtatgattgatgagcctcttagtagattttgaggaaacattcttgattgtgttggctaatttggcctagcaatagagagtgaataaaaaaaaatccttatatttggaaatagttgcgtttcttcttcctgttatctttactacttgtatatgaatcaaaactgatcctttgcatcttcttcttaactcaattatctatccgagtccggaaccttctcagctacgcagagtctctcttgagaatgtaactggatcagtgtatgtaaatgaagttaagctattttaacacctagatcaacaacccaaacattgcgtataagttatctatttcgtggacagttatataaacaaaatgttagttaagtacacgctttggaatcgtaaagatattttatattttggataaaattgcaccgacattttatccaatttcactaatttaagtcattttttctccattttgaaattgaaaatcttaaaccacaaaaattagaaatggagcggaaagcgactgagtaagatctttcaccttctatataaaccttagttctgctccggcgacatcgtcgggataccgctagtgattaacggtggttatggataccctccgattcgagttaagctcagcttccttcacttccgccgtcaccgcctcttctttacacagtcactcacggtatttcttctcctcagtgcaactcggccgagtcggctcatcatctccggcgatcacatcggtctcgaggacgacagtgaatgaaatctgcacggcggatgaacttcactacgttcctgttcccaactccgattggcgcgtcgctctctggcgatatcttccttccccaaaggtaccggtatatagagtcatgtaccgatgtgtccatacgtataggtgtatatgtatacgtattatcatgtttctacacttacaggcaccgaagaggaaccatcctttgcttctattgtctgggattgggaccaatgctgttacatacgatctttcccctgaggtgattatgatttagttatttttaggcgagagcttataatagtgttatagtgaaatggattcttgtaactcaagttttgtatttggaagctaaaaccttcttttgtgtttctgtggatattcatatttgtagtgttcctttgcaagatccatgtctggatcaggatttgatacatggattcttgagctccgtggagccgggctgagttctctcagtgttgatacaaatcttggtaaaggcaataaccagcagcggatagtctcgaatctattggagaatttcataagtgtatctgaaaggctggaaaatgttcttgatggaggttagttgatccattttatactgtcgatttggttttgttctgttttaagaacagagaagagaatcttggtctagttactgagaaagaacctcctacaggttccaagatccttgggatgcaagaccgtctatcgaagagagcgggagatttcaagcagcggtttgaacttatccctcattacaattgggattttgataactatctagaagaagatgttccttctgcggtgaggtgacacctcttgttgttttccttctgtagaactgaaccgaaaaaaacatcaatttgacattctgttggagttatgtcttattatcatatgaaatgttggtctcagatggactatgtaaggactcaaaccaagtcaaaagatggaaagttgctagcagttggtcactcaatgggtggtatcttgttatatgccttgctctcaagatgtggtaagcttataggctgatgatttctcttaaaatgtaatgctcagattttggctgaatcatgtttcttcactaggctttaaaggaatggattcaggtttggctggtgtcaccactctcgcatcaacatttgactattcatcctcaggaacactcctcaagtacctattaccaatggcaagtactcgataaccaatcaccgcactgtgtcagtgtcactctctaaagggagaaatatgactgaaaaagtttatcttatatgtcgttttgtttcagaaagagcctgcacaagctattaaccttcctatcatgccaattgacacaatgctcgctatggctcaccctctaatgtgtcgtcctccatattctttgtcctggttaaccgctaatatctctgctcctcaaatgatggaccctgaagttattgagaagcttgttttgaacagcttatgtaagtacaaactacttaacattgtctcaaccttctgcacatatttaatactaggcataaccataacatttgccctggaactaaaacaggcacagtaccagtcaagcttctcttgcagctaacaacagccgtggaccacggtgggttgcgtgacagaaccggtactttctgttacaaggatcatatcagcaaaacaaatgtgcctatcttagctcttgcaggggactgggacataatctgccctcccgatgcagtatacggtagttttctttgacatattcttaccgcaaattcaagatttcgttctcttaattgttgtaatcaataaccggtgtgcaatggtgttgatctgatgagacagatactgtaaagctgattccagaacatctagccacttacaaagttgtaggatcacccggaggtccacattatggccaccaggatctaatttcgggtcgaacggtatgtactatgatcaacacctcttcattcatttacgagtcatatcggtcggttttgtattcaacctttcattctccctacaggctcggaacgaagtatatcctctgattactagatttcttcaacaacaagatgagagttaagatcaacaagaatgcaaatgaattttgattcttgtttctgtacatataacattccatatatacatttatgtgtacaaatcttcatacagttaaactcacaagcactgtatacaaattaaatacaaatgatacctttaattgatctcgtgtatgtgtagattacactaaagataaacgatgttacttgcacgtaacaatctcatcattttcatgtgactaatataaatactagatctacctaacatttttgtagtcgacgacctaattatcaccaacaaaagatgaacaaacccacacgcaatgtggggttcacaatgtctccgagacttttccataggtaatacaaaggtctcaacagtttttcctcagaaaaatagcaatcatgaataaaaagccaaaaaagaatcttaacataaaatagtgatttggtttcaatcccgaaatcaagaatcacatcacaggaagagataatatctaactaagacttattgtacgccatcgttttacagaccggacaagagttcttcctcacaagccattgattcacacagtcgatatggaacctgtgcccacatcgtaattcccctacctcgtccttcgcctcatactcgtcctgtcaatagccaaaacatcaacattcttaaggaacaaatctgttttctactagtgattacttgagcaatgaagccaaaaatggacttacttgacagatgatgcactttctatcagcaactgttgtatcttgccggcatggtttgactttccgaagacaacttttgatctgtttttcagtaagtccagtgttcacatgcccaattctttcaccaagctccaaaagttgctgttttttttaacaacaaaacaaacacaacaacactcaagaacctagtgaaatcatcatcagcttctttactagtactttgtgagaaaggcactaccaacctcgtatgtcatgttatcgacattgagcctcatgtcacggaattgatcgaatgagcttaatactcctcccatcacaaaaccattctgcatcatcatcatctgcaatgaaacacccatatgtaagaaaaatacatattggaacaagctccatatgaaacttaagtcaaaagcaacactctacctcagcgagtccatcagggtaaggcagtcttagatgacgatgatatctatcagtctgctcagcccgcgatgtcaaaaaactcgaatcagaatcaaaataaggattagactcttgattgagagatcgtctaggaagaagagaagaagaaccctgcaatgtaacagttgagttaaaagatttaggaacacaaaaatccaaacctcatactgaaactactagaaaaacttcatcagttacaaacagactgaaaaaaacttacttttaatccacagaagcttttgatatgatatcaaagaacaaagcctaattttgttatagatacgaaaagacgataaacctaaatcaaaacggaaaaaagaaaaaaaaaactaatgcttgctaagtgtgctaactactagatagaggcaaatcaaatattctatagatattataaactaacttaagatattaaaaaccctaaatatttaagctaaatttcaatagatactcaaaatcaaattaacaacatacacacgcaaagaataataaaaatggaaactttaggattaaaacagaaaatgtaaatgtacctctctatgattattactgttactattggttttatctccatcgattttgcgtctcaccggaatattccttctcggaggatctgaaacaactgtgtcaatggagcctccgacgacagcatccgttgaaaacccaactccaggaccacaccaaacatcaggaatcgctgcgcaagcgacgctactactagtactagcttcgctcaagatcttaatcgaaccaccattgtagctactactacccttgttcttgttcttcttcttcgtcttcttaattttgaaattactagcatcccaatccgcggaggagcgaatcactgccgggactgaaacttgctgagatgcggaggttgtgcagcctagaccacgaaacgacgccgttccgttgggtttcttcttagtagtttctggcaagaggaagaaggaagacatggcggatttagagacgcggctaggtttggggattagaggttcgtcggcggtggaaatgggtgggagatttcgatgattcctaggtcgttggagtctcatgtgttgaccgattgttgttgaagaagatgaagaaggctctgcagaaactggcattgtgttctttttctctgtgagagagagaaaaaacaaaagagagatagaggataatggagacacagggcgaggaagaaggtaagtgaaagggctttcttaagttggattagtgaaactaatttaagtaattagtacgttaactaatcaaattctactttttcatttattctctagtttgtgtttgaagtctacaagtaaccaaattagatattttctttcacatgtcacatactcacatgtaaatgtgtggtttatactttactttagagttttaggcttttagcactgttgctatgtttgaaattttgagatgtgagtgtaaaataggtatttgtagctataatagattctcaccggtctttgtagagttggacccctctgtttttttttcttacttcctatcaaagtatcaagatttgacttgattaaaaaaaaaaaaaattgctttgggttcacttttttggtcagaaacgaagatagatttgaggatatttattgtcttttgcttgtataaatagaaaagctctcatgtgtcaacttttacttttttttctttgtcagaggtatttcaatttttatttatttcgaggtatgaaaaaacaaagaaacattagaggatcacaagtcacaggttagtagtatatttttgtttataccgccacaaaattataaatctgtatattttatacataaaagagtctgccacacacaagtatccaaagaatattggtccggatttgctggatcgagattaaaggaataataaaaggtgataaatcgtcgaaaatatttggtgcgtcacataactgattagtcgtccaaatttgagcgaaaattgaagtttgggctagaatgggctgggcctgtatgtgcgctgttccataaacgacaatgaaaacggacaggtcatctcgggccgatccggtctgatcagttatgaaaaccggaaacgaagaagagcggttaatctgttaacagattaaaaaaaaaaactattggctcttgattcaaatccctaatcctctgataaaccctagtcttgaggcgaatcccatgagacgatttctgcagagagttcccagtttactggctcgaaatatccttcactcacccgcaaatttccgccatttgagaatcaacaaccctcgtgttgttgttcctctcttcgaacgagctatttcccggttcgtcttcttctcttccgagtccgactcgtcgcgtggtttcagaactgaagaggttctttctaaagaaggtgacatttcttcaactcaacttcttttgtttggttctcaagaaaatgtacagttttgaatgaaaaggaagagaattttgcaatgacagagttagctgatcagctcataatttttcatgtaaagattataattttgcttactttcttaatccaattggtatttcagagctgaaaaaaagaattcaaagctttttggatgatggaaatgaggatgctatacctgatttatttgaggcattgatgattaggaagttatcagggaagcacgatgatagtgatgatgaagtgatggatgtggtgcgtaagtatccagttaacgatgcacataaggttgacgatattgactctgatattgagagtgatggccatggtgattcgtctgattcagatattgagagtgatgacttgagagatggtgattcgtctgattccgatgtagagtttgatggtttcaatgatgttggcttgtctgatgtcaatattaagactgatgccctgaaagctaatcgctcgtcttattcttactctgaaagtgattaacacatggtaagttttggatttcgcaccatacggtactcgcaaagagaacattttcttctgtattttacagtctcttatttttttgtcacattttgcattttctacttgtataacttgattaaatggatatacaaattatttagtactttagagattttctaacactgtgcttgttagagactatttaatctttaagcgtgtgattgcttgcttaatcatgtgtcttgggctttgtttatcctattcattatgtgctaagtatgaaaaccttggtggctgataccacatggagaatatggattctagaaaagtgtctgagtaaacttaatatatactgcagcttatcttcttttattctttcatggcctgatatatgtttaacattgtgatcaatgaactctaattggtcttggttttgggccacagacttatgcactacattgaagattttgaaaggaagcaactgcctagtgaatggaaacagatcagtttttggtccatgttggctgtaagttctgccttttgaatataattagaaatttaagtcatattttgtgcttagtacaatagtaatgaagtaaaatatataattatgaaggtgttctcattactttgtttaagtgtcaacaaattcatataccttcactgggggtagccgaaagctgacatctattttggttacacgtggtttcataacttctccaaaatggtgcctaggtgtttttatgctttgtccgagccttttagaaaaaagttaatctcttttagacatatcgagatctcctgcaaccacaaactctcgtttgagtaacgtgactcactcaaagacattttcttctataaatagaacgagagaaacccactttaaactccaaaccaaatatcttcttcttctttctataacttagtgagacaatgaagggttcttgcacaaaaccagtgtttttcacttgtacaatccttctcattttaattgttgcccaagaaaacagagtcgctgcagtagatccatgtaatcctgcgcagctgagtccatgcttggagaccataatgaaagggtctgagccatcggatctgtgttgcagcaaggtgaaggagcaacagcattgtatctgccagtacttgaagaaccctaacttcaaatctttccttaactccccaaacgccaaaataatcgccactgattgtcattgtccgtatccgaaatgctagtcccagtatttcgttctagttttcgatgttctgtttcttgctttcaagaccaaaaaaggtgttctgttctgttcgctcatcatcgatggtttttctacttcaagtttcttacttttgagtttggctttccattaatgtgtttgtcgtcaaggaataaatcttgatcatcacatattcacattgatatgtttttaagaaatttcggataattcgactaacataagctacttaaaagttaaaagttccaatttcaaggatatcactacaaaataagtctctaaatttggatgcaattttgtcaattttggccgaattaatcataacaaggtcttgaatcccttgattccgacaaaaaagaatcccttgattaaaactagttcagagacttcgattgtattaaaaccggcggattttatttaaccgaccgatttgatatgaaccagtaaatatactctgaaccggccaaaggtttattttcttaaaaaaaacaaccctagatttctaaattctaattgttggcccattttcgcctcttcttcttcgatcacgagatcgagaatcgtttctctcaattatctcaagctctaagatctcacttcttctctctcaaactcgacgccgttcgttttctccgtcgattaatcggttcgttttgttccttaacctttttccgatctaatgtatctcttgatccgtcggcaagtctccgatttccactttaagggtttccattctctgtacatccatggagatccgtacaagaatagagtagatattcatatgtaaattgaatcgtttccgaaattgatatttttttgttctggatgatgtttggtggtttcagagtattatgaatcaggaagcagctgaaacagcgagagagtcactggagctggtgtttcggatgtcgaacatcttggagacaggtcttgatcgacatactttgtctgttcttatagctctttgcgatattggtcttaaccctgaggctctcgctactctcgtcaaggagcttcgtagggattctgctacaacaacaactacggttgattaagaagatgcctaatcaaatagtatcattcatgcttgttttctaagtttcaatttcattatgctattgatgtgtaaattagggttggtaaggtaattgaatagagagtttcagagacaaattggtaataagtatttgagtcatccccactcaatccttttgagaggctttctttaagtaaatcacaaagttaccctcatattcttgatttctttttttagtcaatactttcatcaagtacgtacatatacagcggaatcaatttttctaaaacgtaaaaacgtaaaaatttgttgaacgtgaatggtaaaaacaacgttttcatacaactgtgaaaacgtgaacaagtggtataccatccaactaaaaatataactctaaacttcacacttttatgtacaatcatgatcagcagatctagaatacatgttttaccatcatgtacgtagtagtagtttaaagtttaaacccttatttagaaagagtccaatctcggccaaggcactatggcgtgtcttccaatactaacgtagatgaggatttagaaagggtttatatgattttgagacgaagatccggtgaaacatatattgaattccgctggagtcgttatatacccttcgtttactatctccaaattgtttgtagatctctcttgaacatatccgttttgttgatatgatttatcgatttcgatgttttggtagtggctcgcagcatattgttggtccaaatcatcacctatataatcaaaattacattgttgtaacatactatataatcaacgatgtttcgcaattatagaaaaactgaaatggtgtttatgttgacactattttaaagtaataccttgtgtcaaaagagcagcctcgttcgctgttcgttcgcccacttctaaaaagttcccctttgagtaagcatctcgaactaagttcttaacgtagggctgcaacaaaacattaccatagatgaattaaaaaaataaatacagtttctaactaataaacaatcattgagctatcaataattgcttaacttctttaatagagagaaaatgaccattcaatacctggttgagggattcttgactagagagaacatgaccatcgataagtgctttcataacttcgcatatcggattcaaaatcatgaaaaaattcggtcctctagaaatgtataacttatttcccaaaatacactctctagcatgtttcaatgttacttcccactttctatcagacattccaggccccagaatctgtacatcaacaaacccctattcctattagttctctaataataataaaaatttaggggtcaaataagctaagaatttaaacctgacggagttcgtcgacgtcaacgacggatagtttcaaaaagtcttggacagtgttgatgtggcgagaggagagcttcttgtgaaaggccccatctttgcctatcttctctagccgccacacttcgtcttctaacattggtgggtgatgtttcttgtacacttcaccaaccccaagttgtacaaaacaaaactatttagaattatatctagttttctactatgtatcttctttatatgtattcgctttatgcatgtgtttgttgattgttataagattcggaaaatatacagagtattaattaatacgatataagcattgattgaccaaagacttataggctcttgtataaagtgggatagtcgtttgcatacggtccacatcgaaaatacttttagtagtttttttctaattaagaattaaaaattgaatgtgtatatatattaagacaaattaaagcaagtatagttaatatttgtagccaaaagcccaaaacatatcatgacaagatacaacaattttgtaatacccaaaaaattttatatttctatactagtgtttaattagaaaaactaagattctttttaagaagataaagccaaaagcatcaatatagattgatatgttaataaatttgaaaacgaaattatgcaaataaattttgacgaaaacaaaacatcattttaatggatttctgatgcacatgtgttgtataaatgattatcttaaaggttatgtatgattgatagtagggtaatccataagaagatgccaaatgtggtcaggtcaaagataattgaaactagtgatatgttactatcacatcccctagtggagtactgcttaatgaatatatgcacaaaactcattatatatgatgcatagatttatttgttatatattcattaatttctaattaggtaaaatatttagtaataaagaaaaataaacttacattctccacgatgatctctaacaacaatcgcttcagtcatcgcttcacaaaccacaacgccttgaccgctactccctttcgcaactttcgcaccgattctaaacttacggctacgaatccaactcgaattgtctgtgaacacaatttctccgattgttgcaacgccgtttctcaccgtcacacttacttctccggcaagtaacggccgtttcccatctctttctttgatgatgttactctcaaactcatcactagtccatttatcacccgaaggaaaatctccgtgaagagcaacgatgtctagtttgattggacggttgagattcaccggcttgtttgagtcatcaacaaggataatctcaagtggattgttgtccacgtcactgattttactccctgtaaatattggtgtcattaagttcttacggaaaattagcttcagtgtcggagtagtcgcctccggagcttcgatacggaaagacgatgaccgagataatcgaaatcgtttactaattccatattccacttcttgtcttacctggtcacgttaccaaaacgagtagagttataaaacactcttatctgttttatattaacaaataatttgatatccttattacacaaattaaacaatacatactaataaattaaatatgtaggccaatatatagatcttttaaaaggtactagcatatatgtgtgtgtgtacgtgtgtggaccattattttgtcttttatttctagatatagttgattgaaatgttaggttagagaggtcttgtttattaataatactaaaaagatttataactttgtaaatatttagtactatcttaataacgtatgtgtatatatatgatataagaatgcaactatgcatgtacatgcatatgtttgttacctaaaatgtatatagtattagcaacatgatcgaaattttcttattttatcaagttccaattcgcacactagacatcgtcaatgctagactagtatatttgtatgttaaattacacttgttactttaagtatgtgtagttgattaaacatggtaagtatgaaattctaattctcaactcgttcatttgaaatatccatgtatatatatatatatatatatatccactacattaattagaagttagaacaagtatttagaaataacaaaatagaagtggaattattatagtatacttacaacttttctaataacgggctctaggacagaacgaagggtgttttctgagatcaatgctccaaacacactggaaattggcctgcaagaaacaaaaaatataacaaaaatttatcagaaaaaggtgaatagaaaataaaatccaagagtagtaagatctaaaggagatattattttaaggataagagagagagtgaatagaacatatacataaaatacaagcatatatttatatttagattttaaggataagatgtgtaagaaaaaaagaggattgaacactgaacatgttccaaacaaaacttaagatttgtagaaatgattcatcataaacacaatacaagaaaaaaagaatgaaaagtttctgagaaaaattacgaggcaagggatggtagtacagatttaatccgtttctcggacttattttcttggtcagaatcaagatcttgaaataacctcttccctgccatggaattgttctggtgagttgtgagagaaagagagggagagttagagagagagcgcttagatcaaaactaggttttgtaatgttttgacataatcttatacggcgatgatatttatatagttttagtctttagtctcacaaaaaccaaaaaaaaataaaaaaaaataaagaaagttcgaagaacgacaaaggaaacaacctggcaatatccaaagaagtccgaagtctgatccacgcgaataatctatttatggcgtcataaatagggagacttttgacgtcaactccaatttagaaagcttcctttgttgacaaatggacggttccgatcttcccacccgattgggttttagatctaactgctagtataaagcgtgatccatatgccacatgattacttcttgtagagagagcactacgagtatacgatcgatccggtccgttcttcgaagaatttttgttcctttctttatcttgtaagaatattaacactattgatatcatcatatcaacatacttaattatgaaaaattgattgtctatataattcggattcatgtttgttcctctctaacctaattagtaaaaattatgaaaatcagagaaaaagacaggttcagatttgttttctaaagtttatgtcaaaaaggcaaagtttgcaataacctgaacttcttggtctcgtccgataaatacggtgtatgtctatttagcaatcccttttatatagatacaattttattgaactatcttttctttaagcaagaaaacaaaaaattgaactatatatcttttaagcaaataagaaagaaggaaagaaagtcttataataaccttttttcggtttacatcggtttccaaaaatatcctgataatttaatagctgtcattttaagttaagcaggagaacaaaaaacaacaatagtttttatttaatatagaaatgtcatgcgttaaaggaaactaaaattatccaagttcttatgtgttaatataaactatactatataaagggtcaagtgaatgatttcgacgaaggttcattgaattggtttgtccttttcgggtaatttcttgtcgggtgagttacaaatctcaatcatcctctcaaaacttgtcgtgcttttagcttcaatcgactctgtttagtctctgtcgaaaatcttgcttttaattaactttaataagttttttttgttttaacttcaaaatatttttggtagcattataattgtaatgctttgcctccatgataaattgtatggtaattgtcacatagtctttgtcacgatgatattgatatctcacatacacagaataagaaccatctattcactttttatggaatctaaacattaaaagcccatttctgaattgccatccacttttaggggttgccaactcaagaacgtttatttttttttatttttgggtgtgttaatatgtaccttttcataataattttagtttttcaaagactatgatgtgagtaatccattttataactttgtaagatatcaagttaaaagatataggactgccttttttttcttggaagcagcctttacatttgcaattattttgttactattgactaagcaacattctatatatatatgctggctggagattttagttggagtttgagtctaatttttaaaatgtaatttagaacattaatacaaaataaaaatggccgcgtacgggacaaaacagattttagtttgagtttcagtctaatttttaaaacgtaagttagtacttcaatacaaaataaaagtggccgcgtacgggacaatacagccgcgtgagtatacattagcgactaaattttttaaacagtttttcgacatcaatggcttagtttatatgagctcgagtcatctccaaatcttatcaataaacaatcatattagtcacgtaagtgaacaacgaatcacctaatcaaacaacgaaaaacaaaccgtaaaaactaataagctgtcaaatcatatattttggtaactctatatatttacaaaataaaatttatttagaaaacatgaaagtcttatccacctataaaaacccaccatgaggactttcatatgaaatagtgacgctgacagtaagccgatctttagagccgcaaaacgaaatttcgaaattttcatagcaatctgaccactctcaacgagccaatcatataactgacattctctaattaacatcacttaaatacagagccgtgcaaaaaaatgatgtcataggcaaaacaatatggtttaatatatagataaattatatataataaatatagtaaaatatatagtttaatgttttaaaattttattataaatctataaattttaagaaaaacatataaaaattcacagttcccaaaaaagtattcgtcaaacaatgagaaaagtatattactataaaagaaaaattatagaaactaggttgctcataatatgcagtctagcaatttgtgtttagtgttgcaaaagtattaaagattccttgtatttaggaattttatatattgcaagttataccactttcctttattatttgtattaatctctctaactttattaattcaataatacatgtatgataactaaccactattaacaaatatagcttcctaaattttctagggttcaaacttaaattttgtgatgttgcacaaagagagaacaaaatctactgttcaaaattaaaacaatgatctatgtctatcggattcatgtacgaagatctataaagtctatcagattcatacgaggtcttaaaaaaaggtttttcaaagagatctaggtgactatatgaaatcattcatcataaaatggcgagaaaatagggaactatgagaagcgtcttgaagaaagatgcagggatttaccgtcgacatgatcggcgacattgaaattgaaattctcactatcagggatgaagaagattttgttaaaacggaaatgggcctctcttaagagatcgtaattaaatacatatgtatatggatgaagaagatttgttaaaatggactaattcaatcctgctaatgtcacttcccataaatatgtagagtaaatttcatcggaaagaaaaggacaagacttgtaactaaaattgggcatttcaatacaaatgggctgaaacgtattggtataggtaagaataatttggacaatcagaagaaaaaaaaatctgtgaaaaatggagatgtaaatcatgtggaaaagttttgtaatcacaaatgggattttaaaatccaagcacacaaacacgggttatttaccaaacacgaattggcttagtcgtatggttataacgaagaaaattaaaatcccataacactatgagcaaaatataacaacttatccaaagtactaccatcgaacttcctagcgaacaagtaacatttctcgctcttcttcccattatacacacacccttgttctctattcctcaccctccgcagaaactcccctgtcaccgaccgccttgtgtacttcctcggatgtggacctctccgtgaccaatccgtccacgttagtgaccggttcgcattcttccccggaaacatggcgtggacaaatgttgacaagtaatgctcgtcggcataacaattccaaaggcaatatttctcgaacacaggaaagtaagttgtgtccgatactacggctaaagctacctcacggtctatctcgaaccactgagagccttttcgccagttggtgcggctgatgactggtgacatacggcggttgtagcggccgcgacctgctggtccgggaaggtcgtagacgtcgacgtaggagtgttgcgagtttatgaggtaagagtaaatggtggagaagttaaagagaggaatgtccgattccgagaggaggacgaagcggtggtttccggcgtcaagcagagcatttgccagtagccgtcgctcagccgccaccatgctcaccattccccatcccacttccttcaaaaacacaacgagatcctcgtacatgagtcgtgatatttttattaattaacaacttagttgattaatttaaaattcatgtcggtacgtatgtataatagactactcaacgattttatatttatatagtatttcatgatattgatatctttagaaagggaaattaagagtcatacgtagacatgtacgaaaggcactaaaattcaacttttttaaccatattattaaatggctaactagctataggtgttacccagaacggccagacatcaggtgattcaagacagaaaaaaatattagccaaataaaataattgatttataggaagaaactaaaaaacttctttaaccctccaccattaaccttttaaatgaagcatttaccgacaaagtttttggttttattttcttaaaatatagcctagtctcttaaattgataaaactatactagtgtccccaaacccatgattggtctagtagactttgtggtctttacacaccctatgcgtggaattagattttattttaaacccaattgaaaaaaatgtctagtatgatcttcaagtgatcgagcattcgtgtcttagttgaatgacgatgataagtaagagatattattatatcttagaaaaacaaatgcataaataaagtcatctcgacttttctaatatcttcgacaagcgatttttgtttttttataattcacctttctcttataaaaaaagaaggtataaatatatagccggtttgaaacgtatttagggaataaaaaaggatacggatctacgtttttctttgaactagtatactataccttgaacattacgtactattatacttgtcctttgtttcgtaatcataatttaaaatgctaagacatgactagttgaaaataatcataataatatgaataataattaaacactgtcgttaattttgtcataccctcctaagtatacttttatgcagcaccactagttttcaaagtagattatactgtatatgtttttctttacaactactaggttatatgtcgtagtagcttttttggtcgacatgtatgtgtagtgtaggtaatatttataagacgacgtgcgactttattttggctgattaatccgtaagaaaacaactaatttatattattaaaaaaattataaacactgttttggtactccctttttggagtatatatactctacgttaactaattttcaaagtaaattatatatatatttttataaaaaatcccaaaaacatatggatgtaagtataaatatctaaattctagtatattatctaggctgaataacccgaatatcgcaaatatatctttaaatatctatatcaagattatctaggctaattaagtttatctatgaagaattcgactatatcaattatataatctgaggggaattaatgaggaaattgactactgaccttgcttggaatcctccggcgataaaacggcgaagtttcgggcgtatgatcgtcaaagtaaaaagggtcactcgtatgaatgtaaatagagaaaagaccttcatggcctttgaaaaatctctcccacagtttagccaaaggaagcttccctctcgtcaggaacataaacgccgctttctttgtcatcttcaacgtcttttcttgaatcttcgaagcacgtagcaagagttcctcctccgtcatgttatgcaccacgttctccggcatcatcagataatgacccttttgccctacttcatggtcatcatcattagtcgcaacaaccgtatcattcaagggaacgactatttctggctgcggttgaagcggtggtgtagagaaggatgatggggagagtgaagatagacgaaagagttgaggattgaaagagacgtttcttatatggacgttgagtatgaagccgagtccgaatccgaaaccgataagaaacgaatacaagacgaggttttggaagaatctatgagatcttaatatcttggatatgacgatttggtgaagttgatgacgactttcttgttgaagagagtcttcttgcgtttcttggctctttttcattattttgtgagtctgctgaaactaacaattagaaccgtgggacgttatatagtcaaggttatgaattttaaagagacttttcgtcattgggtgtctttaaatatctgatctcacgggctttggatttaactagaaacattgaattgacttgtacaggattttaggggtagggttaattcaattggtacacgacttgggttttatataaacacgttaacttagattgtgacattaaacatgaagtaatgcttggttaagacatgtcgtgtgtcacctatcttttatatttttattactttttttgacaaggctctgtttcaactttcaagtaatgagaaacaacacaagagaatgtgtttggaagacgaattctcagtttctaacatgcaatttcttctacactctcaagtatttaaccctaaaacatataaaaccgatgaactaaaaataatttgttcaacatctcaagactggggtcacagaagaacactctacataatctgaccgttaatgcgactgatgatggtatcttcagtagaatgagatgctgtagaccagtttccgcctgtgttgtttttcaaaacccgcaacaatgtcatcgatcgtatcttcccatgtttcattcccttcaatctcttgacagagttccaaggcaagtcggccacctatagctgcttcttcgtggttatctttaacctccaagttcatcacaagtattgttttcgtaagtgattgttctctgttgttgagatctgcagattggggacaaatctaacttgatgagataaagatattaagacacaggaatgtttcacgcagcaagaaaaccgacagttctatcaaaccatgattgcaatcgggttttcagctaacaattacagcaaggtaaaaaagtaaactaagttacaggaaacggcaatcactaagcagaacttttgagtttcacatgacttagacttcatcaattcacatatgtaaacatctaacctaactagtttaacataatttaccaaatgagaagattgttcggaaacaatgcatgtagaagatcaaagtgtcaacatttcgattttcttcaaatgggataagttgatgaacaaatctactgataccaggatttttttcttccaatgttataagagtttgtgatcaatatgtacgtagtgagcaatcaggatgaagcaattttcaaacaaagtatctaactgtaaaatagggaggatttttcaattaccttcaaggactgaatcgaaaaccttttcttcaaaagtcataaccacatcaaacacaccatcaccagcattatcttgccatctttgaggagcaagtttcacggataaattcctcttaatcatctgcaaaataccattccgcttgtatctgatgaaaacagttaagtgcatcaaacttcaagcttacaaatctccctatacaacccaatgaacatgcttcacaatagctacaagcaagaaatttcgtatatttactaaaacgcacacactttttcttcagtcatttggagagaagaaaacatactttttcccagaatcaataccttaaatcaaaccaagaaacttaaatgtgaattaggaaacaatttcaaggagactaagaaagtaagcaaattatcgaattagaaggagactgagactgattcagtgaccaaagcaaacttagggattcgaaaaatcatgatccgtaagcaacaaaagaaaggaacggattaagaggatacagttcaggatctttgcgcctgagctcatcgaacatctgcttgtaaggagttccaaagtcgtaaacgtttggctctctcagagatggtccaggtagttttacatgtgacccagtcccgtacgaagcaacgtcgagtccttgtctcttaagaagagcgtgagcttccatgctccggttctgattcgacgaacaaaccattgcgtaccggaacctcatcggcggcgtcgaagaaatctgtgattttttcccggcgactgtgacggtttcacaagttaaaagtcgatttcagagatttttaataatgcgacggattgaattgggcctgaaactgatcatgggccggactaagagatcgaatattttttttcatttttgcttttattgacccacgaaaattgtttggttttacatttaagctactaatcaacatcacaagagaggactacctaccaatcaacatcacaacagagacgattgcctaaaccgggtcggcctggactccaaggtcgtagaggaggcggctatacaagtaccgggaccggtacaggagccggttcaagaacttttggattaaacggaagcgaaccaaacagttttaagagtagaagaagtagtggacgtggagcggctggacatgatgatagcatcgttgaggagtactcgaggaactccatttcgatgtcttccttcgccgaaggtagatgaatatgaagatcaaaacatgtaaggtcacccatatttacgtgtatatatatataaagagacaaagaagaggaccttttaaattatatgtttatggatcgttcgttatatttgagatcttaatacataatttgatatgaattagcaacagaagaaaatttgtattttcgaagtttatgtttattttgcgtaatcgagtctgatttagtggagctgtattaggcaaacctaggtaatatgtctttcaaagtaataatttttataggtacgataatttcaacttcaagttccatcttcctaaagaggaacagcttggcaccaacctaattacagactataggactttttgttttctaagtaaagagataattaattaatgaccataacaaaagttgaacaagctaagtattattactaaggaagtttagtttcacatgcaaagaagtcgaactaccggtttttttttatcagagttttctttaaaaccaaaactaagctatgtagtcttatactatgtgatatcgttttccggttccgttctatttgttgatttttttcgattgggtgtatcatgtgtgtaacaagtcaggtacatgcctaaaacccatcaaactaataaacctcaaaatgtatttaaaattgaagacaaaacattttttagtaaaattcttttgaatgtttagtagttactactcttttagtttttatggtctcaaattttacaaattttttttttgactttttctttcttttttttttttttttttttgccatcaattgactttttctttcttacaattatgtttttgttatttgttttgtttttttagacccagtaatacactcatggtcgggcctggtatgttatgtaaagtttgatatgtagcatacatcttgtattcagttactgttttcctcagttatgtcgtttttggatttctttcttcaagttggggtttgctatttgtttcagttgtaaatcaaaaactttgaattggctgctatttttgtccaacactattagggactaaagactcgttcaaaatcttatatatgtcgtctgttcctaaaaagctttggaaattcaaggggttttattttatcaaaaagaattaaaaaatcaaggggtttaaaaagattgtcgaacaattattcaaaagatttgaccatttatgcttgttatcagcacttccggtgtgtcaattagttaagtactgtattaaaaataacaatgcctaaagtcaaaacaacaagttagattgagtcttgaatgcatatgtaactgcatgtgatttgatcagttgaaaatggtatatagtgataggtcaatttacttaatttgataggaacctaattgtactatatagtaaaatataccagaaagaaaaacgttttcagaagtctagagacaccaaaccaagttaaaacgaacttatattgatttcgacattttaagtttcaacttagaccacattttaaatttcaaagtagacctagctaagttaattaattatgtttattcaataaactataaatatagataaatcgatcatgacatgtattctgctactagtttgtggcaaggtggtcgatacgtcttaattcggatgtaaatctgcataatccacatattgttttccaaaaaaaaaaaaaattataaatagccaacattaatttagctcgtatactatcacatcacattataagtatcatacaaaaatatttcttttgtttaacataaataggtactatttaactaaaaatgttaatactatttgaaaccagtgaatatcatcaatcaaactattcttgaatataatccatacaactttttattcttcttaccaaagtgtttaatactaaacggtaaaataactaaaactgtataaccaatgaaatcttaaatccatatagcaaatgcaatcaatgtacgataataggattggattactcgctcgttggtcacaaatcacaatagactagaagaagaaagcagaaaagggagcaccaattgaaataaaatactttgttgaggaggtcttaagtaagtacttcccccttgagaaataatgaaagaagtttgcttaaacagtgctcactggtccggctaccaaacgttggcccacttctctatttggatatatctcctgataaattatgtgtgacccactcctatacaaaaatcccataactctcactttcattggccctccttttttattttctcatctttttgattaaccccacttttattccaatttttttcaaaaaaataataataagaaaactctagtctatatataaacattgccactcgctcgaaaacagccactttctattttcaccaattttcaaaaaaaaaataaaaattgaaactcagaaatggcgaatctctcttctgattttcagacatttacaatggatgatcccataagacaactagcagaactgagcaacacgcttcatcatttccaaacatttcctcctcctttctcttcttctctcgattctcttttctttcataatcaattccctgatcattttcccggaaaatctctcgagaataattttcatcaagggatattcttcccttctaatatccaaaacaacgaagagtcttcttcacaattcgataccaagaagagaaaatcattaatggaagctgtttctacgtcggagaacagtgtctctgatcaaactctctctacctcttctgctcaagtttccataaatggaaatatttcgacaaaaaatgtattttattaacctagaaaccctaatttcacacacatatattagagtactctcagtttctatgaattaatctaactttgtttttctcttttttcttattgatatcacagaattcttcaaggagagggaagaggtcgaagaatagagaagaagagaaagagagagaagttgttcatgttagagctagaagaggccaagccactgatagccacagcatagcagaacgggtaaaattgattttctctatacaaattatagtgtacataaataatataaatgaaaactatgagtaaaaaaattaaaattaactttcaggttcgacgagggaaaataaacgagagattgaaatgcttgcaagatatagtccccggatgttataaggtgattatattttgcttagactttaagaaaatatattattagttcttttattgaatatatatttggtgatgcagacaatgggaatggctactatgcttgatgagataattaattacgtccagtccttacaaaatcaagtcgaggtataacaataacaattaatttctcttaagttataggtcatctaaccaattccattcgtttcaataattatactaatttactttcttttttatgtgaactcagtttttatctatgaagcttacagcagcaagttcgtattatgactttaactcggagactgatgctgtggaatccatgcaggtacagaatctagaattataacttttaattaaaattttctcgtaagactggtgatgtttgctatgatttatttatttcttaatttaactatatggtttgatgtgattataattagatgatttaaatatcgatttttaattggaatattaaaatgcgcagaaggcaaaggcacgtgaggcagtggagatgggtcaagggagggatgggagttctgtcttccattcatcatcgtggaccctttgacttttgttttttgctctcctttttttgtctttctaattttcttcctttttttggatttaaaaagatacttttaaagattaatttcaagaaatctcgatgccatatgatatgtatacttgtgtaacttcgacattacaaatatatatactgcctcgagattgcattcaaagtggggatacataacgatcaaaattttaccgagcagacaaaagtcggaaccacaatgaattagtgtcagtctatccaaccatatttttgacataagttttagtaagatcccacaataattttgacaatatgattgattcttaaagtgttttgaaagttgtagaagcgaagcctcctcatcaatcacactttagagaatagtaatgaggaatgttatttcggcttagctagttaaaaactataatacgattagtgtataataagttcgaatataagcctataaggcagtttatagaaaatataaatcatgttgtcacgtaaatgtagtatcaaacattcaaacttattatttttttgtatgaaacaaagaaatatatatcaatgttagtaaaaaacaaggaaaaatacatataatctcttcaaattttcaaatcagccacagctggaaagccttgaacgtccaaaacaatagtcatcaaatctcagttttaagaaaaataaaaagaatatttaatatttggaagtgtctacattatatttacaacaatatagattaaatttttgcatcagcaactttgattgaggtcaaataaagacaagcaaagatgataaacttgaacaacaactggacttggacatcaggagcagtggaagaaaatgacaaaaatacccttcacttgttactatcgaaagaaagacataatgatgtatgtctccgaaacgaaacacaacgacaaagagaggttttatgcaatttgtgaaagaatgtggattgtagactttgaagggacgtgtttaatcgttgaacaaccaaagatttttcttcctttttttgtgtggactatgtacttatctaaacatagctttaatttccttttattgaatgaattattgcatgaatgacggttccatagttcatagactgtgattgatgttcccaattcattgtaaacatgattgggaagaacatttgtgaaacttctaaatatctgttcttcttttagcatgtaataatactactagtttgtattactattagtgtttctgtttcatcatcaataatattaaatttcattttcctttagtccatttggtcaaatttatccatggcatgtgtactcataaatggtcaaacttataagagaaaactccaaaaagtggaagtggatgatccatggcatgtgttgctctcaaaatggttgtgccttagtctagagctttaaagatgaattaatctcaaaataaattagtcgaaagcagaagataaaacttgaacatagaaaaggaaaaattatatataacgaggaaaaagaaaaaggggaaatagatgcaatgtatgcatccatgaaactagggaggacagcttgaaatggaccattacatgccctaaagaagatggaaatatgtggggcttttttcttcattttcatcttattgcatatatttttatataaaaaatacatcaaaatgcctaattttgaatagttcaattgcatagtggttgattgtttctagttctacagggatattacttttattacaacatggtctatgaaaaaaatgatttaccttttggaaatgatcaacaaatcaatgaatccaaactttctaagatataagtttaaaggttctctttcatggttagaccttagaacaaatgtttaacacattaatcaaaaaaatgaaaaataattcaatatattgttgaaggggatagttttgggaaacaaataaatatttgggaccaacaagtattctattaatagatttggtgatcacatcatttggtggcagagaacaaaaatgggcaagttcaaggatccaaaaacattgtgggaaccaccaaccaccaaaattttggaagtgactccatttgaatgtggaggagttgtttagctcctcaaatctctgaagtcttaacacttaagacacttaacccacaaaatcttcaattccacttttaagtattcttaatactttcttaatattttaagtcatatctactaaaacaattgtagtaacagtacagcaccagaaacatgcagacgattttatttttcttagaaaatttatgatcaaaacatgtatgcaattacgattttcttcgcataatttgttttccttggaacaactgcaataaaagagtgaaaaaagagtctgcaaaacaactgtaagcaagatttcgtaactttgaaattcaggaagaaaattgttactgaacattaaatcaaagagaacacataaattttctccaggggatatgaccaaaggtatttagtgataccttgaactttgaaaaaatctaattacttttcttctttttacaaattatcccaaacttaactcaggccttacattcaaagccaaaacctgtctcttcaaagttctaacatggaggagaccaagcgattatctatgagattcactgtcggagaatctgttgaagctgaaggacttggtttctctgttctggtggcagcagattgatctgctctggtgtaaggctcatcacttgttgaagtagtgccttctccatctctgcagatatctgcacaagtaagaaaaacacaatcatcagcaaaaaataacaaaagctctttgctctgtaatcagaaattctcattttgaattccggcaaaagacaactacaacatctactggaaaggaacgtcgaatttgattgatttgggggggctaataaaactacagagtcatcgacatgaatatacatcctagcagtaacagcggttcaatggctgtgccttgcagttaaaagataaattaccggtgcagggcgaggtggtgggccacctccaggcccaacttggcttggtggaggcaccggtcctaagcctggcagatgagtaatgttcgagctctctgattggccagccatccaagaaggacctctgtcttgagccatcagacctgctaattggttattgttgtagtctccacgatattgacctcctccctgaaacaataaacaagattacaagcagtgagacccaaaagcaaaaccaaaaagatgtagagtttccatttagatgatttattaatctaaagcagaacatgattttaacggaatcagaactagaagtctagaaatatgatgatagcttgacaatgaaaaaagatgagaagaattattgccagaagaaatcatttctcatatctgattaagaataacaatgatagatgtttgagagaattctcattaaagggtaatctctactcgttgaaggtgtagtgctcggaagaaagcacatagataaagcaacataatttcatactcagtctgcaaaacatcaaacatatcgcctaaaggtcaaaaagtaagagtatcaatacctgatatgttggctgactaggcagatgtggctgtccctgcgggaattgaggtccaccggaagcagggggtctgttgcctgactgcaaaattggctcaaataacgagttctagtcagtcaaaaacttcataattcacaatgagggaaataaaaggaaaccgacaatagctactcataagtcataactctgactcacatgatacatgggttgagaaagatgctgagtaggtgcgccatggtgctgaaatccagtgtttggaccagtttgagcttgtccatattgatgatgatatggtctagactgttgctgtgccacatgaggacctccaccagagtgcattggttgttgttgcaactgagtggaggaagctggtatatcaagatgatgaaaaggaggttgctgggatgttggatgatgggaagccggaggaggcgcgttttgaacttgagaagactgtggatgagacatagaagtgacagcaggattcagatgtccctgacgctggggatgcgaaaaacgaggctgtgattgagcactatttgcagaaacagaaggcggtggtggaggcataggcattggttgtggtgttgggtgttttcgaatcggggcttgtggctgcatcgtattggctggctcatgtacactgccaccgccttggaaagaagacatatgagcttgaacgtttggctttggcgggatagattgatgagattgttgaggttgttgtacagcttgtggctcaactttcggagtctaatagaaacagatttttgtaaaatttaagatgcttgaaatgaaatctattaacaaaatgacttaagaggacgcaagtacataccacttgaggaggctgaaccattccgagcatgatttgtgcctggcatttcaacaaacatagcatcatcatcaccatatacaaattctgaaatctatttgtaaatagaggcataaacctaaagattgttcatatctggaaactaacacaaaaccctaattgttaacctacctgcttcttcaacaatactaaacccaaactagtccaatcaatttactcaagtaagaagctccaaatcagaattcctcattgcttataagaccacacggattgcagatttagaagatggaaaagattagcgaagtgaagaagaacctggaaaagagccttcgtcaaaagagggttccgaatcagaatctccctcgcttgttgatggttttgatcaatcaacgtctgcacaattagattcgactgatcaaaaaaacagaattcgaaaaaaagaagaagaaatcaattgttctctattcaaatccgtaaaggatagtgttatagctgataatcggaaaagtatagaaaagaaagaagagagaaccttcatttgagacataatatcatagagctgacttttagtcattccggcgagatttgccggtaaacctccgtctccgccgatctgcttacccgccatggttctcgtcggtaatcgctaccgagcttaacctgtgtgttaaagacgcaacacaagagtacttgtgaacaaacctgggccaagtataatacgggcccaattagtataattccggcccatttaaaattctagacttattagtctatggcgcctgtagatcaactctttttttggtcaaaaatttaccatttttctcaaaacaaaacacaacaataaaatatagagatgcattagatatgtacgttaaatatatttatatgaaattattaatatgtttctttacatgtaccatgttaattgtacacgtaacatgcatgtatattgtataatatgtcttttggaaaagcaaaagcttataaacacaagtttacattagagagaagcgtgtgacacggttttggcctcttcactttcttgttgctccagaaatcttctttttatcttgtctccatccataattttcatacgaagatagttttctttatttcatccataatattcaatatatattggattcttgcctttggtaagtcggtaaacatcatcaactttatttttattctttcaggtaaaaatagagtcttccactacattcatcttccacaagttttgctaattttaagttttgggtaagaataactaacccatgtatatttcacaattcattcataacaaatcaaatgattatgagatatacttatgggttatatatctcaagggattcagtgatctttaaacttggcacttggtataatttcagcatgccctttaaagaatgagtaggcgtataatcttgtctcaagaaaattataagaagtccaaatttataaacatgtattgagacaattaaaagattagaattaaaaaaaagaaaaaaaaaagaaaaagagacgcactcaactcaactttctattttttatttttgtaaaactacaaactttgcttttgattttgtagccgaggtagtctctctctctccatttgataggaagaagaagaaagatacaaaaagataaaagaaagagagaaaaagagttttaattaaaatgcaatgttatacaaatgaagaagcactagcaagtctcttcatcaatgtctcaacatctttctttcttctcctcatcctcctctactccgccgtctccctcctaatcaagcttctccacttcatcggcggctaccctctcctccaaaggtctctatctatacatgcttatatgctcaccttactctatacacacacatatatatatatatatatatatatatatgtatatgatactaagtttcattttcccttgttttcggattttagcatattgcttagttttatattgaagatcttttaaattctgcaatgttttgtagagtagtttcatatttacgtgtttccggaagttagcatatatacagctaaaaataaagtaaatggttgcttttgatgagtttttcatatagttctgaaaagtgataaaaaaaacaatcggtaaacattattgttctcagttgggacaaatcttaatagttttcttattatgtaggaatgaagatgaatatgattccgcggcatggtattccgaagaagaggaggaagaggaagaagaaggggaagaactcaagatgtcgtgtaactcaagttaccatgtgatatctagagatccaaatccggatttgatagctgatatagcagacgacggagaatctttagtgttttacaataatatttctcaaggaggagtaaataatcaacacacgaaggagttcaataatgtctatcaaactcatgaacacgaagaagaggaagaagatgatcaagattctaacacttcttctacagaggagcacttttcttctgccaatgtttctccttatcgcagtgaatcatcaatagaagaggaagatgatggcgttgaagatcttcctgacgatcgttatgatgatgatgacgaagatgaagaggtaggaggagtgtcacgatacgacgtcgttgaggatttggttcgtaagcaaccaaatactactagtactcgtggtccctctcgtttccaaagtggtttggtgttcaatgacaaaagttacaatggtattatgatttctactcctcacctcttcacatgtttatttttcattcttcacatgcaaatcaaaagtagttttctttctacaaataaccaaaattaacacggtttcattttttatttaataatcagtgaaataaaaatctgaaacgacaagtcttatatccgaatttaattattaggtattagtatattcatgtgacgcttatgatgaaatattcttcatagttaaaaatatatatatatacacatgacaataattaaaattatgatttaaaatcaatgataaaccggttgagctaaaaatatgtggattgctttgctctttggctatagcaagagagtttgtgtccaatggaggaatcaagaatgatgtcgacgagatacagccatcatcgggctttgacatgagagagataaaagcagaggaattagaggaagaagaagaagaagagagaggacaaatattcggagagtcatgcacgaatgggtcaacgtcgaaaagctcatcggaatggagaaactctgtcaaaactgacgaccctttctcaacgtcctctcgccggagttgccctaaatgggaatcttacaccgtcttccaaaagtacgacgaagaaatgacttttctcactagaatctctgctcaaaagcttcacgaagcaggtgaaaatcatcatatattatacagtaaatattgaaaagagtgttcaatatataggttttggtttgtattttattttctaatttttgtctatttatagaatctttgaagtcaattatggtggagccaagatctatctcggagaggatcgttcacaagttatcatcaaacggtcacaagaaaaaacaaaaacaatatccaggcagcaatgggtcgagaccaaacccttacgtggaactagaatccgcttacgtggcacagatatgtctaacatgggaagctctaagttggaactacaaaaacttcgagagaaaaagatcaaccacgcaacgaagcttcaacgacgtaggatgtcccgccggaatcgccgaccaattccgtacgtttcacattcttttacaaagatacgtagaaaatgaaccttatgaacatggaagaagaccagagatttatgctcgcatgcgaactcttgctcctaaattgcttcttgttcctgaataccaaggtaatcattgagggtatgttggtatatacggtaactatatattctaggtaagatttggtaaatttttaatttgtttggatatgtagattatgaggaagaggaggagaaggaagacgagaacgaagagggtttcaggtcgaggatatcgtcagcttcgttcttgatgataatggaggaatgcataagaacattcatgaattttctccaagcggataaagaaaagccttgtcagaagatcatcaaagccttttttgggagaagtaaacgaggccccgttgatccaacccttgtacatctcatgaagaaagtcaacacaaaggtcaatatatataaattatatgactacttcaacttccacatcttctactactttatgcatgactcacttctcaaaacaatgaaaaatagtcttacttaaccaagacatgtagtgtagtggtttttattagtattaaagttttctaagttttatcattattaaataatgtcttttactcactttttttgtgagtagtattctaatattattaacaacattatgttgatatataatggtgaacagaaaaagacgaagctgaaagagatgcgtcgaggagggaaatacatgaggaagaagaagatgagtatagaggaggaaatggagatattgatgggattaatagatttgaaagtggtttcaagagtgttaaggatgaatgaaatgaacgaagagaatttgcattggtgtgaagagaagatgagcaaagttaaaattattcaaggtggaaaggtgcttcaaagagattccactccacttttctttcctccacattgaccccactattctaatctaatctctgaatataccctttattctttccccacccacatccttcttcttcttcatattttattttcctgtttttacacctcatattgtagcctgtaggagatcttttagacaagacccaccaaataaagagaaccataaagttttaatatcgaataaatagatagggatatactgtagattgctttagttctttatactttatactttgtctttgtttttccttttcttgctctctatatctttctactttttagtttattagctattaagtttcaggctttattgggaggttaggtgactcatacactcaaggaatcacaacattaggtataaacttttaaggaggataaatcaaattatttgttccatactaatgatgggaatggatttttttaggttgtgattggggtaatataacaaaataaaatattgtggaataacactatatatgtttattaaatttacggaatcacaaaatagtttaatataattgcacagtcgtatgatttgttaatctagaaattaccaaccataccttaaaaatatgtaataaaaaaaaaaactcgataaagagaagccgtgacccgtgagaataataagatttatgtatgtatttacaaaattctgtacacaaattaacatgaaaatattgcaaaacttctagtcccaaacgaagccatatattagagatttaggggaaataagtacgtaaagttttgtgaaacaaaaaagttgatatatttgcagtgaattacgtgtaatgtatgagtaaaaaaacgtgatttacgcccaccgttttgaagactttgccaaacttgatgtacttcccgtcttcttaatgcctgcaaaaacatcatcgattagacaaaagtcacaaaactctttattattaatctgatgattgaacctactttacactaatcaatgcttttaaaaaatcttcaaaacctataggttttaagtttgcttacttgatgacgctaagcctttacttgatgatgtcaagcccgtgaccttagcaacggtcgatgttgttcttgtagctactttccgaagtttatcgagtggccgtgttacactcgtagatgattttgcagtcaccgacttagctctgcaattccaatacttaaaacgttaaaagaagaaaagatatatcttttaaaaccacaagaacaagatgaagatgtggttttaaacctgtctgaaattctgggtggtcttttggtaacatcaatggatccttgtgttcccatagatgcagcatcagacgtaatctcgcttagtctctcgtcgtactctgcctcggcagaggatgctaaactttcgccgtcagtaacagagtatcttgattgtgatgaatattctcctgtatctgagtttatgtcatctgtatgtcctatgctttttcttctcatcattgatttctgaagtctctgaggctgatgctgaagtctctctatctcttcgtcttttctcgctatggtgtccttaagggacgctaactgtaaaagcaacaaatgattcattctatctttaggttaatggtaagagagatcagagggagagagaggggagataaagtgtctgtttacctgttccatcaagtctcgaacatctttaccttctttacttgtctttgcagcaccaagttcgactccagagacacgctctgcaaatttcaaggtactcattgactctgagtatgaagtagcgtcagggttgagttgcacaaacattagtgtctttgctcgtcctcctataagccacatcacatagaaacaaaagttatgatatttcttattcatgaatgtggttatcatatataaagttcactaaccaagagaggtttggagaagctgtgttagcttgctgtttctgtatggtacatgagaactctttgaagcgagagagaatatcacatctccaagagatgagagcgacttgtttatatgttgtgcttctcttagtctgtctcctgtaacttcagagcgatctactctctcacttcctgccagatccaccaaatgaagattaccgtatagcacggaaccggtctttaaatctttaccgcgaacgtgaacagtgacaatgctgcataagaaaacatatagattcagtgtaaaaacctggagggctgttgaaaacacatatttgttttggttctagaggatgaatatgaaggagaacctatgtgaacgactacttctttcattcaaggcagtagaaccaacggctcgattctgtagtccaatgtccatcaatgtaatcacatctgaagttgatgtcacaggatacatgcttgcgtcaggcacagccaggccattttgttgagttgtagaaaggatccctagtgttgtgtgaaggtcaaggaaaacaaaaaggaatggctacaataacactagcaatgagaaaacaaaaagacaaaaccaggatttaaaacaaagggatatttcttttgagaattgtcatcagacagcagatcgagcacttgttcattatatatctccaccatttgcaccccgacttcatacgatatgtttccctttctggactgagagattttaaaaagatcattgagagcgcgataatttactccccagtcttcttcacttgatccatctggaccagtctgaaagaaagggaacgaaggtaaaagcgcatcagcgttattcctatgaaatcttactctcagaaacaacagtgaatacataccattgtataagttttccctgatcctgtctggccatatgcaaatatacaaacattgtacccatcaagtactgacctaaccagcggtcttatgtctgaaaagacgtcagctgcaagaatccaaaatatcaaatgaacttggtgatatcaatataatattatttctcgagatgtaccatgaattctcgcatagatcacacaaaacagaactgaaaagcataaggatatataacagaaccggtaacagatgaacacaccttgtgaagcagttggactatacaccttgttgaacttaaactggcgaagaccgtctttcccgggtctagttggattggtaactactaattctccatcttcaccgacatactcgaccactgtgtttgctgcaccctgtgcaggaaggaaaggcctcacccggcaaaacactctgatgtttcctgcaagtcataactatagaatttatgggctgcataagttttgaaaatacacatctgaacaaatactgaacatgatcctcagtaccttttagctcctgaagctcgttgaaaagcttccggttttcagttagtacagcgtgatagttttcagcagcattgctaagttcaatcagtttctttcctgaagagacagattttaatttataaacactacaaaaattgcaaggtcatgaaaggtttgtcatgactacaaaagcatcacttagatcattctcacctagttggctgaactggtctgtatagttctcttgtaccttcagtatttcttgcttgatggatcttgaataggacctcaactcctgcgattcagcataattagccaactgtcgattataaaatgattattttagcacagtatgtatatatggttatcataccagtagtgcctgagactggttatcaataaagcttttataggaaagttctttctgactccatctttggtggttggactcagactttttctccatttctctgactttagtcttccacattacgaggttttgttcaagctcttggatctttccttcaaggcttgtattagcagtttttgtttctttttccatttgttgaagctgtttaatcttttcctcaagagcatttttagcagaatgtgcttcttttcccatttgttcaagctctttaaccctttcctcaagggcattttttgcagtgtttaccacttttccctcttgttcaagttccttgagcctgctctcaagtcctgttgtagcgaccattgtttggctttccatttgcgagcattgctgttcatacgcttttcttgttgtctccagctcttgccttaacgcagaaatctgaaggttgaactgatcattttctttcaatagcttgtccatatcctcctcttcatttttcttctgttcttcccactttgacttctctgtctatatcatacaggtaacgccatgttaagatgaattagtaataagtcagttcataaaacaactcgcggtataatgtaccaacctttgtttggctttcaatttgcgagtattgttgttcatattttcttttagttgtctccagttcttgcttcagcgcagaaatttcgaggttgtgctgatcattttgtttcattagcttaaccatatcttcctcttcgtgtttcttcttttcctcccacattgacttttctgtctaacatacacaaaactccaggtcaaaacttaatttcatgtcattgccaaattacaaataccattatcgctcaaacagttcacaagtataatgtacctctatctgtctaagctgttgtgttgcaatctggcaatgaataagttcatcaatagagcagaagatatgtaacacatgagtaaaatgttatctgacaagatcataacaaatgatacctcgtgttctacaccagttcctgatgctaaggcttcaaggacattgatccttgactggtatttttcctcgcgagttttgaaaatattgttttgctgcacataaacaaaaaaacgaaattattcacaaaaaccagaacttgaacattgctaggaagcatttttcctaagtaaacaaaatcataccgttcttagatgttcagcttgagttgatatacgccgctcaatctcctgcacgacttttcttaacaggcatgccacacgctgttcattgtagcttttgtcaaaacatttcccaagaagtaaaagcacaaaggaaggtatcttatagacgtgatgatcttaataattgttggcattcaagtacctgagggatttcaccattctttctttcgatactttcatctagaattccattcaagacgcttagcaatgactgcgtaggagcattctgcatcaaacacaagcccacgacattatcaatagacttcaaaagaaaactatagtttcatcattaacaagatagagaaaatacatctaagctacttgatttcatcatttcagaaatctttgaagcttgaagatcataacgcccctgtttcatttggaaaacctcatgaaacttgtgtcctccatgatgcattgatccaggagataatggatctgccgtaaatagaagacatttaaatattatacatacacatacataagtaggcacgcattgagacaaatggtatgagtgatttgccaaaaaaaaaaagagagtacctaattggccagagctggcaagggcttgctgaaatttggactctgccagacttttgtgcctttcatctccggataatggagaaaatggagagaaaggactacgaggagtttttgtatctgcatgatttctatgcctatcatctacagataatggagaaaagggagaaaacggactacgaggagttgaatctccataagggctgcccggttgatcacgcataggattcatcacgcctcgaggtccaaagcaaacttatggaaacacctggaaaccccaaaactgctgcattctttagcaaaaactcctgaaacatagttgattgagggaaagaaaatgagcattagacaaaattcataagaacacacacacacacatagaagagcaatctagatgaaaagaaaaccaaagcctagttctttttgtcttttcctacatgcaaagacgtgcaagaacatgatcaaatggcactgctagacataactatctcagagtcatcattgtaatcagctttactctgtaataaaaaatcttagctgacaataaaacatagtaaccagagtcagggattactgtgatgaatttgagaattcttaatttattataaggaaatttctcatatttccatatttaaagccgatactaaatcctaacaatcacatttccattaatttcattaatctagggattcaaagatgagattttttctagttcccagtataaattcacatgatttaaccgttatacagcattatgaattgagggattaagacaaaaacagcaacgtgagacaatcgaacaaaacttgataaaacaaaactagccagaaggaaacaaaactaaagacgaacctaccagaagggtacattggtgcaacaagagaaaaaaaaattcaacattgaaaaaccaagtcaaaacatagctcaaagtcgcgatcagcaaaatcgcaacatggcaacaaagatatgaggagaaagaaaaaaagatgcgatctttgttctcattaccttagaaaatcaagacgatgtttttatcgggaaagcttggaaacgagcgttgaggaggtctaaaacctgagagaagaaaacagagagacggagaaaatagacgtgatgggaatgtgggttgatttgatcttttgattattattagcggataatagtaaactaattaaacgattaatttttctctaatgattaaaaattatctatacagagtaggaaaaaaaaaattggggtttgtttgttgtacggagggagagagcgcgaatgtaggaggacgcgcagtaattaacaagtcttttttggcttctccaatcgtttatacgggtttattacacgtggcaaatccttgcctaaaattaacgagtattttaacagattataaattggattaagaaacgattaacttgtaacatataattggggtacgacgaccaacggaacattttaatatgtatcatgtatgatttgggcacacgtcgtgttgtggtactttacttccaccgtctacaatattatagagttagcatactttatacttaaaaccataggttatgaaaacaaaaccaaaaatatagtagtggtaaattgatctttaatttcgttcaaaatagacaagaaaatacttcagatttaaggaaaacgttgtagtgatacatttatttatcatatcgagctttaatataggaatatttgtttttattgttgttacttaatacttattaattagtgttgggataattttaactgtttcaagtaccgatctatcacacttcaacgcagagcaatcggacgtatgaaagcaaaaagatttcccgcatctatgttagcaagtggtctctcatatcaatcaaggcctattgtgcctccacttccgaaattcactcgttcgtcaataggttatattattaattctacacatgtatcacaaaaatgtgcagatttcaacttggtggtgaatggtgatataattaaggtttgtatatcatgtcacataacttgcgtaaattccatataaagtaatataaataaaatggtggtgtaaagcagaggaacgagtcctatgatagagagatgttcaattgttcgtgggtcatgtggcgtaaaattgtttgtttccttgtttcttttggcgtaaactgcaaaattgccaaaaattcgatgaagtcacaacctcttgatttgtatatattgtcacgtcgctatatcaccacaatcaattcctttctttaaaggactagaattc

SEQ ID NO: 1016 - DNA, 100685 bp, Arabidopsis thaliana
gaattccatctaaatatcttttgactgctttctcattcttctcgaatatgaacgacttttctcgtatctgttcaagaaaacagaacaaaaaattgatcagtcttggtttcttgatcataatcaaagaaaaaaccaaagacttaagaattgaattgacctggattaagcaattgttcttgagaatgacaacttctccatgattaatttcctcatcgttcatccatatcgaaaacttcccaagattcttgatttcaaaactcccatcttgcttcaactttattagagcctagttccataaatttccaagaaaactcacacttataaactatgtataaaaatcaataagatgaatggcgttatcaaaatgtatgatgaatggcgttatcacctgtcgtcgagagaatcttgtttcagaccctgaccttcctaagtcgatatccaccggatattcacctgttgctcttccaagtaacacctgacaagttgaaagtgtttttagcttaactatatcacttaatcactataattaagcatcccaagaagattcaataacctctggtttattgatgtaatgcttagagcttccatatagaagagcgaaagctccatgagcagcgatgtcacggttcatgtaagattcagcactctgctctaatctcattatctttcgcgccatttcctcgtttcgatattttgaagctacatacacacacaaccatcagtatagccttttgatacattagaaggacaaatggtaaaactatagtttaagagagagctgattatttaccgtccaactcgtactggtcttgaccaatcggttcaaggtccatgtcaagaatctgattggttcaaaaagaaaacacagtttaagtaactttaaccaagaaaagacaaaaatttacactgacttgtaagagtttatataccatagcttctagatctgaaaaggaaggcaactcttcatcactctcaatttcaatattattctcctctggtacgtttatatccatctctgcactcaatgtctgttcacaaatttcattctctggaaagtgttgtagagttgatgaagttgttgcagcaacagtagatgtcgctttctcagtaaagctatcactgaatgcagaagaagaacttgctcgggttgtgacagcacaatctccaaaaccagaactgtcgataatgtctttgctcttgacttgtaaggatgatcttctaactggaggcagaggtggcttcatattattcctcactgatgaaggattaaccgagtttcgagctttaggattgtacagttgcaggttgatatcatcattatctggaatctcatcggactcacggtttataacacaattgataacaccgttaacgatttctggatgtggatcataaggcggtggaggaatccaaatctctgcttgatcaaggattacttgctgctgtgacggtgatgctggctcattcaaggatgcgttaggttgttgaaacagaggatcttgaaacacttcttgaagcagaacatgttctgttgttgttgttattgtgtctgtaacataagagtcatgaatctggtcatcgttgatgtttaacatctgattcaccattcgatcatcctcatcatcaatctcattaccaaagatagttgtctgataatcatgaggggaaagcaaaatgtctgggaaagtgttgcgaaaactttcaatgtcctcaaacttgaaaccaaaatcatcatcacattctccaaacaaattcccttcctccacattaagatgttcatcaatggcattgttattgaccttaagagactcctctaactccaaacgccgcctttttcgtgtagtgtagtaatgagttctgactggtactgaatcaaagagactttgtggaacgaattgagctccgtattggagctcaaatccgactgatgaagacagagatgtaaccttgggattgtaaagaagacaatgccatcgctctgttagttctgaaagtgtaaattttcgagagaatctcaccgctcctttagctaacgtctctagagaagttccatcctattattatacaaggaattaaactccacaaatcattagaaattttgcaaatcttggattcaaatatcgactatttgaatcatagattctgaaaaatttaacaattgattgtaagaattaacaaacagggaaactcgtaagaactaagaaccgatataatcaagttttgatcaaggcagagtattatgacttgggacacaagtatgttaattatcaaacagagaaaagcttttaaacgctgcaataatttagggtttcagtacgagattcagtaacatcatactcgtacgggaacgcaagatacgaaaaaaaaaaagataacagaaaaatcgaaatcgaaaggtttatgaaattaaaaaatcaagattagggtttcgtgaaaaaactaaacctcgagtgattttctgagaagataatcatcttcaggtaaccactgaaacgccatcagagacgcagatttaagcttttcaccgattaacgaaagaagaagcttctattaagtcgagtaaataaaatagatttagaaaggaaatatttaccagagaatcggccacagaatctttacttctctaaaattagcgtttttttagccaattaaaatctcttagtcttctcctattacggtttaattaagtcaaatttcttttgaaagttaatgggcttcaatcttggtccattatgatatttattaccactgacgcacaaaattgggctgtcggaggccgagtccgtaatggatttcaaacaattattgtatgtactattgatgcaaaataataatttagtgtttaagaacaactactaattaaatttctatagatcaaatatgccaacccacttatttattctgaaactagagtgtagtgctaaagattcttgaatagtgtaccactaataataaaagctatcgcaagtttagaaaataaacgtatttatacatgtgagctatataatatgaagatatataaataagaatggtggtggtcacgtgacaaggagtctttgtaaccttcgtggagaccacaacgctgtcttttcttcggccggtcttctccttaaaaggcatatataggcctattatattatacgtttatatatacatacttaaatgcttattgaacattagtatttatatatacacatttgatacttagctagagcttaatgtgaagcatgtgcatggatgtgagttcggaccccacgggctttatgaggcccataaagctaatggagggggaccacgtggcaaggggctagtgcctacaagtggagggatcctaagaaagtaaagtacgtataagtttgatctcgtgatcgtacgtactgtttctactattggcatgcagtgttcgtcgcctagggtttcagaattagacttccttattatacctaacttgtcatgtattccaccacagttacaatcactgaatcacatcaccttatgttttttttgttttttttgttttttttattgtttcatacacatatacgatggggaaaatcaaataaagttggtgaatgcacgcgatttcaatatgtaacgtgttcgtagtcggaggatagtacaaccattgtaaatcccataaattagtatgtccaatgtattgatcgcgtgtatattgtataatgcgtttatattatattggataaagtttatgctcaactcaacgcagtaaatcgaatatcttagctttaggaagacactttgcgtcacttccttcctttttcttcaacaagacaaaacccgtttctcgcggaaagagcatagttataacttagctttaagcaaaatgatggtcacaaaggcataattgggaatttatcatttttcctaatttttagtaatcccctctatatattatttcttctttaagaagtatttttgattactaaaaacgtgttgacgtggcacaaccatgttaattttcagaccttaaaaaacatgacaatgatttgtgaaattacaatatttttataagaaaacaacaaaattgtaaataaaaagcatacatttggtttgagttaaatatcgtctctaagtttaaaaagaacatttttttcttttggtcaaacaactttaaacgaacattttatcaatcacttgtatttaggtttaagtataaatcctcaaattttgatcacagtgactttgcatcggttgatttttattaccctcacactaaaaatgaattgttacaaattttgtctgcttgaatcgttttcgacaaattttattggtattgaatccaaacataagttaaaaagcctggaacttaaaagaattttaaacacagcgtatatataatagatataatcattgagaagattgtcgggaaaatactgttagtgaggagaatgattgactaccatataaaaagatactagtactatataggagagagagagagaggagatgcagcgagaagaaaggtgagcacaaggctcgagagtgaaagacaacaactaaataataattggactattggagctaatccttattcttgatttttcccctacgatgacctttgctcctcactctctgtctgacttgtgggaggtgacaaaatctagtaatagaaagaatcataattataacaaccgagaacacctcggctaaaaaaggaaaaaaaaatagatcacctctgataaccatgccaatgaacaccaatgcccacaatctgatattaaatagtatttcgtcattgtgatctatggctgaataatgctgggcattgcttcggcattagctaaacctttattggctttactgtgaattgaagctaactctcggaaaaatatacacatttttataaattaaaaaagaaacattagatgtatcctttaaaatggaatgatagtgtttgtggtgtttttagaaaaaaaataagagtgttggatgacaatgttaatcatttgaacatgttggataacttcattgcctacgcatgactacaatagcattttttgttgtttgtaaattgagttaaaataacataaattaagataataagatataattgggaaacatgcatctatatcaaacgtgaattagctatgcctgtctccttagagaaatatcaaccgccaaaaagtaaatcagtggtagctattaaccccgtcaaaatgtcaaaaaatgaaaaggaaaaaaaacttaataatgttagccaaaggaaaactaaagtaaagaacaaagacaaaagggacattagccaactagtttaatcatgaagatcccgattcatcaaagttaggagtgttaagtaattacatttacaaataaagacaaaatagtgatttagtcaacaagaaattctaaaatacaaaagactcatgcctcgggcccttaaataagatcaagtccattttttgggtgggtaactaatacgtacgatcaacctttctatagatacacgcatatataattgttgtttactaaagcttaacaaatttaagtcgtattatgttaagaaaattctccttttttctagacacagatgtttgggatgggattgggctttcttttctctctctctcttttttttttttttctttttttcctttttttgattgaacagatttttgtttttgtttttattttttgtcctacaaacgcatttcaataatgatttttctttgacatctaatattgtctgaaaactataaattgttttctttttgatatttttacgtattgtttccgatgcatatcgtttttgataaccatattttatggagcgaacccaaattaatggttgatgatataggtgattggcaaagtgaacacaaaaacatgtaaagactttgaaacaaattgaatactttaaatttaaattcacatttgagtgatttgagagagttaaaaatctctaagaactattccaagaaaactcacattgccttcattttgtacgtttgtttctctaaatccaataagtatgccttttttataaagcgacaaaaatacttcacagccaagattttaaagtacttgcttggttcataaagaagcatttgctcaccaaaaacaattaaatacgcaaatccttacaacatgcataactcattttttttttttttttgtcaatcgcacatctcatcttcaaggattagctagtaatataggtaagagactttatcttgagaaattggttgtgtattaattggctcgtcgataccgaagatttgatcaaatctagctatgagaattggagaagtaaaatcttactctcgtgacctgcttattatgaatatgcatgagaagtcgtcaacgattggcaatacaaggtggaatagactcgtaaattttgaaataaatataattcacaagttaaatttgagatcatgcgatggcaaaaattaggatatgaaaattggtaatcagttttgaagtaatgcgagtgttattaagagtttaaggtatgtgggttggtcgtcgattacaaatatgaaatatctttaaatatttttcaaactttgaatagaccatatacttatatactgtacatgcacaacatttaggataaagaaaaggcgaaccatcagagatataaactttaaaattaaataccaaatgcgcctaattatgattataaaatgcaaattgcgccgctaattcccgcgattccacgtgatcaaagaaactagagtgggtctgcctgcttcggctctaatgagggtacaaggtatgactgaataagtaaatcctttagtgatttaaattttaaattcgcagatttatgtacgaccaattacgtgatagtataaaatatttaattagttggtataattaatagtagctagtttaagataaaccactaacggtttttatgtactcttaactattctcatgtttatgcaattatgtgtgtgtacatatttatagttttaatttgtaaaacgagcaaaataagctaaataaccctcatatcccgtttagttatatatttttccaaaatttgaaactatatagtactgtattaacgtgaaagctaagttttctacttcgattggaataagctaaaaacctttaaaaaaaaaaaaaaaaaaaaaaaaaaaaaaaagctaaaaacctgaatacagaaataatacattatattcatgtattagtttgggtaaagatggaagacgatcacatcccttcgtcggctaataataatgactcgtgacctagaactagactagggatcgctgtccagcaaaaatcccttaaaacaaaccacatagttttttttttgtttttttttcacacaccacatagttttcttatagttcatattcaaaaagtgtttaagtttctacgatcgccctcttcatgtcgattcaatgttaataccacgtatttctgattagacgaataaataacaaaattatcaaaaaaggaaaaattaacgcacgaaggcgtcgttgaaaaagttatgtcattgaaagtctaatcgccgtgattaagcggtaaacctcacgatgagaccgtccgtgacgataaaatgtcaaaggaatgtgacgttagactatccttttcattttttctcagatttcattttttttttcctttttctttatttcagacttttatctttgccttttttgttttctcaaacttcccatatataatttcatcacaaaatagataaaccgaagtaaaaagataaacggtggggagggttttgcgggggagggacgagtggagaaaaactccctgttctaacacgtggcactctattcaccattgataaaaattaacactatgagcttaaaaagcgagctattttctattttctagtttagttttaaaagaaacaacattttcgctaagaaatttcttttaattaacacatcttaaatttttaaaatctactaaaacgaaaacgagtcattattaaattcgatacgttggttcggcgtaatatattttatactccttcatgcatattgttttgaatcctaaaaccatcgattagatatataatttgcatctgtggacaaaaaaatgacttcctacatagtaaagaaaacaacgcgtcatttaatttttatcatcttacatgtattaattagattgtaataagggattatgaaaatacctatgaaaaatgtagagaataagcatatatacatattaatggaatggaatgattactctaacaaaattacttaaaaaatgtcacctatctatttatccatattcctttttttttctttttttttcaacaatagtttgagtgatatttatgtgatggggattcactcaaactggaagataactgtagtgaagtgcccaaagcaaaagatcttcatgggactctctatgtcttaaaaactttttttctctctctctctctcttaatccaccgagtaaatccagcaaacttccactttcagagatcaaacttgagttatcttaagtgatgaagaaagactaattccatggcggcgtttgcagtttcttaagcttcctcatcatctaccgtcaatctttatagcaaagaaaaggaaatcaaatcaagatttacccttttctttgatttctctttgtggtgtgttgggtgtgtgatgttgattaccactggggaaagaaatggcagggttcttctatctaggagggagagacaacaacagcaacaacaacaagcaagatcatcatcaagtagacaaggatcatcatcatcaagacaagagcaattatctttatctttacaaagacgagatctataataacaacaagggtttcgagatttggcctccgcaatacttccaacaacaagaacatcaacaacaacaacaacagcaacaacatgcctcagctcctgcaaacttctactcatttggaatggttcctagcggaagcagcagcaacaacaacaataaccgtagccggagtttatacttcaacgtagtctccgatcatgagccgggagggttcacggtgacgagacaaggaggtatgaattgtcaagattgtggaaatcaagctaagaaagattgtcctcatatgagatgtagaacttgttgtaaaagccgaggctttcattgtcaaactcacgttaagagcacttgggttcctgctgctaaacgtcgtgagcgtttagcccaactcgcttccttgcagcaccactcagcctccagccgtgaaacgcaaaacgccaaacgccttcgagaagctagtggtggtgataataatgatgataaagaccatagtggtggtggtggatcggctcttgctaatacccgtgtggtgaatgctaattctaattcaggtaaaattcttgatgatattgaattagctttcaagattgattaaattttcatgaaaaagtgtcaaagttttaattatgaatgtttgtggagaagtacaacatcatttgcgtgtgaatgaggatgtccgccggatattgctgctttatttatacaagttactgttccttagtaaacctgacgacataaaaggatctaaccaagatcgatttcatgtaaaaacaatgcaataaagattcgtttttgtagatatgaaatgggagctacgctttataatcaacaacatgttatactaaaaggggctaaaaacaaatctcatgtttatattttggtgatcttataatcattaataaaaaaattagggttggaggtgagtcaacacttaccaccggaggttaactcaccggcgatattccggtgcgttagagtgagctcaatagaagaggatgaagatgatcaagcatatgcttaccaaacggctgtgaacattggaggccatatcttcaaaggcattctctatgaccaaggaccagaacatcaagataatcatcaccttaacctacttgcttccactgcaaccaccaccaatgtggaggagaccgccactaagactgtcaccggtaacaataataatggattaatgcttgatccttcttcgctttacccagctcaactcaactccttcatcgcgggtacgccattcttcacacctccgaggtcttgatcagattctgatatcagttattgattattgttaatctttaaacgttataataataagaggatttcttttgtttttgtttttgttttcgtttatctatttttgaaacttcgtgcaatttggaaaaaacacccttacctaggttgttacttagtggtgattaacatgcatattgtacgtacttttaagaaaagaagatagtgttcatgtttcaaagattaatcttttgctttatttttgttcattaggatcgatctctgtgttgcaatttaaatgtggtttagttatagtcttatgatattaattaatatataatataaccctctttttattgatttacgacatatataattatatatagtacttttcaaggtcaaatcaaaaatacttattttagaaaagaaagaataataaaaatcttttggtttgatattgaaatagctttctggttggtgttgagctccaagctacctttttccccgtttatccgtttgcttgccggatctaaacatgacttaactaggtttcgtgttccactgatcaaagatttgaaaaaaaacatatacttagtaaacttcaagcaatttttatattacccaattgaatttctccagagtgaaagatgttaaaattagttctcaattgtaatatatatatacccaacaactgagaaaagatggaaaaagtttagttaaaaactggtcctgggcggctttaaattatatttatgcacttaaatttagcttgtttatatctttctctggtttgagtcatagttgaataatccaaaaatctacataaatattttgaaaaagacctctagtctcatggacaggtttttacttagataatatcgtgtcattccatctagattcaacccctgtctacaataatataggaggttaacgttagttatgtggagaacgtcagattgtgagtaaatacgtaacatgtgaaatgttggcgtagatgaatgtaaacggatggtaatataaagtatttatatcaaactacttccctgcagaattatcatatttttagctatttaattattacttgcatggatcatggatgtgactatcagtcgtctgtagctaatccccatttactaattctgtcttacagaataaaaactggtcgatgcagtatatatatatatacaaatgactgattaagacatatgatgaaactaaaattgatttcgtttttctaatgagatgatataataatttgttttatctatgtgtgaactgatactgttaacaataataatgattagctagtactattaacagtactgttatagattgcttgatttaggacaagtataaatgacagaggagatagatggaagtttctcaaaaactgtagagtgtctgactcacggcatgtgatctcttcttcagtctctctcgatcaaaattattataaaaattaaatgtagttgatccaaaaactcatgatcatatctcctctgatattttacttaatctatctaacttcttgtttcgcaaaaaccctacagcctcatggtattaaacctatatatgggttttttttggaactatatagaacttctctctagccataacttattataactaatgtgaattatatatttgatattttttttcttctttattacgtaccgatgacgtgcatgtggttccaatggtaagtactcagtcatcctcacaggtcaaatgtttggcattgtcattaattgccattaaaatacacggtaggttaagtttgaaataatagttttttctgagatagttagcaagtaaattgttaattaaatatgctggagaaagggaaattaaattgttgagaagcatgaagatcgtccaagacacatcatttgtgaaattgtaaagtctatggtcaaagtgaaagactaattccgaacaaagattttcctcaacatctgttatacttatacctaactcgattatgattgatatgacagtttcttttcttttacctcaatttcctttacaaaaatcattaaatcttccaacgcgtcattagatagtgaccatgtgaacggaattcgtaaatggggataaataacagtttttcacaaatcacaacccaacttcagtttttccctgagatgatttggctccacgtaaatctttctctgtccatttgagatgatttttattcaaaagattcatggctagttcgaacatttttcgaagtatacctctgaaaatagttattaatatatgatgttactatttgatgctctgtattgaaaaaataaaaatcaaatctagataatgtgttacgtactgataattaagatatacatacacaacaacgtacactgaagctaactgagtaaatcttttatttataagaagtgtagagctaaaagttaaaactatatccaacaaacataaaatctaaatacaacggccataaacctagctacaactacagttacagctataaccaaaaggagaaaagatgagagattggtccccctttgtacattgaagcaactgagtgaaactagtggttagggttttctcatggatttagttaagttctttctaagaattaattcattgtcgttgtcctaatcgccaatccatttccatcctcggtattttgtttccttttttgtcaacaacaaccttggtgttctctttactctttatcagcacaatagtggtccaaaagtccaaacaatatgtatgtgatccatttaaatttaatacatttatacatgcaccatacatccatgatccatgcatgctctacatgtgtttatgtatgcagtatggacatacatatacccctattaatcatgtcatctatactttagaaaataaaacaattcaaaatgtggcaacaagaaatatatgtttttgcgaataacaaacggcccattaaagaaactggattcttacaataatatgggccttggcctatttgttttaacgcccaagtcggtccacgtatatagtaacgggtcgggtcatatgagatgggattccttttttttcacctccgcttcaaagtaagaagacttaggttttaagtcaaaacgaaatcggaagatcagacagagctcaagagaagtaaagaaactgcgacaagagaaagaagattgactttggagaagagagagagtaacgatggaagatattcataatctcgatatagagaaaagtgatagatcgatttggttgatgaagtgtcctgtagttgtagacaaggcatggcacaagatagcagcttcgtcgtcttcttcttttgcttcctcggattctcctcccgacatggcaaagattgttcgcgaagttgatcctctacgggacgattctccccccgaggtaatttggttcttaaattttgagttttagctcaaaccctagattgttgattgattagtccgtttttatgaaattgagtgttgaaattacattacttgtgtcgggagcttgaaaaagtttgaatctttcatgccaatttcactacccatgtggttgattttcaaaacctagcttaggggtggattattcttcttgcaacttattacctttgttttggtattaatcagttcaaaatgtatatggttggtgctgagtatgggaacatgccaaagtgctacgctttgaacatgttcacagactttgttccgatggggggcttttccgatgttaatcaaggtttggattttactttgttctgattgaatacattagatttttgtttcttcgtttgcttttattctcatacttggcaagctactctaggttgtgcagctgctgaaggaaaggttgatcacaaattcgatatgaagccatatggtgaaaccattgaagaatatgctaggctttgtcgtgagagaacgagcaaagccatggttaaaaatcgacagattcaggtctgttttatattttcacattcaggtgtttgttttcctttgcttctcctatactggctcttaagtgtaaggacttttcttccttgaatttgcgctaaaggttattgataatgaccgcggagttcatatgaggcccatgcctggaatgcttggtttagtttcctccaattccaaggtaaaaatgttattctcttctcaatgattttgcatatatggtgtaatcattgaaatggtaaagagttagtgaagcaaccaacaatccagcttcaatactcaatccaaatttttatctttcctttgcctgatcagccttacgattgtagaagtttgtgtttgtgtttgaatgagcaggaaaagaggaaacctcccccagtcaagcaaaccgaggtgaagaggacgaggagagatcgtggtgagcttgaagctataatgttcaagctatttgaaggccagcctaactggacattgaagcagcttgtacaagagacggaccagccagctcagttcctgaaagaaatactaaacgagctgtgcgtgtacaataagagaggatcgaaccaagggacatatgagcttaaacctgaatacaagaaatctgctgaagatgatacaggtgggcagtgaaatcaaccccttgtgtaattcactattatatacatgtgacatagtcataacattattataaaccctgagtcattattcatcagaagaaaaaaacaagattttagtagggaagagaaaagaggggttttaagtggtcatcttttaatttgtatctttaatcgaaacagacaaatataaaagagagtttttgtttatgacatataacaaaattacaaaatcatgtggcggtttggttggatataaacatataacgaacacaaagtcttgtccaaagagactgagacgtcaaatgtgtcttccactgcttgaacattagcgtgattgaacatttgaaaacgaccttgattcttcttctataaaatgcgtccggattattctctctaaagattccaagttgttaccatttgagccgtaggttgggatgatgtatattaatggaagagacaacaatgtcaatggtaatgtacttcctaccttttatttgtggcagacatactaatcgtgtttacattttgacttctccttctaatactcaattcaaaagtgtcgatcacgtaagtttcgaatgaatcggatgagcaacatctcattttctttgagtagaggattttagattcggattcaatctcatagaatatgtagtatgcttttctgtataactaactactataagtcatattagtacagaaacacgtgtggcatagtgattacggctttaggactaagggcataaactcgctacaagcagggattggattttctactcactttcgggattgtgccgtcgtttatgtaaaatctagataatcgatgctaatctactaatattacgtgaaaaaatcgaaaataatttgtttagaaaaattggttttaagagatacaaaatcactagctacttttacaaaaacaattacaacttaaatactcttttttttttgttaaagatcagatctatattatagactaatatcttatcataattacgccttatagatgggaagaaaacagcgaaaaaagcatgcaaaattaaggaattatcattggtaactttaactgttagcaaaatctttttctttccttttttcgatggagcctgtgattgcaaatgttgaaaagatataagttctcttattgttttctttgaccaagtcacagccgtaaacgaagaaaacaaacagatgaagatagcaatgaagacatgtaaaaataaagtgtaattttttatatagctgtaatactttgttacataaaaagagaagttgtgcaaatgccttttttaacaaaatttttttttaagaaaataaaactatatacctagaattagcttatcaagcacaaaagcgtgacttaatcaaaggaagagataaaataaataatcatgtttaaggtggaaaatataatgtaatcttttgacggaaataagaaattaaattctggtctgtttttgataggattacattttccagcttaaacatgattattttattaaattatgacaattatatcagtagtttaatcatgtcggactatctctaactaagaaatcccaccaaaatttcatgtcaataatatagtggatggcttgaaatttcccataattaatttatgcatgcatgccaagcaaaagcaatcgagatgaataaaaacaaaagtaaaacaaaaagtcagtatatgtttggacttagagaatacctcgcatgcaaaaagccaacccacaaaatagttgcagaaacacataattgtgtattacttcaattttttcaagatgatagaatataagtttttctaatagaacaagcttttcggatattctcaaaactattggcaaacttgcacaagttttgcggactttcacatgcatggtttcgaaaaatttaacaaatatttggaaactttcaaaaactgttgtctgtagccataacatgaactgtttgtagtaatttacatatgtttacaatattaacaaagtttttaggaagttaagaaaattctaataagtgcttaaaaactttgacatgttcttataaattttcatgtattttccatgtaaaaaaattctcaccctttttactggtcatttaataaaccctaaattgtgaaatctaaatcgtaacaccaaaatcctcaaacataattgccttcttattttaatctctagagttcattatgtgacgaatattggaatcgaggagagaccaattcttccgttgtgtgttgaacctgacatgatgacattgtctataaaaagagaataagcgtcagaaacttaaaatgaaataggaattttttttaataagggttagagtttctcatgctacttttaaagaaaattaatgaaattatgtcatttggaaacttcaaactttagaagaagttccactctaatataaacatacggtacagttgacactaactcattttctttatttttgtcacctgcaagaaactttaaaaaatcacgttggagtttataagactccaacgattaaacgcttaacgcttaaagtagttttacgctagctagttcgctttcttacgaagactgatacattcggatcaccataattatagttcgttgaactgaaatcaagaaaaagagagagctgtttctgttaaacgtattgaaatcacgttagtgggtaaagtggcattagtcttataataatatgttgaagggtcatacttgtctcgtccttatagtgttgtcgcacgtcaaggtgtcttcttagtgacatccacttatcatcacaattcaaacgaatctaaggacactctatatcaaatatcaatcaaagcatcggatgaaaactttatatgcataatctttctattagacacaagcatatgtatatagatatacaccattgaattgcatgtgaaacagtgcagttatggaggtgtgtatacagtcattaaatgtgttccagttttgcagaaccgtgtctacgttcttcagacaatcagtcggaacgttttatctttgttgattatgactgatcacaagtattgtcgtaaataagtgatagcatttagcgtatcggataattagtgaaagaataagagccgagtttatataacttggtcatattaagattctaaatttatgcattaatcttctcaaatacctctaaaagtaatttacattcttttatcttggaatttaggttaaaagctaaatcttttgtggtaaagttcaaaagtggagtgagaaaaagagaagagagagagatcggagacaagaagattcgctcgtgggcgagcaaaaatgataaagaaacgaaataaagtgaggaaaaaggagacaaggcaattaaatattccaactaagattggtctccctcttcttcttcgtctgctcgttaccggttactatcttgttgggtccttacccgatccgttactgtcttgctgggtccttacccgacccgtttctttaccctttaccgattgagagagatagacttagatcgaatatcatcctttatatatcgggatcttctttttcatcctaaaaagggttttgttttcttccttttttaactaaataagggtttatcttctgtcacaaagaccaaaaatgctaattaattccttttatttgtattttaactaaacacttttataagcactactgcactagttccggaaattgggctaattaatagtgaaactttagtctttaccatcaataatacgcccttcttttataacaattgatgtttagtgatctttcatattcattaaggaacaaactaaaaatatttcatcctaccatctactgatctacaataaattaattagtgccagtgttgtgaaattttgaattaaatttgacaccttagttaattatgagttcagtgcttgtttcgcataggtaacaacgaatcatcatttgagaatgatataaaacaacctaaatatatgcaagtgtaaatcatgaacctacgttatagatcctaatataaaccatatataattaacaaactaatatgtgctggatttggtatgtccagctgggtatgtcttcatttatctctcaaaatttactgatactatagctaatagctatatctgaaaagagtaattcccaatttcaacatacaataacaagatattcatcaataagatcacttttactagttatgaacagtacctggagaaacaattgatatttttcaattatctaccatacacatcatcgcgtaaatcaaaccctcaaattctgaatgaattagaaggaaaactcatgccaagacctctggcaaactacgtatttttattatgatgaaataatcatttacaagaattgtagacagatttggaaatctcagtatagttaatgaaggggtctgcctcgacaaatggcattatggatacggttgagcatacgtgtaccacttgcacggccagtttcatcacatatatacatactcctttgacctttcttaagtttttttatttattttaatttaggattaccccgaaactacaccataaaatttgttttcaaaaaacgtcacaaccttttcttgtaagaagcttttctacaactaatctagtaagattttacaaaactgtttcgatttttttttaaaatgctgatatcattttgaatgtcccaaaataatcccttctttaggattactggaaatgttttaacaaaattgttttagtgataatgtttgtagctagaactacaactagttatttatatattttgataaatttttaattttgtaggaacaattttctataaatgtagaaaatatttacagaagtatgatattattagaaacaatgatttcttatacaattaaaaaacatgtttcgctgtgtattgagatattttctattcaattttgatatgaatagcatctatgtcaagaacagaggatacaaactttagtttaggttcatcgggataatggtagaataaatatattttataaaatagagcaattagataaattagtgtaacgtgaaagtataactaagtttaactagatgtattaaaatgttaaggtaaatatctttgttattgttcataaaaaaaaaagatttttgtaatagaaatggaatataatgaagtaatgaaaattccatattgttatattttgttatgttttacatgttgctgcatatagtttatctaaaacagatttgtgacaaaataatattccatgaacaatttttgccatgatatttcttttgtcgtgatacattcgtggaaggaaagaaaaatacatatttggtttgttttcacgtggatatgcacatgtttctgtgtacaatttactaaattggtttctctgggtttacattgtcgatctctccaaaaataacaagacaaaaagaaagagaaaaatgaaagcatatacaagcaagcaaccataaaattttcgatgattctattctatagggatacaaatgtatttgactattggaaaacaattacacacgtctattcgatgagcacaaaaaaatagaactaaaataaattaacaagaaaaataaaactaaaataattgaggacaaatacagataataatattggtgtaagcgtgtacataaatattgatcgtgtgggtgtgcctgcgaaataagaggtactgtgggtctcacggttcggcagtgcgcgtggggctcgtccctacaaaattaattatgtaacataaataaaatcaagaaatatatttaccaaaaaagaaagtaaataaaagatgttaaaacgaaatgtcgtacatttataattaagagtgttattctcctgaagactatactgtacaagtaataattagtagcaatgccatgctgctcaataaatatcaaaggaaaggacaaactaaaaccattataatgtctacgatagtgagtgcaaattgaggaatagagtcgtaaataatgatatattttgtgctttttctattgttatttttacctttttgattttcagaattaaatgattttagatatacaaaaaattaagaatcataatgatggttgcgttaatgagtagtggcgtgagggttgtcatgtcagctaaacagcagaaaaataaaagaatgtgggagacaggctttgcccttttacacatttttaagctctcttctttattttctaaaaacactatagtacacagttaaaaatttgcgggccctttgtttaatcgatttagatttaaccaacagcttcatagtcgtttcttcttgttagaaatcaataaatgaaaagttggttgttttgaaagcatataattaactaacaatgtatcatgttgtgaaacaaaagctgatgataaatgttaaatatagtgtccaaaattttgggaatgtcttcaaattttgattttaaaacatatgagatgtaccaacatccacaaaatgtttgtgaagttgtgacttagtgagacgttgtcactttattatctcgttttggtaacggtaagtgcatgtgaacgtgtttgattataagtttaacccgactttgtttacgtggtcatagtttccaataaggctaagtagaatagtgtatgatagttttcaattcaagagtcttttttttccaagaaaatccgaaaacacaatcgtttattttaatatctcaaaagaaatcatatttcttaggtaaaactatcatacgttgagtttttctttctccttttgcgattttccctgaaatatatttatgttgtgtgtgtgctttgtaaacaaaataataatgaacgtaataatagtaaaacaaaaagtaacctatattattatcatacttgatataacccaatagagaaataataatataaattaaaattttatttcccaattcaaaaatcataatcaaggagtgaatgctgccagtagaccaaagtaacaatatttggtgtgtacatcaaatgataggaaacaacaaaaactcattaatatacctaaatccatatatatatatatatatatatatttcaatatttcacattgttataattaggtttaatagataccatattagaaatctcagtatggtggttcccacaagcaaagaggggaatgagattgctatctacctatatttatatctccgcaacttcactcttttcctcaatcaacacacacaaacacacacacacacagcctttttccttcgttgatcgattgttaagctcgatccaatggcggataacaccgataatcggagatccttatggggagttccggagaagcttcagcttcacatagcgatgctgacgttgcaattcggttacgccggattccacgtggtgtctcgagctgctcttaacatgggaatcagcaaactcgtcttccctgtttatcgtaacatcatcgccttgcttcttctccttcccttcgcttacttccttgaaaagtaaccttctattttcacttcacttctttatttgaaaaccctattttttctctagttgctagttatttaattaccaaacttaattgtgttaatttaggaaggagagaccagcgattactctcaactttctcatccagttcttctttttggcactcatagggtatatatttatatccttcactctgatcttttcaataacaaatttggataattagttaatgaattattacacgacagaataacagcgaaccaaggattttacttgttgggactggacaacacttcaccaacatttgcttcctccatgcaaaactctgttcccgccattacctttctcatggctgctcttctcaggcacttactctacacatctctccattttcattctcttttgatttataaaaataaataacaatattttggacagcttggatatacaagaaccactttaataatgtccatttgacttttcaacgtaaaagaaacggataataatacacgtagacaatatttaatgccgtttccatttgcttacaaaatagtgataatcatagtagtaacaacaatgtaacatactgtttatgtactgtatgtgaaaaaaacaataattcaggattgagaaagtaagaataaacagaagagacggtatctccaaaatcttaggaacagctctttgtgtcgccggagcttccgtcatcaccctctataaaggtccaaccatctacactccggctagccacctccacgctcatctactcaccacaaactccgccgtcttagcgccgctaggaaacgccgcgcctaaaaactggacccttggttgcatctacctaatcggtcactgtctctcgtggtcaggctggcttgttttccaagctccggttcttaagtcttatccagcgaggctctcggttacgtcttacacttgtttcttcggaatcattcagttcttgatcattgctgctttctgtgaaagagattctcaggcttgggtttttcactccggttgggagcttttcaccatcctctacgccgttagtttttctttcatctgttataattaattcgtttttggccctaatgtttcaaaataatcaatttggtcctaatgaattgatttaacttcagggaatcgtagcgtctggaatcgcgtttgcggttcagatttggtgtattgacagagggggtccagtcttcgttgctgtttaccagcctgttcagactcttgtcgttgcgatcatggcttctattgcgttaggcgaagaattttatttgggcgggtatgaaactataataatattagtggtttatataaatacttgataaaatccaaggtcctaaacaagaataattttaaaatttgttgtgccacatgtcatatttctaatggcaggattattggagcggtcttgatcatagcgggactttacttcgtattgtacggtaagagcgaagagaggaaatttgcagcgcttgagaaggcagcgatccagtcctccgcggagcatggtattgaacgtgcacctgtttctcgcaactccatcaagtcgtccatcacaacaccactactccatcagtcaacggacaatgtttgactactttggacaaatcactctccagctaataattacaaatgccattacccaattaaaagggaacaatggtgtgccgttgtgttttatgacttttgtgtctgctttttttcttagtgttttctcttcttttttttttctaaaaaattattaattacctaagaaaggtttttgaagaaaggaaaaaaaatggtggatgagacatcattgttcatgaggatgatgatgatgatgatagtgatgaagaagactatgtgggagctttggattgagacttttctatatataatatctggctgatatattagtgccattttttcttacatttcttgtggggtttttctttcctttatcatcaatagaatgttataatttgcatttatgatctttagtaattatcactgtcggggatgtttaaaatggattagatcaaacgctttgttctgaactgaagtaaaaaaagatctttagtatttgattaaaatgatctcttaaagaaacagtttttttttacaaatttagtttattatcaaatatccaataaaaattcttaaccgaatgaacaagttaaaaataaaccaacatttaatatatataatataatatggaccaactaagttatagtatggaccaattcttgagttgaaagtccatagattttaacatggtattaaagtttagctaacttgagaaagatgtgttgttcgatatataatttttggtccaatattagaattttgtttgaaatagacggataaaagcattattttaaggagaacgtgttaaaaatttcacatatacacttcaatgctctacattatctttcttggttttctcggatcagcttacacgtcagctttttacatataaaatatcatcttttaatttgatgtaaacaagaagttcattaacagaatttcatatcttatttaccttatacaaataaatttcattaacaaaagaaattcatatacataaggaaaaacacagtgcataagcgactttgtctcataatcgttatctggcataggttagtctaccatgtggattcaagatttcgtatttgaatccattagttaaatcatatatagcccgttattggagactggagaccatatataagccgagatataatgatgttgggccggaataaacgggccaggtttgttataaaccacgccatatagtctatcaagactcgcgaggattacacgttagtacaaagagaagctaagaagaagatgcaaagaaaaccaagagaatagtcaaagacttaaaagcccatagaaacagagacatataatagttacacattgaccgttacacacaacgtaacatcccgttttctttatacagatacattgcacttgatttaatagttttccccatgacacatttttagcttcgagacaaacaactgtcgtttttatgttttttttgatatggtaagaatctgctttcacactatacagacaaaccacatatatagatgtgcacatatataagtacatgtaactggtgtttatttacatatatatcctagttcacggtgactatatttgtatatatatgtagtttgtatatgataacttaacaattaaagagagtctagtgacacctcaaagtggggaatgaaaggaatcccaattagaatagccaccggaaatacaagtatcaaaccgagaaatatcattatctccttcatgaacccatggaaatcctaacgacattgtagcttcttcccatattgaagaatcatccattaccggcaaatccacgtttatatgctcccatgatatctcctctgtcactcttccacatgatgacatctcgttggatgaacacggcgactcagagtcgctgctgctttttccaccggtgttgctgcttggtgtagtctgggacgccggagacgacgccgttttagggtaacttcttaaggactcagggaggttgagatgagcctcaggcccatagagcttacgagctgcggagtcataagccaaggcagcttcacgggaggtgtcgaaggtaccgagccaaagacgagctcctcggttaggctcgcggatctcagcgacccatttgccccaagtgcgttgtctaacacctttgtaagtgcaagacgcgttatcgggtccaccttttcctctcatacaacctttcctcgaactagcttggacggttcgttgtttcttattagcaccaaccatcattacttttggctctatggatgacatgtacggatgttgataactcgaaagtgatattatgtgacgacttttggtgagtgataaggcaaagacatgaggtaatggttaggtgtgtatatatactagaagagagtgatgaaacgtggcgaggagaagatatagctggcgcagacatgacggagggtcgtgtcgagaggaggaagctggtgttgtgtttgtaatcctaacacttgtctcgagagacccttctttttttggcaacagtaatcgtaaaaccagcagagagattgatgagtttgagatttttccaaaaaaaaaaagaaaagagagagagagatatggataaggtcatccgcgattggggaaatataaaaagatttatcactatgaattaatggctcgtcatgtgaatgcttctatctaatatcaagctatggctttattcatcagaaaacaaaatcaagctatggctttaacttaattataatttcaaatagctaaaaagaaagaaaaaaatacatgatttttcttatatatacaaacttttttaattaaaaagcctttagatttataaagcttttctctatgagtcatgtaatctctccttttgtaaaaaaagaatcatcatctaatgcataaacattgagaaagaattgtagttttttttttaattcgttcatagagtcaccattttctttcttgatgttatccatttctccaggctttttaattgccacgtgggaaattatagcaaagtacaagtatgaatgtgtgtaagggtcagtcatgtggcggcaatatgtccacgcaaattaaacgtacgggacccgaaggttcctcgataagagacaaacaaagttcactgaatcttacttctctgtcttagaacatttgtggccgagacacacgtgaaaaggcggcctttttaaccgataactacaaagctccggttccaatttatctaacttattttttgttctaaatattatctctagtattctcagatagaactttttaaaaatttgaagtcgttcaatgtcaagtagattattatggaaattgcaaaacataatttaccaaatcaatgtaattgcaactaaaatccattaatttgttttggatttttttttttttgaaaaaataaatttagcaagagaaatgaagatgatttatgtagatcgagaaaatagtgagatacttagtatgaattatcttgttcgattgggaatttgttatgatggatttgactccgatgtctgcttatataactttaacatatccacaatataaaaaatgttgaagatatgcaattaaacttatatttctagtactatattctgtgttgacagctaaaaaaacaaagctcttaatgcactaaattaattctctgtagaaaaatgcatttgaatggggatcatctgcgattccacactctgaggatgcaatccaggtgacacagcatgctgctagttatttagtcaggtaagaatgtaagatcaccctcatcaacgttttcacagttttcccaacaacattttttgttttctcaatggattgcggttgaatgtggtgcagtgaagctaggacgtcactgaacagacaccatctaagaaagtgctgagcaatctcatatacaactataagcctacttactacgcagggtaaagccactaaggacagtctttgcacaattctcttgtttttcgttgttgacaatgatgtcctttaacgatgtctttggatcatacaatcttgcaggaggggtttcgacgaggtttacatttttacacaaccaagatcccgtttctaagaagtttactcgttactcgtcgtcgtgtgtgtttgttttgtaactctgatttacatttagggagcctgcatgatttcccttgttgaatttatctttttggaattagatcatttcaaaagatacaactgtgtttgattcgtctttctagcaaataacttctgacttttgagattggttaccaaaacggcaaaaccgaagctttgtaaatgagtaatattaacgaagtttttattgcattgaaatttaacaatcacttagattatttgaaaatggtttttatttgaacttttcaaataccattttcataatcaaaaatataaagtaaagaaaaaaagtttacataataaaaatttttgtaacaaaaaccataaaagttaatgtaagagttaattttataacggactttcaggatgagacgtgatacttagttcagtttgttttcaattcattaaaattcaacatttagaaattttgaaaaccaaaatattttatgtaataaaaacttttacataatataaaatataattaaaaaataagttacataataaaaatattctaacaaaaatcataaaattaatctaagggttaaaaatttgattacgtgaaaagcggttgaactaataagacctcttacgacccatagaaacggacgagatgatgcttagtcaggtttgttttcaatgtattgaaattcaacattaaaccaaaatatttatagaataaaaactttagtgattaaaagtttttttttgtagacaaaacattttcataataaaaaatagaattaaaaaaaataagtttacataataaaaatatttgtaataaaaacaataaaaattaatctaaaggttaaatttacttgcataaaaagcggttgaactaataacacctcttaaggacccgttggatgggacgggatgcttagtccgatttgttttcaatgcattgaaattcaacacttagattttttgaaaaccaaaataatttatataaaaaaaactttagttgaaaaataagtttacataataaaactatttgtaaaaaccattaaaaataatctaagagataaatttacttgcgtaaaaaacggttgaactaataacacctcttacggacccgtataatgggacgggatgcttagtccgttttgttttcaatgcatttaaattcaacacttaaatttttgaataattaaaatattttttataataaaaactttagttaaaatttaaaaacatttttataatcaaaaatataataaaaaaataagtttacataataaaaatatttgtaacaaaaactgtaaaaattaatctaaggattaaatttacttgcgtgaaaggcggttggactaataacacctcttacggacccgtaagatgggacgggatgctcaatccggttgttttcaatgcattgaaatttaacacttacactttttaaaaccaaaatattttctacagtaaaatgttcaattaaaataaaataaaataaactttttctgacaaaaaaagaagagaaaaataaaaaaattgaggtaaaaaagataaaaaatcaagaggctaaatcactaaattccaaaatgatgaacaaaaataacattcgcctaaaggacataccagtaaacgaaacagtaggcaagaggctaaatccctaaattccaaattccaaattccaaatccctaaattttaaaattccaaaatttcaaatccctaaattccaaacaagaagctaaatccctatgttccaaattgatgaacaataacattcgcctaaaagacataacagtgaacgaaacagcagacaagtacatgatgaatttgcgtaaggatagaaagttataccaatttacgatcgagatcgaagcattctcgtgttatcaaacagtcacaagaaccctatacatgaagaacaaaaaaggatactaagtcccagcgatcaaaatcaaatctcaaaatcaatttaaagtaagaaatatctcttaccatagacataaaattaaaggatcaaggagaatcttcgtccttacttgcttgaatccgagaagaatcactccctgcgagtctgtgacacgcaaaaatcagaaaaacagagtcacacgacaatgaaaagagaatcgatgaaccctagaagaccctaatatatacaattacaaatcatggataacataatgaaacagaaatagataaaaataaaagagagagagaacgactacaactaagtaacctgatcgtagatagatgactctctcaggttgagattggtgatcctttagtcgatcggaatcataagtgtaatgaaagaattagagagaatgaagaagacggacaacaagtttaaaagattgtagtttgcagttaaagttaatcttaatctgggggagaaactctcgtctccgcataaataacaggagcgtgggaaaaaaaaaggaaatcactataacggctacttatgaaaaaaatggaaattaataataggaaccgactttaatttcataaagacgcttttgcccttccatcgttgacgtcattgtttcttcttcttctctcctccatttgaaaacgcaaacttggaaagggaaactggtttgttctcagatagtgaagacatatatctctagtatactctctcagatagaacttttaaaaaatttgaagtcgttcaacgtcaaatagattattatggaaattgcaaaacataatttaccaaatcaatgtaattgcaactaaaatccattaaattttttttttagcaagagaataatgtaattgtagataacaaaagaaagtcaaagctgctgttataatcaacgttgtaacagatgattaaaaaacaatcaacaagattctgaatgtcttggaaaaagtcgttattagccacaaacatttcatgaaattgttatgagaaagaatttaattaagattttttttttcaagaaaaatccaaatttcaaaatttgattagcttgtggattggtcatcatcgtcgctcttctctttgtgaataatatagatataacacgagacgctaagagcagctgcgcctaaggcgattcctctgaagacatcgaaatgatcgtgcgtgttatataaaaaagccactagaagcgacacgatcggccacgtacagacactgatcacgttcgagaacacggcggagacagcgaacactagccccacgatcccgacccagtagatctgccatgcaacggcttgacccaccatagtcctcacgtaggcaatatctcccttcgtgaacgtttccatctctttcttcatatcgtgatgttcaccagagattaaaacggctgcgactaagatgatggttacgacgagagacaagaagatgatcatctcgagaacgacaacgaaactgggttgttttctgttggtggatgtgttgcagaaagagataagttcctcgaacaccttcctgataatgcagaggagcaaggagaaaaagatggcagcgccgaaagccacattaataattccatagccgtaggatttcttcccgtagatgggtgacccggcggagaaagtgtagagagtgaaagcgccggcgaggacggctaagatgagagagataaacgtccatctattaaatttgatatcgttgtaatacttggagaaaatcagggtgaataatagctgcgtcgtgtaagtgagagtgaaaactctatagggtatctggtttctaacgtcggagaaaaatgcttgacaaaacatgtagatgcagagaatagagtaagttatggctaagtgcttgagggaggtttcaccggagaaaatgagaagttgtttctgtttcttgatgaggaagtggagaaggaaagggagaaggaggatggggaatccgacgacttggagaagtgtttgagtcaagataccgcggcggcggctcaggtttttgtggaggaagtaatagttctcgaggagtctagcgatgcattgacctgttacggccaagatggtgcatatgatgatggtaacccactggttacgtctctgattcgagtcacttgttaggctgatcggtgtggttaggcggtgctcgatatccagggctatttgcacaaagtgttctgtaaaggaaaacaatattatgattggcataccaatatatatatgtgacaagggaatataatgagacagaacataggcctaccttgtggatttgacgactgcattggttgattatgtcccatcatatttcttgagttctgggaatctaggaaactggcgtttgtgtgtttatagccaaacgcaatgggtctgagggtggactttgacggagtaagggttttgcctagttgagcaaatgggttttagttacttatatgcagacatattcctagaagtaaaagaccaagtacagattaaatgactttgtcatttgacactagataataaagaaaaagacaagcatcatactgcttttgcttgttctatttttttttatagaagtagtcaacttccaaagttttggaattccaggaaggcaagcaatttttttatggcaaaggaaacaactcgtgtacataagttttgaatgccaaattatattcaccaaaaaacctttgttaattacacaagatgctttgaagaaaaacagaacatggagccgtaaaaacagagtttgtaacagaaatcatcttcttgtcgcgaacacttgttaattcttatagcagaaaagttcgaaaatatatgtttggtgtagcaatttgaatcgatagagactatcttgactcgaaacaccaccagagtcactctgctaaaccctaaacctcgcagtgaaccatggacgaggctccatgatctcataattagacgacactcgatggcatagacataacgcggttattcataccagaaccagatgatcaaactagcgccgaatgactcgacagacacacagaggcaggcaatccacagcccaagcagtttatttggtaagtttccacttggttctagaggtcgaaaacgctcactagaatctacaccaaagataattaaaccagtaccatagttgcaacgaaactgatacaagtaccataagtctatagtatgtagataaagcaaccaacactacttagtctctatatgagtcgtagcagttttgacattccctggtttagtgaacatctctctctattaggaattgttgacatagcagattctctaggtttccactttggaagctaactcaagtaaaccacaacatttttgtgatcaattcagctataaatcctataaaaaccttcaaaacatatactaataccaccaaaatcaccgtattacaaaggcaattacactttcacaactttgcaggttttcataagtttcgtatattcaattactgacaaagctcaatataccaaacgcttagagagagaagaggttcagaaattctatgtaccagtaaaagtagaatacacactaagatgatgaaggaaacacatctttaacagcagaagctgcagtcaaataattaagtgtattcctcaaagtctctctttctctttttaacctagctgccgtatcttcaagctcaagcaacgcttgctgctctctaggagctccttcaaacgtacttccgacgaagaacgaaaacggcgtcggaaactgattcctcctcagatcttgaacttctttctcagccttaccattcaatctattcgataacctaatcacttctttcattagaacttcgacttcattagctaacgaatcaagattttcttcaccggaaggacgatcttcaagccacgtgacttctccgacaaggtagggtttcgtacgaacgacattcgtgactcggaatcgttcttgacctttgcagactagaaagaatcgatcatcgacgagacgctcgtgtttcacgacttctcctacacatcctacttctgcggcggagccagagacggaatcggagtaaactacgccgaatcgtagatcagattggaggagcgtgtgcatcatgatacggtaacggaattcgaagatctgaagaggaaggattgctccggggaagagaacgagtgggagtggaaacagaggaagctcgacgatatcatcggattttggagatttcgcgttgtgatgcttctcggagaatgaagaagatgaacatcggaaggaactgttgagtttacaacgccggcgattatcaaccgtcggtgataaagatctaagggagtgaaacggtggtttggatttgaaggaaggagataatgaagttgaagaaggtgaagagactacgtgtggaagcgccattacaggggaagagacgaagtaatcagagaatacaaaaaagagggtttattacattatttgaatatttcttttgccttttggtgggtttaaagaaaaaaaaattaaggatatgataattgacatgtcattataacagatatttgagtgatttgtatttttgttgtgtggataataaacgagaggagaggaagaagaagtggatgtgattctgaatatcccacgagtgagagactttatattatccatctacaaaattcttgtaatgccacgtgctctttagattagggattactgactaagaaggaattagtgacgcattttctagatgagaattctagagagaataaaaatgtgtagaagttagttggaagagcatttgaatggtgataggtgtgggttgatttatgacattttcccctaacttatttctccaatctccaaccaattatgtaccaaaaaatcatcattaaaccggttagtataagctttgtgcttgtggtaacttcatttcagggttgtgtaattgttgatttgtcaatttttttggtcaactcaaatattttcttggtttaagagatgcagtagaataagggcccataaagaagagtccaactcatctacccaactaattttattcttgtgataagggaaaagggaaactaattttttgtttacacataaagatttaaacgaataaggcccacaaataagcccattgtgaaaaatggcccattttatatgaataagggtttgtactttgtatcataaaaaatttgaaccttaatttgctgaaacaaacttacaagatctccacacttggagccaaatgagcgcgagttcgtttcataagctaagagtagatctgaaaaagacattacaaagacaaaaagaaaaacaatatattttcacaaattaaattgaaagggaaataaaaatgagaaccactaatcaaatatcaacgggagattaggaggccaatgatagaagtgtagtaggataaagacgagtccaaggcacgtgggctttggaatcgtttgtctatgttgcgacaaaaccattcttttttttgctaagaacaaaacaaaatcattcttatgcaaatccaattgacattaatttacagaaacaaaaccaataatcgcttgcgtagaacgcaacagtagtttcatctcaatgtattggccgataaatttcaaaataatatgtttgtttagagtttggaaccaaccatatgccatgtttttgtcgtcccatatatatgttttagtttttaatattagtttgacgatcagacttttttgtataaaattagtcttggtacatatattaggtgtttacatatttatttgtttggctggatataagaaacaaatatttagatgacagaaaaaatgtgatgggtatcccacaaaaaagcaccataataaaagttcacattacactcattatttttcaaagactttcgagatttccggagaatgattggccaaaatgtgatgtcgattgaggctttaggttttagctttggtccaaaactttgaatttatcaattgggtacattccaaagtctcagttctcgtcgacaatgaaaagggaaaaccaaaaagaacaaaataataatagtatttatgttttcttagaaaagattgctataaaatagaataacacaatgtcccttcacgatgattgatgacagtaacacgatcaaagcttcagagaatcttatatagttttcacattcataaaacaaaagtaacaaacaaatttattcttacaactatactattcttacagatgattctatatattattgaccaaattaagaattcttggttcaaactaagtatttaaatatattatgctcaagagttgaagtagaagttttccaattcattgaaaattctctaggttttaaattttattatttgttttttttctttcaaaaacatgcatatgcggatttaaatttggatggtgacacaaagccggcactaacaccaatagaccttttattttagttttaatattacaaatgttttgttgtagatataaaacacataacgatatgtattttaatccgttagttagtattctattgataacttattttcagtaattcatgtgatctactgcttcaatattgtatattgattcattctacgattaagagctaaaagacttgaataaatggtctatgaaaaaaacgtacatctcggtaaagcaatatatacatctcgttttagtccaactgattcgctaagatatctagaaaaatgtaaaaagttacttccattcaaagcttaatcaatgagactatatggtgttaatgtgtatagggtaaatcatgtatgtaaaatggtaagtctcgtctcttctattatttcaaagggtcaaaaatataatgccaaatttgtggagagtatagtgaaagttgtggctgcacacggtaaccatttttaggcagacatagtgaagatctcgaatcaaatccctttggctccgtatcttcaatgtcccaatcaaatttctttctttcatctttaccttacatttattatttcacatgtaccatatatagtccatatattattataattacgagttataagttacgtacaggtaatgtttaacgtacaaaagaacgttaataacttagtcttaacttatgcagttatgcttaatcttatactgctggaaaaaatatatatatatagaaaaagtaatcttaactaacactgtccgaccaagaattggaaaggtatcatgtgtgggtaattatgtgtcaatggttcaatattttatgggttttacaaaatattcaaaataaaatattaagtattttaaaatttaatttacatctgaaatgatttatttaataaaatatttttgaaagctttgttcatattttattaacataaaaacctagaataatactctgttttctagaaatagcacaattttattcaaaaacatgtattatgaaaatattaatttaaggttggcgaaaacactatatatatatatatatatatatagattaatttaagggattatacaacgatgaaactagccccaaaaactgtttattcgttcgcattatccataagatgcaagtagactacaagtgatggtcaaataccacaatttgtttagaagctattctaattttttaggaaaatttcatactttggacatcacttaaatattaaaactttgtatatcaagtgatgtccacaatatgattcattccgtatggtttatatggatgtctttcgaaaatcatgagatggtcttttgtgactagcaaaagtttatcaccaaaaattgttactcgtgttaaattatctttcatttggatcaaacttgaggtgtataatgtttatcacataaacgtgccatgaatccgaaatttgaaccgtacgtagtaattaagtccttaaaacgtctgcatttttcaatcgccaaagcattgtagatctggcatatgctatagaaatatgatacacagaatctaattaaataaattaaaatgtctctcttttttttcttttttttgtaaaacaataacaaaagaaaagttgagctgtaaatgagcatgaaaaaaagaaaaaaaaaaagtgttgggaactcatatcactaagttgctctgtcgctctcactttttcaaaagtcttaacgaatctcttttacttctaaaacatctccacttctctctttcacgtgacactaattatccacccatatatgatatattactttcataattaagtacctttttaaaaatttattttatctacgtatctgttatgtatacgtatcttcatctatgatatatatacgtgtgtaattcagagtctgatcatagggtcgcgaataagaaattaaaaattttcatttctagtgcactaaaatttaccaaatgatattatatggtttagtggaacaaaaccattctttttttctagttttgtaatttgcacccaaaaaaaagtcaggtgttttactcattggtcagtttaatattccattattcggcgtaatatatatgttttatttaacaaatagtcaaatagtaaccattgcatatatccaacattgatcagacatcgacggacgatattggcttgcttgttcacacgagattaaggatttggatattttttcccaaattaacggagattgaaaaatgcatgcgttttagagttgagattggaacggagagaagtgagattgagaagggattagggattgggaatttttttcccaaattaaaactttcgatttcctcaattttaatgacttttttcaccgtgtcacataagatttaaaagaaagcatactcaagaaaacatgtcattatataatggaccaagacaatacaatagcttggagagcaatcatgtatataaaagaaagacccacataaccccttttttcttaggaacactaataagtcattaactttataggaaacctaacttgaacatgtaatctaagagaaaaaatattcagtgatggcgaataatatcttgaccaaaatgatcagatatacaaaataattagaattaaatcatgtatgggacactttttgcatgggaaaggtggatatgtttggttcatgaccaaaaaaactcgcaagtgacagttgtgtgtaaggtccactaatcaacttaaactcgacattacaacatactgtccattcaaatattataacgaattataataaatatatgcacaaaattttcctaaccacttatatggctgagagactgattcgaaaaagatggtttcgaactcaaaaaggaacccacgatatgccatgataaagttatacatactcatttcaaaccaaaggaataattaaataagttgcatcaaaagattgacgaggcagagtctttagactttagagcaaaagtgtttaaagtaattgatggtgttcttcgtttttcagaaaagatttatttttcttataatagttcatttggtctaacacgtaagaggtgagaatgagaccgactttcttatcgtcgccgtttgatttgcttagaaattgtagagtcaattttagaaaaaatgcagttttaaagtacgaataaaaattaaatttacatgaacaaaaaatacttccatgattcttacgtcaaacgaaacttgaatcttagatggtgacttaccatatcataagtggagactattgatgttaaaaagattgtggaaaaaacaagaaaaaaaaaagaggattaatcttgcttgattaggaccttttgtgttaaagaaaataataattgacatttgaaatctaaaaattaaatcggacaatagatagatataagaaaaaagagagtcgtgtaaagatcatgtaaccaataatcgaaaacttaattatgaacaagaaagaatattttacatgttgtacttccaggaattatatatatacataaatttttcagagaatgatatttagaaagaaaaaaaaaaatttaaactaacgaagagtatataggaaaggaaggaaggaagtaaacgatgggcatgtgaaaaagagaagagtagtgttaggtcgatgtccactgtttttaacgtatgatgatctctttgttaggttatctccaccacttcgtcctcatttttcttgcttgactacgacctctagctcctttattttctcttttattaagctctctctcatatctccatcatacaactctatttcttaaaaaagtttgtatacatgcatttgtaattatttatttccgtaaacgagagaagtcctggttttagctcgtacgttcctttactagtagtggatcttttatatatgaatttttagacgttctttttactagttaaatgttatgtttccactttccaattttgtaaaataaataattaatctttttactagttaaaatgttatgtttccactttccagttttgtaacataaagtattaataaatgcaaaataaatccaaaattttgctttgtatgcatttttacgtttaagtttgtgatttccaaatcatatttgattaaaccatactaaacttatattttgaaaaaagagtatgatctataaacccaatcacaaaccaaaacaaaagaaaggttaattcttcttaaatttttttttttttgggcaaacttcttaagtatttttcataagttaaaaatagtgagttagatataaaaaaaaatagccaacaacaattatctgtttaacaaaaaaaaaaaaaaacgaaaaacaacaattatctgcattttggtgtatatcttaggaatgctgatcaatcttaggaacaaggctgtcgtaatttaacaaaaacaaaatgtctattacaggtaatattttaataggtttttgccaaaaaaaaaagaaaagtggtaatattgtaatatgcataaatcaatgagcttgacaagggaatattgtttacaaaagagcgttggatttggtccgattcgtagagtaatttatacattattgatgaagaccaatagaattttcatggaaatgcgtaataatgtggctgtctcctcttttgaggtaaggatttactaattgtttttcaactctttatctctccattacacaaaaaaccactatcgctatattacactacatatatatggttggattttgtcaacgatttagacaaattttacatttaaacgtcgatgtacgatcatgaaaaacgttactaggctgataaaatgtgcgttctaaacatagatgtacaatccgtttcaccaacaaaaaaaaacatagatgtacaatcatgaattatcctctttctcagtttctctgtaggtcagaataaaagtaaagataaacagccatatatatgaatatgattttaaaattaatacaatatggaactatggaccctattttaaaacattataaattgtagaagggtattttgttctccttcgtgcagacatatactgtgccattgtcacttcatatatttcattttggaatatatatcaaagatataaacattgtattgctgttttattcgaagtcatatcaccgaattagtatgtgttatgttttggatttgctatggataagtaatgatccaaagcccttaaaatcatgatgtgtatttatatattacttatcattaatatataaatccaagtcatgcagttatttattttccaacactagacataattattcccaagcatatgagtataaaacagttggattgattctgatatgaggtgtgttatcacttatcactctttaattattaaatcagatggtttataacatatatttataaatattgaagataacaatgatattattgacataatttactatgctgcaactttaattttaattcattttaaaacacaaatattggctgatcttttttattctattcatcggctcacttttttttttttttttttttttttttgtcaaacattcatcggctcactaatttacaaacaaacacattttttgaaacatactggcccccacacgcgtcctcttctggttatatcgctatcattacattttcacaaatttcaatatggatattgttcataaagaaaatagaaagaaaaaaactagaattgacccaattgaatacaaaatatagtacatccgtttcacgaaaacacactgtatataatatgcagattacatgtggcaaggagtaatattgttggctgattcactctaatgtcatttttgataaaggtgtctcgcagtaatgtcgcttagtaatgctagctattttgggataattatatgttatgaagaaagcatatactaatctcatcatcagtggccaaattttaatcttacgtctatataaacttatttataccactaagaacaccaagacgtaggtttcatgctcaagtggcaatatctgattatttaagtactttttttgtttaaaattaaaaactgatcggattttcgcagttttttagtcattgtttataagaatttcaagtccaactggttagggctgtagacttgtaggttttcctttttttttttttttcttattgtcgagaaaacctatagagtctaaagatttcagatttcagatttcacatcgacaaagagcaaattatgaagaaagaaaaaatgcttgtagaaccaaccggcatagtttttttgatttagttaaatttatacgactcagcaacgcaaatagaaaaagtttaaaaattgatattgaccattatatattatataagacacaaatccgcaaaaagaaatcaaaacatgagaacaagatgacaataatgagatatgaaaatttggtaaaacgtaccgatctctattatcgtgcaaaggtattaatgtttggattagcatcaaatagataccaacttgctcttcactcttcttatagaaaaatatggtaccatatcgacccaccaaactaatcatcatcgaatctagctaggcgttaggattgcacattactcagaaatccaaaatataataagtaatttaacgaatttatataaataataaccacgtacggagtcaaattttgttaaaccaattttttgacttcacctattacatatcattcgtagaatcatatcttcgtaagtacaaaaaataaatagggagtttttgatttgagactgaaaataaattaaattttgttaactaaaaattataaaattaatctgtcgatgaagccaaagagagaatctaccgactgcaaaatactgcataagaagaatctaaaaaataaaaataatctttttttttttttgtttgaatggttttttatttaaaaaaaaaaaaacaatccattttgagtttgtgttattaccgtgcaagtcaccacgtgaactcacttcttcatctcaggagagaaaagggcccactatgattctccgtatccaaatgtggaccctgctctttcactacacacgtgtgacctcatcctctcccacgtgaatatccacgtggcgttcttccgttccgtttctcccatccctcccatgcctctccccatgactctatttatcccaatcctctcttcctttcattaatttatcagttaaaattcctcttttttcctagtagtatttggagttttcatatcaaaaagtttagactaaccctaaaaacattgatagaaaaacttatcattttaaacgttcttggggaccaatcaaaatggttaattgtctagtgcctgttcttgattcttcagacatggttgcaaaagtccatagtcaaatcaaggttatatgtagcttcaacactgataacacgtttattaacaaaaccatatcaaaatggttgttttttgcattttcagtcttgacgtatacactgccatttttgaattagtcaaatcgttacgtagttggtctacgatgtctcgctgaaacaaatacatacgtgtgtatatacactatgcaagtagtatagttaacatcataattgaccctaaggaaaaaagttaatgtaaacagtgacacgtagatatcacacggttcttttttggtttttgttaaagatgaacttgttaataaagaatatgacgtgatcttctccggtacaactctttgtcctataaatagagaactcttgtcttcatattctcgacacacacatataaacgcacaaactcgttaaatttgtacgaatataattttttttaaaacactcgttataatatattaaagtttcacccaaaccgaaaaaagagagaatctgtgcatgttgctcagaaaatcttcaaagcgtaatctgggcttacgttagctctcacgaacccccaaggatcttctatatatgttttttcatttccccataaaatctttcattatctaaaaaatattattatcgtatcttttttcttctatatattcttcctcctcaatcttgattcttgtttcttgagtattctttgatgaatcgtgaaatgacgtcaagctttcttctcctgacgttcgccatatgtaaactgatcatagccgtgggtctaaacgtgggccccagtgagctcctccgcatcggagccatagatgtcgacggccacttcaccgtccacccttccgacttagcctccgtctcctcagacttcggtatgctgaagtcacctgaagagccattggccgtgcttcatccatcatcggccgaagacgtggcacgactcgtcagaacagcttacggttcagccacggcgtttccggtctcagcccgaggccacggccattccataaacggacaagccgcggcggggaggaacggtgtggtggttgaaatgaaccacggcgtaaccgggacgcccaagccactcgtccgaccggatgaaatgtatgtggatgtatggggtggagagttatgggtcgatgtgttgaagaaaacgttggagcatggcttagcaccaaaatcatggacggattacttgtatctaaccgttggaggtacactctccaatgcaggaatcagtggtcaagcttttcaccatggtcctcaaattagtaacgtccttgagctcgacgttgtaactggttagtattaaaacattcaagttcatatattttaaatgcttttgtctgaagttttactaataacaagaaattgataccaaaaagtagggaaaggagaggtgatgagatgctcagaagaagagaacacaaggctattccatggagttcttggtggattaggtcaatttgggatcatcactcgagcacgaatctctctcgaaccagctccccaaagggtaatatttttttaatgactagctatcaaaaatccctggcgggtccatacgttgtaatctttttagtttttactgttgatggtattttttatatattttggataataaaaccctaaaatggtatattgtgatgacaggtgagatggatacgggtattgtattcgagcttcaaagtgtttacggaggaccaagagtacttaatctcaatgcatggtcaattaaagtttgattacgtggaaggttttgtgattgtggacgaaggactcgtcaacaattggagatcttctttcttctctccacgtaaccccgtcaagatctcctctgttagttccaacggctctgttttgtattgccttgagatcaccaagaactaccacgactccgactccgaaatcgttgatcaggtcactttcattattcacttagaaaaaagcgatattttcattttttatattgatgaatatctggaaggatttaacgctatgcgactattgggaaatcattatgaaaaaatatttagtttatatgattgaaagtggtctccatagtatttttgttgtgtcgactttattataacttaaatttggaagaggacatgaagaagaagccagagaggatctacagagatctagcttttccacctgaacttaataatgcacatttatataattatttttcttcttctaaagtttagtttatcactagcgaattaatcatggttactaattaagtagtggacagggtcatggaccactcactcaccaaataatgattcctctttactcttaagtttaattttaataaaaccaactctactggaatcttaacttatccttggttttggtaggcttttatagcaacacggtttttttaattttcctattccagattttgtatattaaatgtcgattttttttctttttgtttcaggaagttgagattctgatgaagaaattgaatttcataccgacatcggtctttacaacggatttacaatatgtggactttctcgaccgggtacacaaggccgaattgaagctccggtccaagaatttatgggaggttccacacccatggctcaacctcttcgtgccaaaatcaagaatctctgacttcgataaaggcgttttcaagggcattttgggaaataaaacaagtggccctattcttatctaccccatgaacaaagacaagtaagtcttgacattaccattgattactacttctaaatttcttctctagaaaaaagaataaaacgagttttgcattgcatgcatgcaaagttacacttgtggggattaattagtggtccaagaaaaaaagtttgtcaaaattgaaaaaaactagacacgtggtacatgggattgtccgaaaaacgttgtccacatgtgcatcgaaccagctaagattgacaacaacacttcgtcggctcgtatttctctttttgttttgtgaccaaatccgatggtccagattgggtttatttgtttttaagttcctagaactcatggtgggtgggtcccaatcagattctcctagaccaaaccgatctcaacgaaccctccgcacatcattgattattacattaatatagatattgtcgttgctgacgtgtcgtaatttgatgttattgtcagatgggacgagaggagctcagccgtgacgccggatgaggaagttttctatctggtggctctattgagatcagctttaacggacggtgaagagacacagaagctagagtatctgaaagatcagaaccgtcggatcttggagttctgtgaacaagccaagatcaatgtgaagcagtatcttcctcaccacgcaacacaggaagagtgggtggctcattttggggacaagtgggatcggttcagaagcttaaaggctgagtttgatccgcgacacatactcgctactggtcagagaatctttcaaaacccatctttgtctttgtttcctccgtcgtcgtcttcttcgtcagcggcttcatggtgacacaggacaaaaccaagaggaaagtagtagttgagaaatattcttcctgatgtatatatatgacctaatagagaagcatcagagagattaggttgggtcttttgttagtaggggttttaaaattagagtagaagattcaaaattagtcaaatttattgtgttgtttttatacatcacggattttggaaatgggtttgggacagcttaaacccaattaaattaaaaatagacaacaaacctcaaagactgttttggactattttacattttttttggttgatcgaggtttatactttatcgtcgtggaaccaccatcgggtctcctttggagatcttccgttcttacaattcttcacatatcggtcattatcggttggtcgttgctgcaacaaaacaagccaagcgagacgaaggttcagcttcagcaacaaagagatcaaagtttatatattaatggtgagtgtaagagctgtaagtaccttttcagtcgagcttgagagcatggagaggatgctaatgcagatagaactcaccgtcatggctggagaccacgaatcatacaaaatatctgcaacgatgatacacaacatcagatacttcttccaggaggcctatgttaaataataagctactgaaatttgagtgtacccttggatctaaaagcaaaatctcaagcaatatgagtttcgaagagggtcttatcttcgggtaagacttcaaatgagtttaggtatacaaacgacttatgttacctctcacattgtgattattaatatattagagatcatacaatataggagttgtgtgtttatcattcggaccacatagtatgaccagcaagtaaagaaagtgatagataataaccaacaaaagagtaagaaggtatcagaaaacagaggacacagtgacatacctagacaaatatgcccattgctgtaaatgtgaggatgcagaggagctggatgaagaaaaatcacctgtacaatatttaaaaaaaaaaaaacattacaaacgcaaacaagaagtaaagaacagagaactcaagtcaactcgagacagatcaaaacattccatgacaaggcagagaccaaactcggtaaagatcaagacaatcaacaataaaacagagaccaaacttgataaagatcagagattctatgattgatctaaattaagtactcaggttacaatttcagaattcagaacactcacttgtggcgattccataggataatgttctggaaaatcaacttgaagctgataagtatcgttggcatatagagttcctggagctccaataacttcaattatccatctgcaaaccattgaatttgacatcacaaaatttctaaatcttatatgattctcaacaagaataaagtaaacctaattcataatttacctttggagattatcagtgactttgtgtttgaaaccagtaggtggattcatctgccattccacaagctctttctgaagacgattagtcgcgatcttactcagagtctacatacacacacagtttcccaaaatatagtcaaaaaccctaattccaaaaccaaagttaaataaacagagcaagtgagagagagaaccttgcgtgaaggagcaccagaacttgacatggagagagtaaaggagacaatcaaaatcctcttggagaagaagaaggaaggaaggaaggctcgaggaagaatcgaaaatcgaagggttcagatttgtgggacctttcagattgatgagatcttaatgatcagatgatattcagattggaaggtggtatctagggacggtaaagatcatgccacgtgtactgttttgtgctttttagatccacgaccgtttcgtactttcgtgtatttgtgtcagggaagcagccaggattgctggattttgctgcgtgaaacggtccaggggtataattgtaactttcaatattttgtgtgttaccattttcattttcggcttaactaattatgaatcaaccaaccactaacccaaattatttatataaaaatcttatcacaaaatgatttatatattcggtaacaacagaacattaaaaaaataaggtttttcgatagttcatccgacagaaagatagtcgaaaaataccaaactcaagcatggaaagaaaaagaactaaattaacttgttcttgtgttgtgcctaattcgaggaagttatggacttaagtctagaaattttggttacagaattctataaattatggtaatgaaaactatatctttctgcttttttttctcattttatgaaaactatttgttgactacataataaacgatcaaaaattatatgtagtactagttgaataaaataaatagaagctacggataggtcaaaagtcgaagactcgaaggcccattggatgtgttatagcaagttgatatgtaagactaaaaaagccaaagcaatgtcctcaagatctttgcagtgtcttttcaacatctacgagttgtcctaattagcagctactatcaacgaatatatacacataatactctttaaagttttcatgctcctttgcctttattattctgagttcagtagcagacaaaaatctctgaaattccaataaataatagcaatcatgaaaatcatatatataaaagttggccaactctctccctaggagtgacacatcatcacataagaaaataacatgtgtcattctatattaattaaaaaaaattaatagaattaattgaggaaaaatcaaaagtcttttgttgcattaaattctctataatctctcttttaaataaattttcttaaaacattcaataaataaaaaattataataatatatcaaatactactttcattttattctacttatttttaaaaatatttttatcaatagttatcaatttataatagctaaaatctactttgtgttgtagtttaaatgtttgctacctaacctcatattaaatagtaattttagttggatatttttttattattacgttatatgaatatgatttatcatatgaccttctttctgtttctttttgtgcattctgataacttggtaacactgatatacatttttcacgtaatgttcatccgagacattagacatatccacacaaaaaatacgagactctatatggctatattcaagggacgagaattaaagtgttgacttgaattactagcatatcatggtgtggttagtgtactagataacgagagaatatatggaataaagaattgtttgttacaattaaattaggcaagttttaaaatacataagtaatataactatatattaatatatcatataattttgttgtatgtatttatgatagtgaaatatttgaagaataggtctataaatatttatattatagtaaaattgatatttcgaattatagataaatttaattataaaaaattataattctataaaatagatatgactttattacttacacattaacacacacacaaaaatgaacatcaaaatcaacaaaagatcataatcatatattccgacaattttaaaaacaaaaacccatgcgtaggatgagttttcatctagaataacaaattaactaataataacaaaaatgtaggtaattttataaatattgtatatataaagatcataagtttatatattatctatatgtggtgtaatcatatatatgaaaattggcaaactctcttatatgaatgacacatcatcacttagcttttaatttgccacatgtccacttaataattaatgtaagttaatggtttatagtaatttattatttaattgtatatattataaaatgttaaataattaattatataaataataattttcttttattttgtatgtctttttcttaaattaaattatttaattgattttctcatactcttagatatttttccctaatttttgtaattttaagttaaaatatgattaaataattgtatagtggattagctaatagttttcataggttgttttttttttatataatataataaaaatggtgagaagtacttgagaactctagcatcaaattcttggactcaaatcctctagcattttgtcttatttttttggtttaaggttaacacaaatgaaaaaaaaatatgaaataatgtatactgagaaaatattttgttagaaatctaaatgcaaaatgcaaaaacaaattgttgatttatggagtttagtatcaaataggaattttgtcttcttgcctattaaaaaactaacctaaattttacatttaaatacttttaaattacgaaatataaagtgaaagcccgcacgtagtgcggatactcgtctagttccaataaatattaaaccaagtttttccccttttcaccaaattttgttgcattgacattcaatgaggcaaaattctcatgaaatctttgaacaaacatgtatttatatgttttatatgaaatattaaaacaatttaaactccaattcgttttgtcaacttttaattaataactccattctttaatttaaagagctgttaaatttattttactctgtagaaaaagattgtgaatatgtgatatcagagtcgttattaagactaccccaagccctaatgagtctctcattggctccataaaaaacttttaattcaaaagtagtttatcccttttgagtattttgtttatcagctggactttagagatataactaatctttattttggaaccaaagaattcctaatcttaccccttttctaataacaaaaagaaaagcttacagcgataataaaatttgcatgttatatataatttctttaaaatatagatattactgtatttttgaaaagaagtatatagaagttaatacttgttgtttgcatgtgtgtgtctttttctctttttgggctttgaacttcccaacaaagttagaagctcaaaaagggattttagatgctgaagcaagataagaagaagcatttatgcaaaagcctgttgtttttggtgcgcagaggagggaccatatagatttgaaatcccttctcttcttctttttcttgacaaggatatacaaagtcatatttcttggacaggtcttaattgattgcttttatttgtttaccaatatttataatactaagtgctattagtaggatgaggtataggtaactattcatagtgcttttgctgtaggatgcagcattggctcttactctctaggtgcttcgtgatttcaaaaatctttttcagtgcacaaataattgaatataaacttagctttgaccatggattacctcaagtagtgtttttcaacgtcaaagattatttatgtgttaccacaaatatgtacgataatagacggtctaatcgaataatgatctacctcagtaaacaacacaagttttcaacgaacaattctttttcaaatttcatttttaagcaataaagtccatcgaatatatagtatttactcaattaacaaaaagaaagagatataatgttatttcgtttaatttttttttttgaggcactctggttatactggtacctagcatcagcctagtattatgggtttcaaaagctacaagtcaacttcaaatttttagaaaatgaatctgaataatatatattgattgcttcttggttacttattttatgtatgtggagcaaaaaagagtaacaaaacaagaacccaaaaagtttttttttttatttgcattatttttcctcttcaacaagtagaagaagatggaggattttagggtaagacatgagtgttcatctctccgtggtactttgttggattcaagatatgctaaggcagtgcaatgccttgtagaagaagttatcgatataggtggtagagaggttgagctttgcaacaacattctaatcaatcagctgtttccaggaaggagaagacccggttttgctttgtcttccgaaatcaaatccgaactttgcagttctggtttcatgtctttgcctgagaatcatgagattcatatcaaaatcacaaagcttctcagtttgttgcaacaggtcagtcactctaatcttccaaacaattatgagaaatagtctaaattttatatcaaatttaaaagtagtctagcttttttattaattaacaaaatagtcaaattttaaaccttaaagcttaacaactatctaaagtataaaaactaaaaattaagtccaaattttaaaaccctaactcattaaacccaaatgttttgatcataaaatctaaacaatatggttaatttatttgatactttgattttttgaagggttttcctcctaattatgcaatatgttttcctttggttttcgtttcaacataattttggttaaatccggttcatggacaggtagaagaaagatttgagcagtactgcaatcaactggagcaagtgatttcatcatttgaggaaatagcaggagaaggatcatctaaagtgtacaccggtttagctctccaagccatgactcgacatttcggtagtcttgaagaagcaataatctctcagctaaactctgttcgtcggagattcatcatttctcatcaagatgttcccaagatcatcagctctggcttatcacagctcagcttgttcgatgggaacaccacttcatcatcacttcagcgacttggtttggttcaaggaccacagagacatgcttggaaacccatcagaggcttgcctgagacttccgttgcaattctccgagcttggctctttcaacatttcttgcacccgtcagttttcttgttgctcaagtgtaataacactagtgatgaatcaaagttaaaatgttggagaaataacattagtttgattgctgtaatgaaaacagttatccgaatgaagcagagaagctggtgttggcgtctcaaacaggactttcgaagaaccaagtacactcctctgaatctaattctgctttttttctgaaatttttgttatcaagaagattctgactaagatcatttttgttgttgatgattaaaggtatcaaattggtttataaatgctcgagttcgactctggaaaccgatgatagaagagatgtatagagaggaatttggagattccttagatgaatcaatgcaaagagaagccaatgatgattcaaactaactgaaaaaaaagaagataaaaacagaacagaggttcttcttcttcttcttctacttcttttgatgattcttagtctttttatcccttcttttgtatgttcctatctttactcttttccgaaatctgcattgtacttgcactggactcaagtttccttgcttcgcctagttttgttacagcctgaaaacgtgttttagtattgatcataagatgaagattgcaacaaataatccaaacataaaaaaaacatcacaataagcagaaacgtacttaccttgatgaaatcgttaggtcaaacacaatgaacctgtttcttgcggaacaattgaaatcaaaatcaaaacaacaaatcaatccaaaacttgggaagtttaacaccaactcgttgctcgttgaaaaatttcaggatttgtgagaggaagttcaatgtaatgtcttaggtctctgatttgtttagataaatcaccaagatctgagtagctaacatctctaccatgccgatgcaccaatattataaagagtaactcgggttccagaaactagctttgattgatccactttcgaccccaaacgttttggttttatcagtttaattcctggagattcacacattatatgacacaagaatacggcactttactttcagattttagcagtaaaactcatctcaactcgtatttcgaaatttaaaacatcatacacaaaaaaaaaaaaaacacctttcctttgggtagtatttgtaattttctatgaacagaataagtaagagagatcaagaaacattttacaacattctagtgatctcatcgtaaagcacgagcctttgcgtgttgcaagacttctttgagtaccgaagctattcgatgtgacatatgatgttccaaaaacatctcttttactctctcatacccattttttcccattctcagccgtaactcaacttgcgtcgccaacttcactatgttcttggcgagaggtatcactccttctttccctgcactatgtaacagaccagtcgttccattcactacaatctccattgttcctccggctgcagtaccaagtacaggtagcttaaaggccatggcttcgattgttattctcccaaagcattctcctctggcttgggagttttggacaagaacgtctatggctgctatatatggtgctacggttagagttttgttgacgaagtggacaaagttctcaagtttcttttctcggacaaagttgcgtagctctgtctcgaactttgtctgcttgctcatgtcgcttcctactactactgcatgcattgttggtacctgaagtttcttctctttgattctttcaagactttcgtggaaggctcggaggaacagatcctggccttttccacgcgatacacctggaaatagtaacaaacttaaagtaaattcattggtgacgcgtgaactcttactccttaaaagatgatgatgctcgtcagaaaacagagaaaaagaaagacttaaaaaaatgatggcatactattaataatgccaaagagtaagtcttcattccgcactccaagagattctcggacgtgctcacggagaactctcttggcaacactatcttcagctacttccatcaattccttgctatttcctaggtgcacaacgtaagttttgggcattttaatcctgtatatcaatagtcataaaacaatgttaatctttaagaagaaaaaacaggtgaatccagctgaaatgaggcaagactatacacaaatatcttagttttctgtatatcattcacatgaagcaggaggtgcaaagaggaaacataccctaggcgagcttgtgttctgtttttccagtatccagctgttgcatgcgaatcaatcatggcccctgcaacaaaggggaggtgtttgaccaaatcagcattgaaatagtgtcctctcatctcatgaatccaccataggatcttaggtagaactttaacaacattttcttttagaacagcatcaagccatttcccagccacagcagtattaagaacaatcaaatcagccttgagagatgtatctacagctttctgaccctttgcagagataacctgaagtcagataccaaaaataagaacttgtcaattaacagagctcaagacaacatctttccaacaaactctgaagtctattggtaggaactacgagagaacctgaactcctcgatccaacatcttgtgttcaagactatagacaacttcatcatcttcaagtggcttttgattagtgatccaaacaacgtcagcaccaactcctcttaacaaaaacgccaattccatcaatagcaaaggtccaccttttgtcacacaaaatcaatcatcacctcaaaaaagtatgattttttcgagaacccagatcaaattagaaatcaaatcagcagaacctgagagtgatagctcgtgggatactaacaaaacgagcttcgatttcatgaaatctagaggattcgattgaaacttcgcggcgctgctttctccattcttttcttccacgaattggctactaatgctacaggtttcaaagctagatctcacgagaatcatacacactgttgatacagatagaaacaacaaaaccatcagtgcccatctcttcctttgcatcgtcgacgctttgaccattgttttcctttgctaaagacacatcctaaggttttcaatagtctagatcttcgcaaatgactcgtcgaaactaagctaaagatctcaaaaatcaaacctttgaaaatcaaattcgagacgagaatgggcaagaaattggatctctgagtagaactgtaaagtgagttatactgagaagaaccttgaaagaaaattttgatctttaaaggtttcacagtgcacgccgttattggaagaacgtcttgccgtttttaatccctctgggccacttaaacccgcatattattatgggctctaaaaaggcaattatgttcattaacatagaaactccagtctccacttttagtttgtatcacgattaatgaggtttaagatactaatgactttcacatctcatgcactgaaaatttactgtgtgctacgttattttatgttttgaaaatgtattttcactggtggaatcaatctttatggcaagaacaacaatatttcccttgttagtttaaatacaaaatatttatgatcataaattgtggatcgtgcatatataatttctcaaacgctatacagatagagacttgagtgtaacgcaaaactcatattaatctgtgaactgtagtattactatttacctgggaacatctaattaaccgtaccataaactcttactttgttgccatttacatgtagtttaaccagattgctcttgaaaataggaaaaactcatgtggttaaacggtccgactatttatgattaacaactgcgattaattatatcttaaggatattaattattattagctgtcataccatatagctaggtgtacaaaaagctttttgtccaaacaaaagctgttgatttcttactcgtcatttcctcatttagcactatcatcatcactcatcatcgattcatcatcttcttcaaattatatactcacgatatgtataatattattattcataagaatactcatcataaatagctttagaaaaccacattcatttaacctattttagaaagttaaaaatatttgatcctttcaaactttcccactgtatatactcccatattcaaccagctgtgtgtagggtttatcagttgtacatttaaaaacaaacaaataatctactcataaatatataaaatttcataaaaaaagaatttgttgtaacacattgattctccttgaaaggtttgtgtcggctgttccaatctatgacaaaaccgaaactcaaccaaaaacaaaaaaaaacattaaagaataaaagaaataaacgaaatatacagaaattgaaataagaataacatttattaagatggacacaaagccgttagcttcgttccgttaaggaacgtctctacgaaacaaattggcgtccaagtctttcgtttttggccactttcaccaacttcgcgtccgacacagctaccttatttatttcatttttcatcatcttctttcgaattctactttttctattatttattacacaacctccttagatcctttgggacatggaatcgacccatcataacttttcttttcattttattgttttgcgtataaatacattttcttcatgtaggtcaaatgaatcacttgattatttaagaaaatatgtttatttgttagtcaactaattggattttttcgttccaagtaaggaaattgggtagtcaccaactggttgttaaggtcctttaatccctcaattaagcaattgagcagacacaacacttcttcctcaaagcaacatttctggcaaatcaaaattctctaggcctagggatactttagtaattttaattactttatattcaatatattgatttgttgacaattctacttatatctttatttttaatatgtaaataataggaagatattgaaaaaatggagttaattagtttcctcttttgcacgtcacttaataagagtatgtgtgtccaatgtattacgcgaagaaacaagtatataacgtataaacagtaggagacctcaaaagatgtttaattttaattttgatcacaatctttttagagagttccgtcgttataataatttaacaattatacatcaaaacatcatagattagttatgaagtatcatgtcacgtaacacatgtttctcgttcgcttataaccagggatctgcaattatgtaaagaaattaataaaagcatctgttggttcagactaacccatgattttatcatcacaaccacaactaatttgagattgcttgagttaatttaatctaacaaagctttggtggaaaattttaatagtaaaaaatttcaacggttgcttgaatttatgtccaagctattaattaaactttataaaaacatagaatacgaaaactcaactcttttcttcattttaaaaaacatactttatttttaattatatttatttgaatataagcaccaagtcaagtcaatgacaacactgcacagtattccttctggttccaataatattcttttgttttatcagataacttgaaatataaatgcatataaaaagtcgcatttgtataaatattctccattatctaacaataatcctatcagagaaaaggaaaaaaaatatgaaaatttccgctcacgcgtgttattctctaaatggttggcacagaaaaaaaaccaacaaaaaattattaattttaatatagaagcttcggttggaatagaaaaacaaacaaaaaagaattactggtagagaatagagattgtcaaatttctccataggttagtgatacactgatattttattaaacattaattaaaaaatctgggtttgttgtcgaggttccaatgataagatggtttggttctgttctttgttagtgaatgccaaataaagttttaaaatagtatcggaatttaataaaaatcgtctcttgggattgggtgtcttctctttctttctctctctttttgtcatcgactgttcgaagttcttcttcttctccctttttatctctctgttccctgattcagccacatccacaatctctctttctcttttgtatagtttatcatctagctctttctcaggtttcatttctttaactataataattcgattgttcttattagtagcttcttgattcaaagctatatgattgacttgttgtactctgtttctctttttacaaaaagatttcctttttcgaattttatcatcatcttcgtctctgttaaattcttacaaaagtatgaaatcatcagaacttaaaaaaaattaactttatatctttcatgatttcaaacatcatcctctgtttttgtttgcgtcactgaattgaagtggaaactttacctagggttttgatatcttcttgacctaaattgagtatttcatatttttttcatttcttgaattcatctgtaattgcggcgtatatagagattaagatgttttaacctctttaaagaattgttcttttatttatccagtttcagtttcaaactcacacgtctctctctctctctttctcttttttcagacaaaacatcaatcggatgaaactcacttaaacaacaaaacactttcgatttattatccaatggctgtgtattaccctaatagtgtcggcatgcaatctctttaccaagaatccatttacctcaacgaacaacaacaacaacaacaacaagcttcttcttcctctgctgcatctttctccgagattgtttccggtgatgttcgaaacaacgagatggtatttatcccaccaacaagcgacgtagccgtcaacggaaacgtaacggtgtcaagtaacgatctaagctttcacggtggaggactttctttaagtcttggtaatcagatccagtcagctgtctctgtttctccgtttcagtatcattaccagaatctttcgaaccaattgagttacaataatcttaatccttctactatgtctgatgagaatgggaagagcttgagtgttcatcagcatcactctgatcaaattttaccttcctctgtttacaacaacaatggtaataatggtgttggattctacaacaattaccgttacgagacatcagggtttgtgagtagtgtactgagatctcgttaccttaaaccaacacaacaattgcttgatgaagttgttagtgtaaggaaagatttgaaattggggaataagaagatgaagaatgataaaggtcaagactttcacaatgggtctagtgataacattacagaagatgataaatctcaatcgcaggagttgtctccttcagaacgtcaggagctacagagcaagaagagcaagcttttaacaatggtggatgaggtaagactaaatcaaatttgaatactttaaagtgagagagagactttggagttttgagttttgaaaacatttttgcaggtagataaaaggtataaccaataccatcatcaaatggaagctttagcatcgtctttcgagatggtaacaggtcttggagcagctaagccttacacatccgtagctctgaatagaatctctcgccatttccgctgtttacgcgacgcgataaaagaacagattcaggtgatcagagggaagcttggggagagagagacttctgatgaacaaggagagaggataccgcgtcttaggtacttagatcaacggttgagacaacagagagctttgcatcaacaacttggaatggttagaccagcttggagaccacaaagaggcttacctgaaaactctgtctctatacttcgagcttggctctttgagcatttccttcatccgtaagtttgttgtttgtaagacactttctttctgctcctcattgcttcattgataaccatttcaatcgtttttgtagatatcctaaagaatcagagaaaatcatgctttcaaagcagacaggactatcgaaaaaccaggttcttattggctcaatctttggtcttgcttttatatgagtggtattctgattcttggcaatttaggttgcaaattggtttattaacgcgagagttcgactatggaaaccaatgattgaagagatgtataaagaagagtttggagaatcagcagagttactctctaactctaatcaagacaccaaaaaaatgcaggaaacatctcagctcaaacacgaagactcttcgtcttcgcaacaacagaatcagggaaacaacaacaacaacatcccatatacatctgatgcagaacaaaacctagtctttgcagatcctaaaccagaccgtgctactactggagattacgacagcttgatgaactatcatgggtttggtattgatgattacaatcgttacgttggccttggaaaccaacaagatggcagatattctaatccccatcaattacacgactttgttgtctaaaagattcctgagcttttcacaagcttaagaactggcaatgccagttgattgggggagtatgattcttgaagcgcaagaaaatgcgctcttggcatttttatagataggggttatacaaatatgtatatctgtaatatttgttgtggcatatataaaggatagattttgtgaaaactttaggtgttagactttacatttgtatatgaaaattgagctttgtgtacactttggtaagccgatattgtaatgtttttgtttataatcttcatgatggtataaacaatacttttaagtgtgaacaaactgaaaaagatttgatctaatttcctcattttgttacaagaattggaacagattttgagttcctctgaaacttgtgtaaacaacgaaacgttacacaactttttaaacattctctgtaaatggttggcaaattctcaaatcttttctaaaatgacaagtttgtttcattactgaaaattatccccacaggttacaatgaaacacacaaaatatccaaaaagaaagttaaaacacagctctaaaggctatagctgaacctgaatatctgttttatacaaagctttcctaaataacccgcatgcctctgatccagatggaggggtttcatcatagcggagatgtctgattaagtccctgaaatgtgtgtattattggttatttacaggaatgtttcatttctctagcaaatcaggattgaatattcagtgtatggatctttacctctatgcttgaagaagaccggttatttcgatgtctagaccagaatcccttcttcaatgcagagtctttggacgagggtttattccacttggagctgatagaagcaaagtgccatttcaagaatgacttattagacgagctcttgctactgcaactagcttccagcttgagagctttgccttctcgtttccccattttctggaatacaaactcatcgcattcactctcaccgtaactatctaccacacggtttttacatcttttgtactgctttgcctttgcttccgcctccgcttttagggctttccttgttattttcgcaacccgtttctccccaattgtgcatatgggacaagcaggatcatacttctctatatcagtagtcatggtctctaagcactctgcgtggtaaacatgaccacaggcaagaacagcagcgattgggagctcaaaagtggctatagaagacctctcggttagcaactttgaacaagctccacaaacctgctgatcaacaacggaaggggagaatgagaatctgctgctaccaccacttagtttccgtctgccagaacccaagtgttcgctatcaaaggaccatctatccctttgagaatatgccacgagctcagaaaaagtgttcatagaccagccaccttcagaagatgcgtactgggatccagtggcgaagtcattgctacaggtcgaaagcacaaaggacgaccttccttctgagattgagtaattattaattggggatttcagtcctaaaatttgactatcagaaacctgcctaaacaactgatgcccaggtgaacgccgagcccgtcttgatggtgtggatttaggaggaagcaaacgcgtgtgagccgatgaaagatcactaactggattgggaagagaaggcgtggagaacaaaggcttcgattgagctgaagggacaattccaggtgagtcaactaagttcttcacctgaaacaatgaagatccaacaagggttaaagatacaccgaaggaaagaaaagaaagcttccacgagaggaacactagagtcaagtcgatcatctcacctcaatgagatcactgcttgccaaggatgaacctgccgcacagaaaagcataacataagacacagcaggaatacgatacgcaagactaattcattacaataacatggttcttggtgacaaaaaggaatatagtcattaacgttcaacttaaaaatccctatgtcaactatatctactcaacaccgtgaagagatcatgaaaactagcaagctttacttatacacgttggtggaacgaaaagattcaaggaaaaaattaaaacgactcaaagcaaagagttagattacagtcagaattagctcccaatagtgtcattgtctcaaaaaaagaattacctgaagaaggtggaaccatggaattggtgctcatttccggagttgctgatttctgagaagcaggagtccctaaatgtccatcaggaggggttcctccttcagataaagttcctctctcagagcctaatgacatcttatccatactaatacctctactcgcaacataaggactgtaataaggtgaaccctcaatctcatcagccactcgcctcctattatcacgtcgaaaactccattgtggcgaacatgctgaattccgatgaacagatgaactcgcaggtccaccactaggaggaacctttctgtctttcacagctacacaacaaactgaacccataaccttacacaagaactattctcttctctatcagacgatctccaatactctgctttaacttaacacaacttccaaacaaatttgcacgtccttcctcacacagtaaccctgcagtaagcacacaagactcacttcaaaatcgataaagcttaagaaaccaaaaagatctgaagttcttattaaaaaaaaaaagccaaaacgatctgagattaatcattcaatgaaaagctcctacgagagaggagataaaccgaactcggaaactcaggacctgaataactgagtcaagaccaaggaacacgaatttcatcagagaaatgatctaacaaatacacaagcaacaagaaatcaacctacgatttctaattcaattcgcaatcatcaccacaggagaaaccgatatagtagattagattcaaaaacatgggccaggttctcaccagaacaacgaaaggtttcggggaaaatcaaaacacgaaacgcgtatacgaaagggcatacgtagacggagaaagatcctctccggcgatgaaatcaaacggcggagattaaccgttgatcggcataaccgaaaatcgatctgagaaagagacgacgatgatgatgggaagagagagagagagaggaagcagttttttttagtttctgggtgcgtctgcgttttgcgtctggggaagaagaaacacgcacggggaattgtgccacgttccctcctctctttttcttttcttcttcttttttttttcattttatttttataactttctttttctttttttatttttatattacttttgctttttcgtaaagtttggtctacatttcactatttcataatcaactatatatgaatgacgaaaactaaacattacttgagtttaaatgttggacaaaacaacatcagggagagagtttcaatttgaattaccatttataagattaatttaattaccatttccaagttttggtgattaattattttaagaatttgggtttagtagtgattaagagaggttggtggggtttgaaggaccacgaggagtgcgctctacgtgttactgtttctccattagccgcaaaagccaaaaactttgatgccctccaaatacatttatttttaattattacttatataaaggcttctttttttgtcaacactcatatagaaaaaaaaaaaaaaaaagagtttaacgagagtctcataattataaggatattcgttcacccactctcatcagttaggttataaattagtgttaaggattaaataacattaatcaatgttatgtacttacaagtataaatgccaaaacttgtcagctacttaggttagaccaatttattttcaaactcacgcgcgctcatgcttgtaactttgtttttattcgaattgtttaaaaatgttttttttgtaagaatgattttaattattagtattagttttcaattagcttaatttatgaatcaatatctttggtaaaataaatacgtttctttttgtgtgtagtatgagatggtcatggaagtcccaatcagccaatcttgatgatgtttttgtttcatcaagagaatttgattttgtcataattagtatttaaagaatgggctttattttagggcccattacaaacagagcttggaccagaccaattaatcgctcaacaacctttgcagagcataatatatggcagcgactgttccttcgattgttttttttggcaatttggcccatccaaacatttattatggcaagtaaaagtgtttagatgccaaaaagaaaaggaaaaataaaataaaacaaaatgaagcaactatctaaagaactgattctggtaaagctttcgtacgtggattattcggatcgattgtaaaatagtggacacatattactgcccagaagaagagttttattcttacgctaagtcagagtcgtgagtacaactttttattcctttcacagagtatatttgcaacaagccaaataaggacaagatcactaatcaacacactatatatcgattcattgaacatataagttaatcatttcatccatgaccactattttcttgatagatttgcaaaagttgatataaagcactgttctgatgcctgaaaagatccttgaaaattaaaagtgattttctttgtcaaaattttattatcgactgttatgattgtacataaagactatctaagaagtaagatccatgcaatttgaaaaaatagtaaagttagttgaatctttatataagatattaaatgagatattttgattatattatgaaagttttagttcgatatgtctgacagaagtatctcattactaaaccaactttgtgattccttcaacagagctttaaggaggttgattacatgtacatatagctcaatctctgttgggtaatgggaagaaaagaaaatgaaaccaaaacctcaaaacgaatatgtgttctccattctccaatgatctccattcaatagttctatatagtgatacgaaaccctgattcattagtcaaatgctttagaatcgttagaagaagatgcctcacaagattcggagtgttcatggtgatggtgatggttgttgttatcttcttcttcactgtcatcctcatcaaagggcttttgtttatgaaagatacaacatttctttgaactcttcttctgcataaactcgttgtccaccgtcccgtctttccatgaaactttcttcttcttcctgttcaaccgaagcactaatctttctgttggctgtgaatgagaaacaggattttctcagatggtagtcgatgaagacgaaggcctagtcgcagtgctcatggctcaaaaaaaggttttgatatctacattgggagacaaaatgatcaattcttggctgctcaagacaaaattatcattacctattcaccttaaggaacaagaacagaacaaaaaactagttcttaaaaatcattttttctttcgttgtataattgtattaacgattatagacctgtttgtgattcaattattcaatagatggtgttaacggaaatatattcgtaagtaaatgaattttactccaaaataatgaagaagcgaatggtgcaactatctaaagaatcgattcttctcaagctttcgtacgtgtattattcggatcgagtataaaagaaaatcatgataacaaattgtggtggggacaagaaatatatgccacataatattaccctgaagtgtagttttattcgtacgctaagtctagagacatgaacatctacttgccccatttgtttattcctttcacagagtaatatattttatttccaacaagcaaataaggacaagatcagtaatcaacacggtatacggattcattgaacatatacatgagttattcgaaactattttttattttgtttctggtttaatcatttcgtcagtgaccacttacacccatttgcttggtagatttgaaaaagttgatataaagtacttgttttgctgcctgctgacgatcattgagggtgatttgtttgtcaaattagctcgtcgaatgtcatcattgtaattaaaccccgttattattgccattgtaaacttcgttgaaactcattcatgcatgatatattcatatatatagcctagggttacgttgaaagattcatttaaggttaggatcggagatcattgtttgagtttttccaaaaaagaattggaattgtatatgttaaaaaaaatttaaatgacgagaatactcgtgttttactttcacagttccaaagattagtgtagactttgttttaagaaaattaatattagtgttgaccttagtttgagattcatcgataaaaaaaaaaaaaaaaagaacgtatgttatgaaaatttcagatccaaatggcacaacacataataatgaactggtttagcaatgatatgatttcccttaaccacttcatgaaatattaagtgaatttgtgaatgatcgggatttgagatcaaagaattggcattcagatatttaaaggatcaaagaaacgaaatgattgagaataacgagatcatatggcctcgtacgtaagagcatcttcatcgacaaaagtggtagagaatatctcaaaaaataaataaattagtattttaattaaattaatatattttaattagtttaaagtaaataaaccattagttgaatgacaactctcaataaatgctaagaatcgtctcttttgccagaaacggttcgccacttttctttctttctctcttgttttttttctttttaattattatttatttgatgagtatctcaatcagatacttcgatggagatggtataaaattcttaaaaaagaaaaaaactcgagtgacccatgataacaactcattttgatgtaagtaccaaaatgcataattattttatcacatcgggaaaatatagtctctaacacaataatcacaacacaccatttctatatagtattttaaatggaccaccgccatctacaaaaaccgtccacgagctttcacattattttcatttatttcactaatagccaaaatttcatctttctaataagagcaacaataactcccaaataaggaaacagaaaactctaagaaaatgacaaaatattatttcttcacttttaatatatagaaagaaaagatcttaaaatatttgtaccaaactcacatcaccatctccatgatatcacacatttcttacactgtctatcattacaatcagttttaaacactaattaaccatcttataaaataaagaaacaaagcatcatcacataatttataagaaaaattacagttttacccctgctgcgatgattagtctcactcacgatgataatgatgtgaagttttctaacagttgaaaacatcaccagcagtagaagcagaagccatgattggttgattataaaaccctagattcataggattcatcacgccgtcgaataatccaccgtcgaataatccctgaccggtctccataccgaatcctgaagaagaagattcgacgaaatcaacgatctcgttaagagattggagacggtggttaagttcaagaacctgagctctgagaatgtcgttctccgcctcgatagtgacgtagtgctgcgtcgtgacggcgattccggcgacgatctgagcgttttctttacgtagatgagtcacctgagcagtgagatcatccaaatgcttctgcttcctcatcctcgacctcctcgcagattctctgttcgactgtttcctctttctcttccgctcgtcgattagatcacgttgccggagatcagattctgaaccggagttagctaaaccagtggttgaaaccgacgagcaatttccacttgtggaagatcccatttcagttttattattcatattaaaacacacagagaaaattaagtactatgattaagacgcaggacccaaagtttattatgtaaaaagattatagtatatagttttaatatattattatggttatagaatatataataataaagggctaaaggagagctgatttatgagaaaacatagaaccagtagagaaagacgacggagaaagattgaacaagatgggtcctgcgtctaagagacgagtctatagttaaaccagatctaaggatttcactaatcaccggagacatgaatgtttgaacatcaagatccacaagagttttgccacatcaaatatttatcaaacgcaaactgattactagtgtttttttctagagaaaactgaaaagagagaaaatataaaaaggtagaagaaaacgaggaagacaaaataaaaacgctaaagaagagagagtgattgattcgagagcgaaggggaagaggtgaattaaggatttgtgaggggattttatagagttagcaaaaagggtttagagcatactagatttaataagaaaataaagagagtataaagtgaatatcagaaagaaggtgttgagagatgaagcatgtgaagtgggattttccgaaacagtcaagttacagctgttttgcaatattttatttatatatttatgtgtatgggtttaattgtaaattaatgattctgtataattaaccaataactatttttagacatttttaatatggaaaaggaaagaatcttcggtattgggtatcctattttgtgaaaagttttgatttttaaaatcttcaaattttattctctgatgaaaacaacgcgtttaattaattttggtcaaatgatggctttcaacaatattacagtaacactgataataatagttttgtattaatgctaacttttactgctaaagaatcttaaagataataataataagaataattgaaacttttgtcgttggttctcgacttctttttaatacatcaaaatcaccgcccaaagtaccagaattaaccgttgagcaacggacacctggagcatgagacaaatcatgaatgagggtagaggtggtattttcgttatttaatttcttatacatatatctttttgtcaataattcaatcaatttcgctgtccaaaaaaataatatatatatttaggataataaattaatagtttagaaaactatcaactaaccagccgttgaatttatcgccgtatgaagcatcaaaattagaactattattatctttacaatatttctataacgttttggagtccactataaaatatcaagttacatatcgaaaagaaaagacaaaaagaaaaaacaataaactttaaacgagtaaattacagtacggtaaaaaactactatttgacaacaaaaagaagaacatatatacattatctaaacattaagggtgtcaaaaactttaactcattgaacttcatgtgaccgacgtgttgtggtacgtatagttacataacattggattgtagaatccaagacgtaaattcgtgtcaatttataaaataattttattgtgtgtaacatattacatgtggaccatgactacttaatcatttggttttggtgctttaactgaaatggtttgtgagaaactctttaccaaatttttttgttcatcctcgagctcgtaattaatcaaacatttcggcaaaactttgatatctataaatctcataaaaagattgaaataagaataatacgtactcatctacagctctataacttacaataatattatatactaaattttgtaaaacacacatatatatatagcttaattaattgaataggaaaattatgtaagatggaccgtcatagtacggacatctcacgtgcaattgcaatgcaaagagtgcgtgctctgtgcgcatgtggacccatgtcaaacatcgcagttgagatgtaagatcgacacgtgtcattttattattgaaaatggatttttaaaaagaaaaaatgttggttcaatcgaataagtgaagtctaacgttaattaggtatttccaattaatgaatgtgtccctgcaaacattgcaacaggtaagaaaaagtaatttgtactaatttgtcttcttcacacaatgcttatttggccttatttttttaaaaaatctttcattttaaatgaaaaattaattttattcgatacagaaacataattttctttacaaaatcgaagatttttcagatacccaaggtttcatcgaactaattaagatatctcaaatatatttatcataacgcaaaatcaattgaataaataaataaaaatgcgacatgtattggaaaggcaaaagatcccactataaattaatgtctaaaatacaaatggttaccacttaccataaaaataataatcgtcacctcaataatttttcattcaacaaaaagattgttgttattgctttctactaaggcatatcacatcttcttttttttttgggcaacaggcatatcacatctaatttcataaaataaaaactgatgtagagactgttttattttatatatagtattacacacacaaaaaaataaaaatcatacaaccataatagccgagataatattatttaatattaatgtttattacttattatgtcaaataaattatcaataaaactagttcacctaactaatttaattagataaatatcttaagaaatttcagaatattgcttgcttaactcagttctatatgaaacaaaattttatcagaatatatattatatacttagaacctatattttgacatagtaattcaattaaaaaggtgtaactaatactatgcaggttataaactaacgaccattttactaagtttcgctttgaatctcatgataatgccaaaagtcataaaaactatcaaagtttggtaagtggtgtgtgtagtgtgaagtctctttttacccaacacaaaagggatacaagttgcttagtgaaacttatacacagatagggaaaaaagtacttataaaagcaaaggcaaagatactgcgttttggcaaaaacaggtttctatatcaaaagcaatatcaaaatgtaataattattattgtttacaaaataaaacatgccttgagagagaggaaggtaagaaaacaaaagttgaatgaaagattctgaatctgcctaacaccctcaagcacatcacatggccttatgtttcttccttagcattgatctcttttcccattactttatcctcttttctttgcgagcattgtggagttgttttatatatgtgccactttttatctacatatgtactaccttgaagctaagtaattgatttatgattttttttagtagcattgtataataatggaaccatgaaacaataacaagaagttatatatatatagaatagaatgataaaaccgttataaacaaacaaaaagtaattagaaaaccgtaggccaacaaatttttatattttagttttgttattctagcttactgaagtgtgaattaccaacaaaatctgtatatatgcatgtctataaaaagtttatacgttaaattacattaacaaatctttcttttactgaactcgagttagggccgtagaaaagagcctatactcctaaaagtatttatctttatatcatatgatctgaatcgattatggccgcaaaatttataactttttggtcataaaaagggagtaagaaaataataaattatgtagtaagcgggtgggttgagatgagtaacagaaaattgcttttacaattaattgaggaatccctcgatcgaactggaaaatgaaaagccaaaagaagttttgccaaataatttgtaggtgggttctggtgactagtcaatttaaaatgaatggacactttaattaatgtatggaaatactattaaacaatttgaatgaaggcatcgtagaaaaatatgtccattttcagttaaaatgtgaacattttcacttattgggtttacttagtgaaggtcagattacaatcaaacttgattgatataataacagaatcgtacatattttagtctaaaattattgatacaactgtgtaattatataagtggaggtggtttgttcgtaaaccttaattaagaccacttaatggaaaacagttgcctaatattcgttgagcatctctatcgtagacccttaagatttgtaattatctatttttcctgaccctatgattgttagttaatatttgtaagatagacccatgcaattgattttttcaaacaatagtctggactctgggcgaccatatagagaaattaactatgccactcaaagaccaaaactgttctactaacatcaaaagtctgaaaataaatccatatcaaatgaaggagaacagaaagctataaagacactgaatctctgatggttggcgatgtagggtcaagagtaaatgcaaacaattagggtcagtttcatatttctaaaagttagtctttagaaaagcttagttaatgggtatgttcttgaagttcttcttcttctactgtttttttgttcaccaacggtttgtactgtcttacttgcgaaacatttatttttacaaaatcttataaccatttttcaaggtttatctagcttccacaaccgttctaatttgtttcgtaatacataggtgcattataatatttgtgagtttgagttatcaaaaagtgacggcaatagtacaaatcgttatactaaaaaaatccaactattataatttataactaacttcaagaagaaaaaaactaaaagtccttaatataaattgttttcaaagttcatttaattacaacaactaaatataaatacaactatatgaataaaaaaacattattagattcataatatttattttatctaaattaatcgctataaaaaaaacagaagatattttcaaatatttatagacacgtgcatgatatatgcctctcgttgtaaatatacaacgacatcaagcgattaattgatatatttcacatattggccattcattataaagaaatacatacgtaaacattttcttttcgcaatcacatcaaaaccgatgttgcaacttaggggtcgagatttcttgtctacctttgtacggtcctgggggttttccttcggtactaaggcaaaaaaaatgtgaacatatatattatttgtacatatatgttaatattaatagagatttgcagtatcaatcgaactttggtagcacaatttataggacttatttaattagctaattaacacaaatttcgtgctcattcgatactaactaactacggtggaaactaatttttttccaaccttttttagtagagtcatgcaaggtccgagacaatatcttgactggtaaaaattcaagatttttccgacaaaaactaaatcaaacaatttttttttgtgcgtatgcagttacgtatgatttataatggttagaagatctgtaaatggaggggatattctcttgctttagaaaaatgctttcgaatgtacgtgaattctgaaggtttctcctattaaatcaagaccaaagtattgaacaactagacgaaaagaataatataaacaattctgggaacaagttccagacacgagcaccggacatgcatgatctatcaaatcttgaatattataatcagattcgatatagacatacattatatacacataattatagagcaagacaaactataatggtgtttgtccttgttaacttagcatgaccattttgaattcgttgtctcagattttgatgcttagaattcgtgcctcatatttgttagaagaaaaacacaacaatatcatcgacgtatcaagtatgaaaattttgatcattctttaaaaggagataatttagtaattgcacagaaattagtcaaaaggcgacgggtacgtgttttcaggttcatgcactcttaaaaaagaaagaaagaaagatatactattttatggtcgctcagactgttgtctagtgtatggatttatcaaattcgttagttaagcctgcctatactattaattaactaggtttgctagctgtgtgaatagcgataaatatgatttaaggaccacatttgttttactttacatgggttgtgttttgatattatgtagtccaatttatggatttcggattaaaaataaaatctcgttaaacaaaaaaataactaagttatcattccgtcatagttgcgcatctcactgagatactagtgtcatttcgagtgagtaatgaaccacataatctatatttggacattggagaaaataaacgatatgaagtgtgtgatttgtccaacatgacaatcaaaataaaaacataatatgatctatgtgaattaataagaaacagaaaaaggttaaaattgaaacaaaaaaatacgcaaagtgacaataaaaagaaaaggaaaaaagaatgaaagagtggtagggttggtcgggagaggctgcaaaagtcgtgagagtgagtgaaggaggcttcgagcagccgacatcgagaatctttaaaagtcgcaaaatatcagtaacaccttatcacatatacaatatacgagcatctgaatatattttctattttaatatatgaccaataattaaagtttcaatttagcttttcttcaaacaaaagggcttgaagcttcctctggatctatctagaaccattaaaaaaaaaaattaaatgttaaagaaaacaaagagatgtcggcaaagcttagtagaagcccaacaatttaaaatataatcgctacctcgctagaagcaaggctcgttagaaaatatgggtacttattgggccataactttgggccggaattcaacagaatttttaatatgtattgtgcaatcattttctagagatccgagtactttcattctttcaagttaccagcaatgtcacaaattggaggaaaaatacaaatgagtaaaaaatccaaatattgagggagatatttttgaggctgggaaaatggataacgaaggaacgtttgtgaagccatttacctatcaatttttggaccgataaggtatttgcatatcaatgggcccattattgacattgacttcttagctacaatatagtttcaacttgattatttcactttcctcgattatgacttgtattttccgcttattggccaatactcaaagaccttaatatattgctattcttttatattatcacctgatagaaaaataaatcttaaattcatattaaattaacttatgtatttaagcttataaaataaattgctcattaatacaactctttatttaagatcaactattttatttttgttaatttataaccaaaaaggtgcatctagaagctggagaaaaaatacgtaagatagaaaagagagcccatgtttctaataaattctactactaccttatccaaatccatctgtgtgatacagatgcgcaagtacacgtggcatccatctaggcgatttatttttcgtctgccgttagttgatgacgtgtctagctggtacaatttctcgttctcacgtcatccggctatattattgaaatccctttttcacccttccattgcacacattttcctctcttgtttttaagtcgtaaatttcacacaatttcctaatttcttattttaaatgaaaatgaatgaatcaagaaacgacgaaatcaaaacttttccaccaatcaattttaaaagaggcttttgaattattttgtcgaccaaaagaagaagtgaattattccatgcaattttatattaatagattttattattatctattaatattgtgttggttgatctttgctcacattacaagtaattgactgtgtcctaaaatgaaaacaaaatcatgtgttcttttagtaaattatttggaactatttatatatatatatatatatatgttgatgtctttcgttagtatatttttttcaattattttatacaaataagttgaggttagtactacaatatcatattagctttcaatattgttttttatatacaaaaaaaaacaaaattaggaagattatggtttacataaaaagttggcaaaattttattttcatgactaaaaaattaggcaaaatgaaacaaaatttggtgaaagggtaaaatcgacaattaaaacaaaaactgcgtcgataaagtaacggagattctttcactcctttgatctctcaagtgaagaatctctctctatctctatcttcttccattgatcctttcctctctctggcttgtttcagagctcttcgatcttcttcttgatcgatctacgtgccactgtttataccattcacgatctaatccggtttcaattattactcacgaaatcgtaagtgaatcaaaaactgtttacaatctttctaattattgatcatcatcatcatcaaaatatttgtgaatatctatggtataattcgatgatcattgattgttttgactttttgagaatatatatggaaactactgtttcgttgtatggatcagtgatctagaattttgccatgtttcgtttactttatgagattttggatttcgttatgtttgacactaaaatactctgtttgattgaaggaaggaagatgagatcggttcaagcaccagttgtttgtcctgcaattcgaccaagacaagtaggtgcatgtgcttcactagtcaactacactggtctgaaacctagaagccaattttggggtaatcggacaaaaggtgtcaagtctcagggcactaccacaacaatcactcttagattgtgcaacaagagtatcaagtgtgttttcagctctcactctgatggtaatggaagcactgctgaaaatttcaatgaaaatgatgaggaatatgttaactctagtgtagtggaagctggtaagttagtggggattagtagagtttccttgtttggtttgatttagttcttttagtttttcaaagttggtgtctttttgggtgtttttgaatgttgtagttgaagtaaaaagtggagcagatggttttatggtgaagatgagggatggtaggcaactacgatgtgtccataacaatcctcaaggagggcatttaccagattatgctccacaccctgctattgtcttgaaaatggaagatggaactggtcttctccttccgattatcgtctgtacgtgaaaatctgtgtttgagttgcttagttttggtgatctcaaagtgtttctcttatgccactctcacaaggttttgagtatgttgatttgtgttttgttattgcagtggagatgcctagtgtgttacttatggcagcaatgaccaatgtccaaattgtatgcttttatttctcgtttgttttgtctctctgtttggaatttagttaagagtgattgaagagagattttatgatgttttatggttacttgttgcaggcaagaccaaccatgtatcaagtggtgaaggaaatggtggacaagatgggttacgaagtatgtttcgtggtttcagtttctgctcttttatttaaatatccttgtctcgtgaagattgtgtttcatgaaaattttctgaactattctacaggttagacttgttagagtcaccaaaagagttcacgaggcatattttgcccagttattcctttcaaaggtctgcaactggtctcttatatacaacttacattcagccttggaaacttaaatcatttcctatgtattaaggctggttttgggacgatattgcaggtgggtaatgcctcggagtgtgtcagctttgatcttaggccttcagatgcaatcaatatagctgttagatgcaaggtattacatagctatgttaattaatcagctgaggtaaatacaaatgtgtgtttggcggttgaaaattgtgttgatcgttttgtagatacctatccaagtgaacaagtaccttgcatatagtgatggaatgagagtcattgagtcagggaagatatcaacaccggcaccagcttcagatggtttattatttactgaacaagaccggtaaattttcagacaccttaaagatcaatctttgcagatcacatctttttactgtgaatttgagtgccataaacttttttgactttgtgcagaccaaatggtcaggcttgtcttgatacgaaagagttcaatattttgagcaaaatgatgcaagccgttgatgaagagcgatatgatgaagccggtaagctttgctctagtctctatatccacaatgtacactttattagtggttacataacttactgctatgattggtggcccagcatttgagaccaatctgatttatgtatgtaacagaaacttttatagcttttcgtaaatcttggtctaatctctaatgatcaatacactgttggttatatgatttgcagctgagtggagagacaagcttggtcagtttcgggccaaacgtaacttgaggaaatacacatgagagaggtaaggagatataaacgaaaatgcatactaaatgacgttatcatttctcgatacttatgtttctccttggggcagctcgatcaacaattattggctgtgtacataaactaagaagaaagtcattggtcggaatcaaagtggaggaagaagcctgaagtgtcgtctctgtatgatggagatcgaagaatgcttctgcactttacccatttccctaaaaaataaacaaaaaaaaatgtataatgtatgtatgtagcgtgatgtgtacatattacttattaatctatgcaaattaagctcactctaattacttttaagtttccttttaagtcttatgttcgtcgtatttgttttcgtgcttctttctttttataataatttaattatatatttttgttattacttgcagctgtttgttgtttatcatagaagcaatgtggcatatggttaacatgaaatttgaagaaaagacaaaatcactggctttgccgacatatctgcagtgtctttgttttgtttgttagtactgcattgtctaaatctaaatcgtgacaataaaacaggataattatttttcattatgatgttctttggtaaatatgtctataaatattcttactaatttacaaatatatatattcatgtaaattttattattcaagagatcttacgcagacatggttttcacagtaccattaagattatattcaactggtttgtattatatttaatttataaataaaaattgtcaattgataataaatggaaagaaaaaattaaaatgaaaaaaaatccatatccattcaaataaaatatctcgcaacatacgtttcatacgacaaatagtgtgacaaactgacaaccacttgtcagaattgggctctcaatatggggaaaaaatagtcaatgttattaaaaagacaaaaataaataaataaaggaaaatatatctaaaatcaataagagattaaaaaatagaaataaatcatgtatttggcacataaacaagtcatatatcgacaaaagcctaagtttggtagatgaatagtgattttaaatggtacataagcaattcaaatatgtatagacaaataagcctaattttataacatttttttgttttatattacaaatctaacatttttttaattcaaatatcccactatcctttttgaatcaacagaaaaacatctcattaaactaaaaaatctcagattttgaacatgtttaggtaaacaaccatcatctcgtcgtttcttttttaccaaacatcaattttactaagttatcagaaaaacatttttcttttatcaagaattattcaaaaaccgataagtttacatgaaaaaagaaagtaatacagatacgcgccttcttgattaaacaatcaatccgaatattgttataacgaataaaaaaatatattaaaagaaagaaaagaaataaagaaagatcgaaagtagccatttgaatattgatatttgattcttaacaaatttatctcatatagtaagtatccgtctcactaaatttgaaaatacattagtcgatatataattattaactaattataacggtatttagtaacggtatttaccgtgcgcggggactcatctaattaaaaaactaaattgaaaaaacctcaaaaaatagtagttaccacttaccagcaaacattcaaaaaaaagaaaacagagtatgactgattttaaagtttctaagaagaaaagaaggaaaaaaatcaccgacgagtctttgtgtttccggtcacaattaatgaaaaccatttctagtctaacttttgttgtaacgcaagttttgaaacttattaattaaagaagactaataattattataaaaccccatcatcactttacttctccctcttacgtctctttcaatttcctctctgcagaatcgcttctctctctctctcggctccgccgattccgagttccccgattctcggattcttctgaagatttctcatgtcaggctctcttgatcgatttgcgagaccttgtgagtaaattttaatcatcccctttctctcgattctcgctatttcgaaatcacgcaattctggtttgttagattgagtttgagaactagacgtagacgatgctctgagttttagattttagggatttgttgttgttgttgttgatgttgattgagattttgtttggtttaaggttttgaaggagtttcaagcaatgatgagagaagagaaaggagatcagatttcgaagtttcagaggatgagaagaagacaagaatcgggaatttcaatttcaagaagaaagctgcgaaagcttcgagcaaactcagacattcgttgaagaagaaaggtagcagtaggagaagaagcagtgatcgtactttctctcttaccattgaagatattcatgatgttgaggaattgcgagctgttgatgaattccgtaatttactcgtctctgagaatttgcttcctcctacacttgatgattatcacatcatgctgaggtgagactttatttctgtcgattcatttttcatgatgatgatgatggtgatgatgatgattttgatgttctatgttctctgttagattcttgaaagctaggaaatttgatattgggaaaaccaagttaatgtggagtaatatgatcaaatggagaaaagattttggtactgacaccattttcgaggtgaattacatgtttttaaaaaaaatcttaatatgttacttttaatctcatgtgatggttttaatctcaatatgtgtgttaataggattttgaatttgaagagtttgatgaagttctgaaatactaccctcatggttatcatggtgttgataaagaaggaaggcctgtttacattgaaagattaggactagttgatccggccaagctcatgcaagtcactacagtggaaagattcataaggtatcatgttcgagagtttgagaaaactgtcaacataaagcttccagcttgctgcattgctgctaagagacatattgactctagcacaacaattctagatgtccaaggcgtggtacttataaaaccagattctgttagtttttcctagtgtagtgtttattgtcctgcatcttattacttataattgcttaacttatgttttgcaggggttcaagaatttctctaagcctgcgagggatctcataatccagctgcaaaagattgataacgataactaccctgaggtatgagctggttgctattgattttgttacaaattgtgtgttaattaaataagtttgataaaagataatgtgaggtaatatttcacctatatgcagacacttcatcgtatgttcatcatcaatggtggttctggttttaagctagtctgggccacagtgaaacagtttcttgatccaaaaacagtcacgaagattcatgtaaatttacccttttatgcatatccatccacatttcctcaagttatcctaaagattatctttaatcgtattaactattgtcgatgtgttgttgttataggtcattggtaacaagtaccaaaacaaactacttgagatcattgatgcaaggttgagacatctcaatcctcttgtttggttcacatgagtccaaaatatgatatagcttgtttggttcacatgagtccaaaatatgatatagcttcctaaccatttttggaactttttcagccagctgccagattttcttggtggcacttgcacctgtgcagatcgaggtggttgtatgagatctgataaaggcccctggaatgaccctgagatattaaaggtaaaaatcgatcttccgcagcctattttggttaaaaagattaacaccagacagaatagtgttacttaactgatcttccccaccttgtagatgcttcaaagtggtggaccgctctgcaggcataattcggctctaaacagtttttcccgtgtgtcttcatgcgataagccatctttttctggggtaaaggtcttctatacttaagatacgaaacttgttttcaaaatttgtgtcttaccgtaacaacaatgtcctcattggctcagataaaagctagtgacacctcgacagcagaatcagggtctgaagtggaagagatggcttctccaaaagtaaatagagagcttcgtgttcccaagctgactcctgtttgtgaagatgtaagaattttttttgtacggaagtgaaaatcacagtatgcatttcagactacttactacctgatgttactttcagattaggggcactgctatatcatatcctactgactcatcagagtatgattcaccaatggtggacaaagtcgtggatgttgcttggatggcccatgaaaagccaaaggcttcaaaaggtaaaagagaggaatctaaatattatgatatgtaaatcagaaatcagatcaacgcaaagtttaactgtaatggaatatgtttgtgcaggttcagaggatacacccgattcgggcaaaataagaacggttacttatatctggaggtggctaatgatgttctttgtaaacttgtttacgcttctcatatctttggctctgccacagagagaaggacactcccagtctgaatcttcagttgatggaccaaacgctagagagtctcgtcctccttcaccggcttttgcaactatcgcagagagaaatgtgttttcttctgttgtaaacagactaggagatcttgagaaacaggtagaaacactgcactcgaagcgtcatgagatgccgcgtgagaaagaggagttgcttaatacagctgtttatcgcgtggatgcacttgaagcagagctcatcgctacaaaaaaggtctaaaggaaacctctcaattccatgttaaatgacttttattaattaatatgaaaagcaactgtctttgtgtgtgtatattaacgccaacactctccaatgattcaggctttacatgaggctttaatgagacaagatgatcttttggcttacatagaccgtgaagaagacgagaagtatcacaaggtaaatcatttaatttctttcacccacccaatcacccgtaattttgtgattgtttttttgatatatgaagagaatacacttacgtggtttttgttgggaaaacagaaaaagaaggtgtgctggtgaagactgaagagagagagagcttcgagttatacgagttacaagaagtggtgttgtactctgctttatgagtaggttcgtaaacaccaaccctatagagagaacaatgtttatatccaaaattaggtctcataagcaaagatttgatacttttgggggaaattttagaagaatgttttttcagttaatattcaaagtacatttttatttatatcagtgacaccattttctcccacttccgtctctgctttgcctcctatcgcagttatcatacagtatttgtttggtctatgcttatatgaatgagtcatgatgaaaaatgtgtctatttataatttaagcttgattcaaggctaactccataaaagatgtggtaaacaacataggtagtcggttagtcgactttttgatatcaaaatttgaatgtctttgaaactactaaaataatggctgactgagttagcaaatttgatatcaatgataaaaaaaattccccaaattcacataaaaattactatttccgtatttcatttcattgtggtgccaaagaaaatcgaaaccatcgaaaatgaaaatcaagccagctaattttaaaataatcaccagcatcacctaaagtagaataatactaccaaactttagtcatttgtgagtttttactttttttgttacctcttctctacttccaagtcagctatcaagactagcacgagccatagccaccaatgaggccaggtctagatccaagtacatgacatcgaacggtgtcgttttccgaatcacgtgctctcttcttctgcgttttcaagaaactctctaccaccaaacgaaactcttcactactcagcctatctatcggcacctctttcgccgattccgttctccgaatctctatcaccggccggattatctctttcttcgtctccgatttcgtcctcctataaattcccggtgttgtaaccatctcccgattagcctcatccactaccacttcctcatcatcctctgggaaatacgccggaacgatttgcttctccgattcatcgtcttccaccactttctccgactccgttctctcatactccattgccggccggcatatctccgatttagtcctcctagaaattcgttttgtcttaaccgcctcatcaacctccgcgttaaacgtcggaacgatttgcttgttcgaatcattatcatcaactttcgcggcggaggcgtttgcgatcacggtggagaaagaagaggtgtattgatcgtagagatctggttctgtttcgacattactactactactctcgttgttactctcgccggagagaaagaaaatcaaaccgacgattaggttagcgaagaaaaagacgacggaacgatcggttattaaaaccgctccggtccaataaatccagtcgccgacggtttgtagtataatcgccaccgtcgggaaccataagtaacacagaaaagctacgccgactaaacgaagaatgcctctgaagcttctacggttgttgtatctcctcatcgcttccgctttctccgcctccacgccatggaattcgaacggcttctccattttttggtttttacgcgctctgtttttgtttgtctttgtttccgtgaaattgaaaacagagacagtataaatgcttggtttgatgattaatactacaggttttgagaaattgattacgatggagatttggattattctgggaaaatgaaacgggaaagtgatattttccgggaaaattgaatcgggaaagtgaagcgattttgttaaatgagagaaaatattttattgtaagaaggagatacactgacactgatacggaaatacgatcgcaggactagtctttttatatatcctcaataagttaaaatttaatgactcttttttgacaatttaattttatactatggttttgctttttggacacccaaccaatgataatagtacaaacatatagtaatggttcttttggttttctttagtattcaaaatttagaaaagaacctagagaatactttgtttgttttgtctctcttcctatgaaaacaatgattagtttgtttactaattgccatccataactaattaattgtggtatcgaaacaatattttcactatatagaaacttgcacgaagataaagtgactgatccacttaaagatactgaatttgctatagaatatactgaacatatttcaacttactataatttaacgatgccagatataacgcaatattcgacttcatatttgaggataaagttgattatattacatggatatggatttatctaaactagtccatgagaagcccactaatctttttaagaatacacgtgaaagtcacgcgccgtcaaagtaaaagaataacagacttatccacacattaacgaggttcgtggatcccgaacaaaagaataacaggaaaatggtcgagaaccacgtgaaaataagatgagtcatgtgccctaacaggactttttacacaatacacatagtataggggggtatatatgcaaatattttaattaagttaatagcttaattcataattattataaaattgagggagctattagtgtttactgcagacaaaggctgatttggaaagatcaacagagtcagataactgtccccgaacaaacaaacatacgaagtgcattattttcgacaaatgaacgcaacgaacatttaaattgtatttgtcccagcaaaattaaaatttatttaatccaacacattgtatttattccaacataattaacaaactaattagatatggttagacatatagtttaactaacccaacacagcgtctttcatcaatcttatgctaggaaacaggagaccattagtttatcttaaaacaccttctttttgtgtgtctaaagtctttaagataatattttaagactcaattttagtcaagatcgcaaatcattgataagaaaggatctaagacttcaaccaacgaatgaatttagtttaactcaattattcagattcaactgcatcgatcagcatatgaagtatgtagagatgtcaaaacccaatttactaacggattaaaaagcccacaggttttccttttgaacttcagtgaaaactttggtagcttagttaagaagcagaagactccagctgagaggaaatgggcctaaaatagcccacacattcgactgtcttcaaatgggcttgagacggcctgatattggtttggcttgatattggtaaaacctctgattgagctggagtattctgtttctgttcaatattggtcacacaaattcagtagtagtatacaattgggcatgatcacagaatcttcaacttcaagtgccaaaaattttcttttatgttctcaagcaaaacatactcctacgccatggccacagttcaagaatctgctcactattagtacgccacttcgtcgtcagaagacaaatgttttgcctgataacttcagcagacacttacatagaccatgatcatcatgttcaacatcttataaatctatgtaaaaatgatctcaatcaactaatcaacacaccacttacacatcaacaacaactacctacactagtcattaatctcatgccataactttccaagattatcacaaaatgtggcaaaagccacaacctttctttcatttgcaattaccatttcataggcattgttgctatgtttctctcaccagtgtatatctatctattatccatcacaaattcatgccaaactcacaagctaaagatttgtccttgagattcgctactacttgtatcattgctctgagatcctagtctcactctcaatgaaaccaaatagatcttaaagaaagcataaccaatagcattcagaagaaaattcacatacaatttttaacagcctaagcagtatctcgacttcaattgaaaagacaacaaattcaaagacataagctttaccagaaaagactcatcatttcttcttccctttgggacctttacttttcttagtaggcataatgatttctcctttaagcacaggaatctccataatctcagaaagcccagcgaacctcttacgaaacttctcaacttgatcagcatcaaccatcaaagccgaacgattcccgaggtaaaacggatggttacctgaccatacatcaaccacatactctttctttgttcctcctgtagtcatcaccagctctccattgcagtaaacctttgcgtcttcgtggaattcaggatgcaattccttcttacgacacgttatctgaaccaccgtattgctgcttcttctcaccgattgttttcctcctttcactgccgccatcaccggctaattttgaaaaaaaaacacaaacaaatttagtgattttggggaaggaggagaaatagacgaagaatgagaaatcgatttcgagcttacctttcttaattgcagagaaggaacacatgggctaatctgaagaaacgagttcgggagagaaaccgccatttttgtcttcaggagctatcttcttcttttttcctggtgatagagaagaaacgaagtaacgattgatggataagagaatgaggatgatgaagtgtattggagttacgtttataaccctaaatactttgaagatatgtaagggtaatatggtaatttacatagagacttccttttgttctgttgatacactcttcgtcaatctaacgcttcttcatttttctcgagagaagcaaaactacatatatatatacgcacatacgtacacagttcgaaggttttagctgcgagtatgaggaaggaactgtgtagaaactttcagcgtggcaggtaaatactcttttcatcatcatcatcttcttcttcatctgttctagtttttgttttgattcaatttgttgttttataagagtttttgaagtttgtttcgattgctgaagtttaggtttcgtgttctatattctggggtttaatttgaaatcaatcgatgtgcgaaggtggtaatgtgttagaaaacgatgtctattgagctgaaatctaaatgaatcatacagtttattgactttgatagattctaatcttcgtttccgccattaatgagggttgatttgcttcggaagttatgattagtgatagtagaagcttagagacgtaattattggactcatcgtcctttgtgctgtttttgcagttgtaggtatggggaaaactgtagatttcttcatccacaacaagctaagccaaataatccctttggctttggtacacaaaaccaacaacaacaacagcagcagcagcaacaaaatagttcgaacccttttggatttggtgtacaaagtggtggttccagcagaccgaatcagttccaggtcaatttgtttttttcctcttttaagatgcaagtattgctttgatagaatgcaagttatcgttcggctttggatgagaaaaatggtgcatcttctttaagaaacgaaagcattttgcctgttgaatgaatggtgacatgatgatgcttttgcaaatcagaatacttggtcacgaacggcttctacacctactggtggtggtgctgctgcttctacacagcagactggtaaacagacgcagccggcagatcataagtgagtgtatatatgtttacatatgcttgttctatcaattatcatccttttagccgtttgtttctttggaaatttactgtttctctcttggttactatacaaagatgcacagatcctgctgcgtgtaagcgggtaatgcaagacgattttaagaatgagagacccatgtggaagctcacatgctacggccactggaaatagtatgtattacttcatttggtttagcatccttgatctttatccattctttataaacgtgtctgattttttctatcttttttttcttctagttttccatgtgatgttaccggtgatatcagctatgaagaactacgtgcagtggcatatgaagaagctaaacgaggaatacctctacagtcgattgtgagattaacctttcttgtgtttgttatactttacactggttttcatttcatactgataagacataagttgatttcctcttttcctggcttattatggtgcattatataggttgaaagggagaggaatctgcaaaattccaaaatagccgagtttgaaaactttctacggaatccatacaaaggctctgttaccgccaatcaaagcccgtttgctgcaaccactcctagtatcttccctcagtccagtcagatcaattccccttctccagcattctctggctttaatcaacaaactgcattctccaataccaatgcgggtggactcaggtatcaacttttgtgggatttctccaattttcatatcccaaaaagtttgtgttgccttcaaactaactctcggtttccatttttcctcgacatagttcatctggacctccgaatgcctttgcaagcttcaatcaacaaactacattccccaataccaatgctggtggagtcaggtactaactttctccatattccatattcaaacaagtttgtgttacctttataacctcttggttcccatatttctctttggccaactattcctctgcatagttcatctggacctccgaacccctttgcaagctttactcaacaatcaaataatcaacaaactgcattctccaataccaacgctggtggtctcaggtatcaacttttgtgggctttctccattttccaaattccgtaaaggggtgccttcatgaaaactctgtttccatatttctctctggccaatgattcctctacatagttcatctggacctccgaatgcctttgcaagctttaataaacaaccaaatgctttcagcgtcaacactcctcaacctgttccttcaggtactacttctaatgttaaactttgcttaaaggccaagagactcgccatcatctgaaacctcttttgcaaatgatcacaggtccctctggtttccaaaccaatccatcaacaacattcaaaccagcatcatttggacctggacccggatttgccacaactccacaaaacaataacatctttggtcaatcaactccaacaccggctacaaacacttcccagaacaatcagaccgcattcaacttcaatgtccctgttgcatcttttactgctcctgctataaacacgacaaatacatcttccgggtaagtcctcaatctgtttccaggttttttctatagttaaaaaccgttgttgaacatgttgacagagttaatcaaaacatactatgatgtttcatacgtttctaacttgaatcatttgcggcagaaccgagctgcaaataggtggtgatcctgttgatagtagtatctggctaaaggagaaatggaatccaggggaggtaaattgctcaaaactaatcatttaagttgtttccaaaaaatttattgctcttagattaatttgttgcttttgttgtgcagattccggaacaagcgccgcctgatgcctttgtttaacaatatgaagaatgtcattgaaacaattacgtataggccagagtcgcaaattggcgcagaagagttgttttttcttggtcatctcagatttgtgaccaatgtagtttctccacaaaatccaaagttttgaaccttaacaataatttcaatgcagataacagaaactataaacaagagaattctaaaaatcaaatctttctcaccaagtgaacatctttcaactacaacaacattcccacaaaatttgaaagcttttcttaattccactacaattttttgatcaacttcaaacaacgatctcgctggattttctctttttcttactcttcttcctctcttccgaacccatctctcgatgactcttcctcttcttcttagagcttagcttcgtctcctttgatttaatctccctatggatgctcttcaattcaataaaggcaccggaagctcgtcgaaggtacgcgctaacatcttgagaggctccattctcagaagaaacgaatccggagagaagagtagccgcctttgatagagagattggctttgcactgttaactcttccggtgaccgtcttcatcggaacaacaagctcaaggaagatggtcacaaattagggcaagttgaaaaataaataaacctttttatacatagaattgaaaatgggcctagtggaaaaagcccaataagaaaaaatgtcatcggtgtctctcttataaaggtaaagcgcagtgtcactcacagagtcaacaactctctctgaattaagacgatggcggctgcaatggcttctcatgtttcgacggctcgatcaccggctctttccttctcttcttcgtcttcctccttcttccccggtactactcttcggagattctccgccgtttcactcccttctcctgctctccctcgccttcgtgtttcatgtcaagcctcctccgtcacttcgccttcttctccttccgatgtcaaaggttagccttttaggcatttcattatcatttctttcggaaacttccccaaagatcagattttgtttatgaaatttgtatgttggtatcggattttgattttagcattcgaaaatgtgactcattattgcctctattgattgagaaactacgcaagtttgatacttttagatgctttcatctagagattcatttccagtggattgtgagatgataagattttatttttttgcaggaaaatctgacctgaaagactttctggcaatagatgattttgacacagccaccattaaaacgattttagacaaggcttcagaggttaaggccttgctgaaatcaggggagagaaattatctaccttttaaagggaagtctatgtctatgatctttgcaaaaccttccatgaggactcgggtttcgtttgagactggttttttcttgctcggtggccatgcgttatatctaggtcccaatgacattcagatgggtaagcgggaggaaactcgtgatgttgctcgtgttctttcacgctataatgacatcattatggctcgtgtatttgctcatcaggtatgctggtgagtttttgattgattaataagggaacattagaagtgtacaaacatttctatggcttgttctaatctcagaaagataactgcattctcatgtgtgctgtatgttagtggcatggatatttgtttttcaactcttttctatgcttaagtttgcacgtctttccaatttcagaaagatgaatgaacaaacttgaatccacttcatttgcaggacattcttgatttggctaactactcgagtgtaccagttgtcaatggtctgactgatcataaccatccttgccaaatcatggccgatgccctcacaatgatagagcacattggtcaagttgaagggacaaaggttagttaaccattttacccgctgcttgctattatctatgttcctcctcatatgtcgtcaaaaaaagttctacctcatttactgcttgaaggaaactgaaacaaaaccaagattatttcatgaaatctcgacattcaagattgtccattttaaagcacagcttgtattatgatctcattgttctatgttttgcatacatgtaaggtcataaaaaaatgttatctatactaacaccaattcaacaaacttaaggttgtgtatgttggagatgggaacaacatggttcactcttggttagaattggcatccgttattccattccactttgtctgcgcttgcccaaaagggtatgaaccagacaaagaaagagtttcaaaggcaaagcaagctggattaagtaagatagagatcaccaatgatcctaaagaagctgttattggagcagatgttgtgtactcagacgtatgggccagtatgggtcaaaaggatgaagccgaagctcgccggaaagcattccaaggattccaggtaaacataagtttaatctggcttagttttggtgcaatgctcggtactcttactaaattacactgcttcacgcttacatattatgttcaattgcaggtggatgaagctctgatgaagttggcgggtcaaaaagcctatttcatgcattgtttgcctgcagagagaggagttgaggtgaccaatggagtcgtagaggctccttattccattgtctttccacaggcggagaatcgcatgcatgctcaaaatgctataatgcttcacttgctcggcttttaaacctctttgttatcttagctctcgcatgcggttggttcgtgtaccacattgacttaataatgtactatttattaaccttagtttgagaaaccgtatgatgaataagatttgtggctgattcagctgggaatatgaatgagctacttttctatatatgacacatagttataaatatttataactagttattacatctctagatctgtcttcatcccataccatagcttgatcctgtacttgttaacttaggttcttaggctgctaggttctgatttgcagggtgacttctgataatagggtaaagaaaaatccaaagttttacaccatcttacttatcgttcgtcagcaccaaatttgttccatgcttcctggagaatcagaaaaagccggtaaatgactgatttgcagatggaggtaactcaatcaaatggaattaattttctatcgaggatttatggagacaaaccttgagaaggtcaaaaactttctcacaaatgtacttctgctgtgtggatgcgccacgttgttgaagcttgtcgggatgaacataaagagttgccttgcggtaggcttttctcacagaagcgcttgagacaagatcagtgagaggaatcggtttccatccactctctgctccaagtatctgcaaagaacatttgtttaagacttatcatctaatccattaaagaggtaagacttaagagctgtggacatatggggtaaacaaattacatattggagtgttgagatcaacgcccgtaagttgttttcctttccactcgaccaccgtttgacatcagcatcaagagcttccgcgagtctctgtaaattcaatcagacaaaatggtggtttagtacaaccaaattcaaagatatatgagaattttctgatgatataatgagtattgtctatgtgagtacatttctctctgtctgctctttctgggttttaagatcacgaagtttcttctctgcaagagcctctgcctggaatgatgacaccgaacaaacaatatgttttaagtagagaaaatagtataatataaaatacagatgaacagataatgtacaactgtacatactgcgcggtcagatgttctctggtgtctctcagatctagctttacatctctggattggttcacctttggcttcaacacgaaaatcatatgtacaagtcagtgtatagctcaaaatcttggaaacaacaatatatatatagacataccagtctggtttgaagaattggaaggacctgaacttttgttctccgtaccctgctgaaggatttcatggatcaaaatattacatgagagctgttaaaagaaaaatattcataagaaaagagggcttgggcttgaaactcacagaagatgaggagcctcgtctttcaccagaagagctaaatgacttgctgccgccataactttttgcttgagaagcagcagacttaccagacaatgctttttccatggcacgttctctgacctcagtgattgctcgttctacagcagcacgctcagctctgagtttggcttgcattgaagccttctcagctgatgataacttatcgtttacctcaacagatcccttttctgatttccttggaacctctctacggtgggctactgcctttgccttctccattgcagtttttcctgctctttccatagcatcagcaaatgccctttcgcgggcttcacgaatagctctttctaccataactctctcttgctttctttctctctctttctctcttgtttcatctatctttttcagatgttcctcaactgtctctgctttgttttgtgaaatatcagaagtagcatctccctcttcttccatagatgatcgacaactctcctctccctcattttctttcatgtttccatctgttgctgcgccaatatcagaagtagcatctccctcttcttccatagatgatcgacaactctcctctccctcctctccctcattttctttcatgtttccatttgttgctgcgccaataatttcttctccgtttggaaaacgacaggaagactcagctgcctccacattgcttctatatgtttcattctcttgacactcaaactggtgctctagttctttcttatctccatttctctctacaccaagacttgttttcatttcatcactttcttctttggtttcctccaattcgtcatgcttactttctgcctgacttgcccctccatcctgcagtgatctgtcgtcatcctctacaacactccaaccactttgaatcgaatcagaatctatttcttcaatgtgttcttccgtgttactgacagcactagctttttcagggaattgatcactgcgatgttgctcaatgccaacctcctcaatatatgaatcaccttgtctcatttcaaaagatgacctgctggtgtcagtatctatactaccatcgatcatagtttcttctgcttgttcctgtgtttgatcaaatctctccctagaattatttgaatctgtttcacttcgatcatattcaagcatttcagcatgagaatctgcatgctcatttatctcattaagttcagaaagtccttgaacccagccagcttcttcagatgcttcctgcacatcttcttcttctaggctagccatttctagttcttctcctatcagttcacggaccaaagacgttttaccttgcacttctaccttaccatcctcttttctacaatatgtttcttgtgccgactcatcttcattttctctggtatgtgcataggcttcataattcgttcttactgtctccacctcaacctgttcatatttttcttgagctttttgatggatatcaagatgtcccctttcagattccactaagcagtaagtttcatcctctcccttagtatctgctgtctgaaacatctgcctaaacatctgtttaagaacggtccaattttcttgcaatcctgaatcactagcttgtccagatgtgctttctatttcctcgctagcatgatggatccttacaccttcctcatgaaaggacatcgctgtggtttcattttccgcactttctagctgccagggcctgttgtttcccttcggagcctttatcatattatagacgtcttcagaggtcttccaaactcttcttcgcctgggaaccttgtgcactgcctcttgcacctcatctatgtttcctggctcagaaatatttactctgttaaaagacaccatagctccaacactatcatcggactgagttttattcaaactcggtgttggggtttcttccacttcccttacatatgttttggaatcatcaggaccaactaacatctcctgtggctcagagactatctccttctcaccttcctgatctagaacattgcaagtgtggtcaccattttcttggaaatcttttaccccagatccatcttcgaacttgcaagcacttttaacttgccatcctgtttctttctccatattctgagaagacctttctgtgaaagcacatatggttgattcagacttctcttcaatattcatttcgctcttactctcagtttgttgtggggtctcttccacttcccttaagtatgtttctatgactggaataccagctagcatctcttgtgagtcactttcctcatcttgaaccatttgagtgacggtagaattttccttctctgtaaactgtttctcatccttttgtgaaactttgctccccgtgaaggcctctacaacacactttaatttactgccaagctgtccaaatgtatagaagggattctcagttattggttgcacctcttgtttcgtatcaggttcaggtttagctggtgcaaggttttctggctcctgctgcttactattcataactgatttgaatatccctccaggtaattcccagtgttttcgacctcttcgtgcttgttcctcttctagcgttatgatatcttgctcttctaactcttctggcttatggtctgaagttgattttaaaagtccttcaggaactccccacagcttccgcgctcttttagcatgctgatctccctcgtttgaaaatgattgttcagaaggtttcaccatttcaccgagaatctgagaattgttgtctctgctttcttctgtaattccttcaacctttgtgttccctttattctcaattttagagtcatcacaagatttcagttttgcacaactgcgaaagccggactttttcttttccatcatttgttttgcaatattcattcttatttgagcctcttctatagcctttttcagtgctgcagaagactcagcggcaaccgaattttcatctgtttcagcatcgaagtatggaggtgaacttggagaatcagcatcttcagtttcatacctttccgaaggcccagaatttaaacccgataacctttcagaagctccatgttcaccattcaatgtacactgaaagcttgaaggcggtttcacatcccgatattcaccattagaaacggtcttacacgtggagtcatcacgcgtactgcatccatctcgagcaaaaatgttctcaaaatcaacctcagttttagatccctgctttctagaagccttgacttcctcacgaccctcgttacatggcagcttcttctcaactgctggaataggagttgatttactttcaatcttgtgcaacaaactcgtattatcaaccacttgagtcggaataggaccaggcatagtagcagggacctgagtaagatgagtagccccattctcattacgagggaccgtctggtgatatgatatatcagagtgcttcatcctaaccatttcaggtgattttttcccctcgttgcaaagaggaacatcagaagaatttccacctttcctacgattcctacacattagagaaacaagccaaaagctcaccaacaaagatccaacatcaaagtattccactaattcaactagtttatcaaagatgtctccagcaaaacatcattcacaaatcacaatcatatagcctttaaagaagctataactacgccagtacttaaagagagtaatatcagcactgaatcagcaaagaaccctaaatatcgtagaggaattataccttttcttatcctcgttaatggaggttttcttctcggacttgatgatcacctccttaggagtaacagcaaaatcgcaagctcctaagccaccaaacaccgaagagtaatcgagcttagaactccgaacatcgaccttaaccttaccaacgttcagctccggaacatccagaaacggaatcgaagacggagaaggacctgaacctcggaaaatctcaccgtaatcaactaaaggagatttcgaattc

SEQ ID NO: 1017 - DNA, 97554 bp, Arabidopsis thaliana
aagcttcgcagccatcatctctctcaaacaacaacattgaaaattttcgatcctggtgacaacaacaacaatgcttgataacataatgggcttcgatttctgaaactgtataagcccagttaaagcccaatataatcattaagttcgcaaatgttatacgtctctaataagacgacgacggatttagataaaatttgagcccaaaacgcaccaccactcagcgttttagacctgtcttctccagaggcagagaaggagaagcttcctcatatggcgttcatagccgaagaagccgtttgtctattccttcctctgaatgcaaatcatcatgactcatcccaaagatgagaatttgaaagatgctataaaggttttactatgcttatacgaaaagggttcaaatagacaattttttacgtgcattgagaagaaaaggatgtgattgttccacacactgaaacacgtgatacgaagtgtaagtctatatacagcagatgggtatggatacagaacgactaaagatgatgtattattgtcattgaataactatatgagaaaccaaatgttcttttaccttctgcagaattgaatgtcatgcactgttaaactcttcaaataaaaagtctgatcagctttgtgtttacaactctttcttgcgtatcttctccatctttatagatagttattttcaacgatcagcatcctattctctaatacctggatttgtgacgtttttccccaacaatgttacttctattttagtgatgttctcttgcaacccatcgagaaagggtttaatcttgcatgataagctttgtggatgggttgcagcagaagatgactacaacagaagttatattgttgggtaaaacgtcaaaaagaacagagttcttaaaaccatcaaacaaatccaggtagaagagaaaagtatgttgctcattgaacaatatcaatcaatagagataaagaacatatgcaagaaaaagcctaaacacaaagatgaccagaatttctatctgaagaatcgagcattgcatcacattcaattaaagcagaagaagtacaaaaaaaaaatgttaatggccctgcatatccaacatctcatcaagtcctttgattctctctaaaccttcactaatcagataccgaatcttttgtttgtcattgcagtctctgttcttttccatctcttgcctaacagtctgtttcagttcccctacaaaacatcaacacataaaatcaaacaaagtttatcctccgaaatctactaaacccctagatttcgagatttttaatcaaatggatgtacggtgaacgcaaatttattgtctatgtgacgaatctcatagatagaaaaataagagacatgaaagacacgaacctctaacatgaacaggagctctgtgagctatcttcaatgcttgtcggtaaagtttaagcactcgagcccggagaataaagctctgcagatctaattgaaccataatttatcaaccaaccgttgaattaagaatttacggccagagaaggatcgattcagaaagaactgaaatcaaaatcgaaatctagggtaagagagaagttcctgactctgagtcctgagttaaaagaaaaaagatcggagaaggaaagagtcacgtgagaaggacatgatgaagaattaatgaaaatatgtggtttaagtgtaaaccggtaatcggtgttaattgaaatcaaattatagtttaccaaccatctttaataacagttctgttttagatggtcctaattacggaagcccatccgaaccatcgtggtttaacttacagcaaacagataccaaaattaattaggtagctttgaataaatattaggtggtttagcatcgtgtttccataatatgattttctcagtgtacagcttcgcaatttctcaattgtttttggtccattttcgtttatttaaaatcgtttactagagttgttcgtcccttggttgactaatattctaccttttttttttaatttctttgaagcacgaaattgtaaacacaagatatcaataatttagacaaggtctcagtaatttaatatagactacgtaggatttaaaatatagtttcgataattaaaagacaatcatttaccaaaacgtgttactgaatgatttgtgttaatattattatcagaattcaaacatgcaagtatatgaagaagaagtatgtttatcgattgaaatacattgtattttttttctctctcttaggtgtttcaattacagaactttaaatgctaattaacaaaaaagtaaaatttcataaagctccaactagttcaatgcatcgttgataagttctaacttctaccttccttccgatatggctgaattttgcttgcatgtaggtcccaaatatcaccaccgtttcttaaagaaatgttatactattttgatttttggactattgaggcacaaactaaagtcaaattagtaattaactaatcatcatctttggaaaataaaaaaatgtgccgtttagcttttaggtagtagtaacaaaaagaagaaacttgaaacaaaaacaaacatgtcttccgcattttgattttataaagtcggccgtataaacacaaaggtctttcttcttcctttttagctctcacatttgaccaaaactcctccaatccaggcatcatcgttgactttttcaaactcatttcctctctttttccttcttctcacatcatattagacccaaacataaaaagaacgaagaatcctctgttcttgtctgcgaattttgctgttgtgatcagcgatggacattaagcatcatacttcaacttcaaaacctaagaacaagaacaagcttttgaagatgcttcctaaagcgatgtcgtttggacatcgagttccaccgtttagtcccggaagagatctccaccacaacaaccaccataattacacggcggctaacaaaatgtttttctctggtcctatggttcctttggtacctaacgcggctcgggttagaagaaacaaaagcgacgctgtttgggacgaacctacttcacctaaagtctcttgtatcggtcagatcaagcttggtaagtctaaatgcccaaccggtaaaaagaacaaagcaccttcatctctgattcctaaaatctccaaaacgtcaacgtcgtctttaacaaaagaagatgaaaaaggtcgtctttcgaagatcaagagtatcttctcgttctcgccggcgagtggacgaaacacatcaagaaaatcccatcctaccgccgtctccgccgcggatgaacatccagttacggtggtttccaccgcggcggtgccttcgttaggtcagatgaagaaattcgctagcagtcgtgatgctttaggtgattttgattgggcggttgagatgaaacatgaagaagaatcacccgctgatcatcaccgtggttactattctgacgacgacaccagaggagcttacttgagatacgatgatgacgaggatgaagatgacataataatccctttttcagctcctttagggttaaaaccaaagaaagaagttaacttgtggaagagaagaaccatggatccaccaaaaccacttcatcttcaaaccatttgattaaatttctttctttcagtatactatatcaattactgcagttcaaattgtataatgatcatcattcacaatgagtctggattttcttgttttgtgtatatatgtgatatattgtgatgatggatgatgatcgttcacttcaatagtcttttgtgaatatcaattttgctccgtccaaaaaaaaaaaaaaaaaactctttctcgctacatatttacagttacaattacaaattagtttttgtatttccttctgtgacagagagtatgacaacaaccaatgtctttccaccaccaaattgtccatatattaaatgtaaatcacaatcaaccattaatatcacatacaaaatgatgataatgtgtatatatttattgggaataatacaatatcttcattgggtaggtacaaatcattaacatctcattcttccttacggaaatattcaaatccgtcaaagtttccgtgccttcaaagttagaacacaaaagcaaaatcaaataatcaagaatcacactattttgagttttttttctttcatatcaaccggtttcggatggtacagacaaagaccaaaaactcattcttttttgaagtgagatgtaataaaattaaagttttgatacaaattaataagtgacacgaacgcctgagtaccgaagaatctctccaatgagttctcctttaccggaaccaacataacggccacgaatctcgccgtctctaatgaacaagaaagttggaacttcgataacattcatgtccttgagaaactccatacaactatcgttctcgtcaccgttcattctagcgaatacgactgtctcggacattgaccgggacagtttcagcacggtcggatacactttaacgcaaggaccacaatgttttagaccaacgtcaagcacgatcagcttgcctccagtgcgattctcgtcgatcagcttttccacgtcaggtcggccgtgcagctgcaccaccgcagagtggttgtctccgtagtatagaacgtctcccattaactggtccggttcaatacctgtcgatggtcaaacttttcaatttagttacgtctttgccactacattactttactaatttactaggtgacttattatgcttcatatacttttaaatggttagtgttacaacatcaaaataacaatattatgtacctaaagaaataatcatcgtacatcgtaatcagctaataaacgtgtgtccaaaaatctgctaaaatctaggtgattttgagagattctgttaaaagtttccttacttagagaaatttgttcaacaaattaggggcattatcggttaagtaaagtctaattccaatatgttttatttactttctagattaaatcgagttctctttttaatgagaaaagaaattagagataattcggaaattaccttcttcctcgtgtattttctccatgctcttataaaagctaaagtgaggaactttctcaatcttctctctccgacagagttctctggtcttgtcagattcatcacccatgacgagcaagaaaacgacgtcgttacaggtcctgctcagttccaccataaacggatatatcttattactctgatcactcttactcgtagcaaactctgcaaccacgagtttgctcttcgcatttttcaacgctacgtcgaattcctctccgctgtgaatcttttgtaccttctcgtcattcgccggtggtgtacccacctttcccggagacgccgctccagcctttattttcacggcggagaataatcttttcgggaggtttttcctccggaacagaggattagttttatggttaaagaatacgaaggaggaggtcgaagcaacggcggaggatggccgtgggactacggtggagattggtttggctaagaagttagcgacggtggccattgtttgtggtagtgtgtgtgggattggttagagatcagtgaatgatttaatgtggatagatgttttaaaatgggtccaagacttttatgtccacttgtttaacttgtgtggattgtgttcactgttgattagatttttttcgtgggaatataaaaggaatatgtgaacttggtgagattgctgtttctaaaagcaattcaagtttattttgttcaagttgttgtcattctggaaaattccaccagcatccaagtaagactaattgaaccggttggataaattcgacattgtggtttcttttccatctggtaagcggaaaatgtatcggccaaaagaaaacaaaagattgcgtcagctctcatagtttggacaattttctcagcttcgacccaaattgtccattgacttacacatgtatacgcgtattattgttgatgtcacgtacgaatataagcatatatccactcccggtggaactggaagtgaggtaaaccaataaaaattggccttaagcccatcattataaaagcccactatagaaatgacccagtgttttagtaaacttttacacacaaatgacacaatctttttagtaatgcacaaaacaaattggaaaaaaaaaaactaaataactaaataaaatatcgttttctaaggtaagccggagttcgtgcgaccacgctgctacccactaccgcaatgcgacaaaccataagcctaaaataaatcaaaatcaaatctttaaaagatacatagattaatatatcagacagttgacgacaataacatatgcatatcggacagcccacaaaatcccacacgaccactcccgactcactactacagacacaatgtgacacctaaggacttaccaaactaccctcattgatgatactaaaagtttatgcaactctatagacgtgctaatccggtttattccgagtttgatcttagaaattaaaactaaacagagacttgtaaactctacaaaattttaaaaaggtaaaggatcactccaatagaatttcccggctaattctttcagaaactatttaagaagagcgaaaaactaatttccagtgatccatcatcaatttaaacaaatcaaattgaaaaaaaaaaatacaataaacaacaaagtgataacattaatacgacgacaaagagattcttaaggggcaaaacatgaacttagaaagaaagaagaagaaaaacgagaacaaggaagaagattctcaatcattcattcagaagctttctctggttttctacagagaatcatatgcatcggagagaagattccagtctcaccacctctggtcaaataatcagcagtcttaaacaacatcttatgaacatcaacagttcctttaggagcaaccccaatagcagaaagaatcacaaccacaacatggtttctccaataagcaatccttcccatctttaaccggttccaccacggtttagacggtggtttagccaaatctttctccttcactacctcaaacccaactttcttcgccgtcacggctatatcagcgtagcttcttagtccaggaagtgcgtctcctctctcgatcccttgaatcacgtccttgtgttcttcgtcatcgtctctgtatttttcagtggtgacccattcgtaggacacgaacaaagatcctggtttcatcactctgaagatctccgagtatacttcttcgagcttaggagcgtgacacgtagcttcgatcgagtaagctccgtcaaacgtgttttcatcgaacggcatctttaaaaagttaccacaaacgacgttgcagagagaatcaagtccagctttcttgttgtgaagcttggctcgttgcacttggtactcgttgatagtgattccagtgacttgggccttggaatgggccgcgatggctctcatcggcccacccacgccgcaaccagcgtcaagaatcttttgtcccggtttcactttgatgagatcgacggccatttcttcgtggattcttgtggcgtctttgtcggattttccagggacatgaggagagaaatggaaagattgtccccatccccactcgtagatatcagtgacaagattgtagaacgtgtcgacgaagtcaggtactttctcggctgattcgatctcttttggtttgcggaagaaagaccagtattggttatagttgtctttgactttttctgcggagattgagccgccggagagatcagaggctcgtttgccttttcgttctgctggacctaggacgcatatgaaccagtagacggcgccggcaatgagaccagcggtgcagtagagagccaccgagtccattttttcacagggagaaagagagaagcagaggaatagagagagacgttaagttcacgactctgtatttgtgaaggattaatggtttttatttacaaaggtgtattgtgggaataatccagtttagaatcttgcaattaaataatcctttttaggaagtaaattaacagtaattttatggtccacactactgcctatagaaagaaattatattaaaataaataaaatcacctaaaatggtttgtgattgaaatattgttttaaaaactttagtagatcttttgactcttgttattcaatcaaaactttattaatttctgttaaaatgtattattagtttttgatttgtaaattaaaagtcttttaaaattttcataaatctgattttattagaatcaaaatttaataaagtcaataaattttttgtgttgtttaattaaaaaaaatgtatgattgttaatgaattaaactattgtgttattagtttataattttatacatttttcttcacaaaataaaatcatgaaaaaatcatcaaatagatatattgtttgagaaacttcactaaattatagaataactaataacaagattataaaaactctttagcacttgtttataatttatttactttctatgattttagtaaaggcatcaaaattacttttaaattataatccaataacaccttgtaacatcacaatttttcttgcgtttatatttgttttctcaaatcagttatcacaatgaaaaactacaattatttatagatccagatctacatgagtacatgtgaatataaatgccatgagatcattattttgcgatcttgaactcatatatctgagatgtttttctttttgtgatatccttaataagttctacaagcatttcactctttccacgttgtagggtcaggccagctccttataatatattttttatgtgaaagtcacctaacattttttcatatactgtaatcgtatgtatctctcgctctccgtacgacttcagatttgttttcatagaattgagactgtgtagtataacattgaatcatgaattaaggaaaaatatagccaatgaaatgtttgaaggcttgaagctctcggtccgggtataagtccgtgacgttgattttttgttatggtctcgaatgcgttaggttaggtagatacttttcttgatacgaattaacctatatcctaatgataaaactctgattaccaagaaaaaaagacactacaatcgttacacttttgtccaggatccgtgagctcatttaataactattaattagctggtccttggggtatccaattattgtttaaattaaaattttgttttttggtaaattggtcgtatcacatgcatgactcatatgatcgtatcacatgtctacgatgtgttagcaatctgtctctatgttaacacgaatcttgatcactccatattacagcttgtttttataacatcactcacgtgatctatttgctcacacgacataattaatgtgtgagtgaggacaaattcgttatagattggtccaattttatcgtattttatgaacccgatatataatttactctaataattccaactgtagaccataatgcacatacgacaatccatctccagctgttatattcgaagaaactatttttgaagcttgtcgaaatcatgatttatacattttaaacattatatataactgatatacacacagataagagagatgaaaccttcaaatatgttaataatcactttgtgcttttctctagaacacaaaatgtgacaactgtttgagagctttttcttcgcattaccaatgtaaactattcatattaattaattcagaattgcaactagacttgtcaagatatgggaatcatattcaacgtggaactctctacgagaaagagagtctcggttacatatcagctatatatgagtgtgctgatctgtgttatttgtctctttccctgttccttcagcaaaagatcaaatcaaaccaggcgaccgaaatagacatttttccctgcctgacccttggtaatggatccatgatccgtcttcatttttgctatttaaaatcaataatgatttcatcacgtgatattctctctttctcgtgatttgttaatgcaatttttttgggtgggtcagtagtggttgcgtaagcacctagctaaacctgtttcctatatttccccaaaaaacatgagtcgttaggcccaatttgtgatatataggcgtgctgggcctctaaaagactcaaacgttgggaccaaagtaaggcaagtaaacccaacgcagatacacctaaaacaaactttattcaaactaaaagctctttacacggacacagagaaaggttatcggattgtatgaccgtgacttaaaatgtacaaaagagccactgaaaccagtaacttatgatagtaaacattatatgatcctctttatcaatccaacattctcttccaaattagatttataaatcatgaatatgtaagctcctacacgaacaagagaatatctagacaatttacttgacggtgagtttcccaaccataccagcaccctggtgcggcgcacaatagaaaccgtaagagcctggctctgtcaaagtaacctcgtaagtctcccctgcaccatttagaagcgctgtctcatccatcgagatcttgcttgcgtccacaccactagggatctcgtcttcgtcgaacaccacgttatgtgggaaccctgcgttgttcttgaacacgatcttctctcctttagccaccgtgaattcagatggtacgaaagcaagggaaccgtcgtcggatcctaaaagaacctccatggccatcgcatttccagctaaaacgatcgaagctgctgttgccactgcgatgacaccgaaatccttcaaagaggacttcaaagcgagcttaggtggcgccctggtggcggaagtggatctactgatggtggataatgtcttaggttttgagctgacggcgagctttaggccggtgaaagaagggatggtgacggtagctgatgtaattgcggccattttctttactttttggggtgttttgttgatcacttgtaaagaaatgaaaacattatgggatttttgataagatttgaagagaaaataaagcgagagagttatctgcatgtgattggttaccctagatgttttgtgaggtgacgtggcattgtttgatagctttgtctaacgttgcataagtagataaggagactttgaacattccaagttttcattagtatttcttgttcttgtggtatttatattacttagttactaaccaacgaatcgaatgctaaattgctaatataacctaaacctcttttttaacatgcaacataaacctcttgtttaacaggaaaggtttacgaaaaaggattaatacattagaacatctaaaattcttaaataaataaagactcttcaagtttggcaagtctagcctctcactgagcctagttaagcaagcatggacaactacaataagctagaaaataaaagaaacggcgaggcgtccaatcttaaaagagagaaacgacctacaacaaaacgacttgccgttttaactaaatcacctaaaaagccttgccgtttgtcatgtcaccatccctaagtctcaacgtttctctgtactcattcaactccctctgatacctttccttatccttcaatccaatgtcttgataaacctacaagcaataaccaaaactcggttcagttatcgatttactacaaatctaatttcatcactaaatcggtaacggtttaaaagataatttgttaccattcgttcttcggtagagagattgctccacgattctccgataagtttcgtaaactctctctccttgttgggataaagtgatttgagcttgcaatgtttctcagcaaagaagaaattgtaaccgctccggttcggtttcgggtaattcggatcttctctgcgtctgcttcttcgtcttttacctaaacgacgccgtctcctcccagtttcaacataaggtacaacggcattgtttagaacagcggttggagatgatgatgggccgggctgggccgaatgataaagaacgccgttaagaatctctgagcccaacttaacttttaccagataaccacaatcgaatttgccttctattgtacctatggctgtgaaactcgacgaacctgtgccatgtattaaatatcacatgtataatcataagcaaacctagatacattatcttataaaaaatttctatgtgaaccaaatcttatagctactggtctggtccacgtcatcggtttattatccaacaaaatccaaatagatttgcatcaaacataatgacagtgggaccattatgattctacactatatttgaaaagtattgcgataaacactaaggtttttatgataagtacataaagctaactagacaattatcatacgaaattaaactgtgcccctaaatataagtttcacatatacataatcattaactaagaccttaatcattttttgtcataaaatgatgatataaagcatagaacaaagacaagtatatactagatattgataatacgtacgaaccttgagaaggaggatgagtattatgatatcttatactcggaggagtatattcgacgagcgccatttctttgctcgttgagggatttgcatgaaatgtagctgcaaaaattgattatcttatatgtaacataaataatcgtcgctaaataacttatagttccaagacataaacaaaattacaataaccatatagatagaaatgatgacaataattcgggtatatacaatcgttgaactcccacgtttgtagtaagaatgtgtcccacgattgaacccatgacttcacataattgaaaagttattcttattattttattatagattcaagcctttcagactatcgttaatgagtaacaacgaattgaactttctagtcctagggcattaaagacaatatgggaaccatcttatgattcattgattagcatttatcaaacggttgaattaaagattctcaacagaaacaaatctatgataattgaagaatataatgaaatgtatactatatatatttaaaagtaatcaattgaagaaggtttgagaaaaaaaaacaaacctatgggatgaagaagaggaccacgagcagtgaagagatgaacttgttcgtaatggaagagaagattgagataatgtttccttaagacaaacgaagcacttgttgttgtcgcagagaatctaaacactcctccaacttccctccattttttctctacgactacctatcaattcaacatgcattttcaaaacaacacaacatataagaaacgataataaattaccataaagtaaaaaaatatctgtattgaaaaagaaaacaaaaagtgttgaccttttcgtaacctcccctcctcgtgacttccacatacaaaacatgcaaatctagttcttttcctccaatcacaggaatccttgtttatatcacacaaaaataataaaataagatagatgaaatgacgaaaactaaatttattaagtaagaagaagagaaagaataatggttacatgaacttagtggacataattgagtgaaaccgcctgagagtatcccagaagacagaagaatccttgacgacaacttcatgtaaagccaatggttctggatactctttaatcttcgccggcgaagtcgccatcatttctaccgtcgcttgagacggtgtcgattcgttgtccgatgacatcgctatagagagacttttagtagagacagatatcttttttttgttggggagtttttttttttttgtctggtctctcttttttgggttttggtttaaggaaagaagagaaagataacgattcaagataagatttgtgattaaatcagagagatatagagatagaaaattaaattatttatttttgctacggatttaaaagtaacggacgtgaggatttgtcattttctttctttttgtgagttttaatacataccacatagatataaggaaatttaaaattttaaactttataattgtgtatatatttgctttcaaattattgtttttattttcgaggcgttttgagtgatgttgctttgtaatttttctgatactactaatactgtattaattactttttcactgtattaattaaaaagtaattattgcaccccacctactttagtttttatgcttacgagcagtcgaaatatggtcacatctatttctttccaacataatcaatcattattttatttttgaaatttcttaagtctaatttatatgaaaacatcgataatatctaaaaatcggactgtcttgctttttttctttaccggtttagcatattagattctttcacttttattttagtgttatatatatagtgagtattcaaaaaataagagcgaaagtgaagaatttgtaacacgatctatgcactttatacactaatgatacttgacaatttttaggtgaggaatttaaaactcgtacgatctttatatatcaaagtttttgggcattgaaaaacctctgaaaattaaaaatatgtcactgttgagtattgacatgcattggtaagcgaaagttaaagtagtacttattagtgcagacggagataggagtcacaccctaaaactcattgggtcaatcgaagtctgacattttatttaccctaaataacaattaaaatagtaaaaatgacaagaaaattaaatagaaaaagttatgggccttatgcttcggagaggttgacgtgcgattagggattttatatatggttctgctcatatgtaacgtcacgtccctctgcctgtagattcggttccacgtttcttccttataatcattttttaccgattcttattcgataaacatttgttcaaataagattcttctctcttccataaataaagaaaatcttttatatgacgacgacgttggaggataacaaatcaattcattagtgtcaccttacaacacaaaaatatactaatttgattaaaaagttacaaaaatggtgggattaaccaacaataacaaaaacaatgtcaaaatcttcaaactaagcttccatcattttgcttagagactatgacttgctctttcatcaattttcttatgaacaagaacttggtctgtgttttgtccacagctgccaaagtttaggtctggatagtttctatagttcaaggaatgtaaccaaagagccatatttccgtattttcgctctgtagcgccgatatgagaatagatatgcttcaatttgaatgcttcagcttcttctttgtatgcttccatggacacttcttcatgactgtcttcaaagtttctgttataagacgtgaagaagcattcgtccagataaagtccaacttctggcgccattggtacagttatattcacatccctggttacataatttccgaactgagtatcaaaacaaacaaaactatagacattgcaaagcttcaaaaccaaagaaaaaggagaagcttacttgctgaaagcactttggataagtgattcagaagcacaattccgcatgattgcaacagcaagacccatcatcttccgaatctgatgaagcataaagcttttgcctaagacttcacacttgataaagtcaatcccatcaagattaatcacagtattagcagtgaaggagatgatttgacgattcgcagtcggatcatctgcttttgttcttgtagtgaagttatggaaattatatgatccaacataacaacttagtattctactgaacctttccttttccttttcaccataacaaaacttgctctttaccttagtctctgatgaatttgtattcaatttacaactgtcttcttgtatcctacctacttcaacatctactgagcataagccagctaaattagaactcaaagcttcaatcttgatgtcacttcttaatgcactagagttgttcgacgaaatgtctgactgaaaatccaatgatttagtcccaaagttggtacctttccatttacccacaagacctggaggaatcttacgacctctctctgagcactcaaagcacttaacatattcctctcccggacccaaactagccattactgtttctctatcacgatgcgagattggatcaagagcaaacactggaagcagatacacataccttcttcgatcgcaaaacttcttggagctaaacgacggcgttacatgcttgtaaccgaagattctaatctgattagggagatttgaattgagacgattcacgaatccaagtggatcaacgataaagcgacctgaaactacttgtccaacagcactaactcctttatctgtccgtgcagatcgtgcgaaatcgtatagttttggcttgcctctaatggactccggtacagctccggcatgaaacaaagcttcttcgagctcgccttcaatggttttcgcgccgggattcttttgcattccttggtatcctacaccacaaaacgcgaagattatagcaactttttgaggctccgtgacacctccgtcgcaggacaagtctatttcctcatcggtggtagttgtcaacatattgagctacttctgatctgattctcaatcaggaacctcgaaccgggggaaatctctcggttttcaaactcctgagcctccattatagtaacaagagttcatcgaactctctattttccagctttcctctgcaacaacgttaatggctaccgcacaaaagtcgaaacccttgaagacgactgaggtatgcttctctacgacggcgtttttgatatcagaccgctctttaactgggcctataattttgttttatatatgggcttattagtctcaagcccaaatgtttctcttataattcaagtcaaatttgaaaaagtcaactatatccattgagcacacatctttggaaatacagtctgttctagtgggcaaaagaaagagagaaaattatagccgttctaattgtatcaaagtatgaaactttcaaatctccttgaggtataggcgttgttgtcttgctgatggtacacgcgtcgtatgaaaaagcgtacacaaatcttatttcaattgaagttatcgactttattctaacagtcaacgcgtgtctagatttttcttcaggtggacgaagaagaaaaaaaaaaactactttggcaaattatgaatcttcgtttctcgattgagttttaaaaccctaaaaattcaaaagagagaaaaaaagacatagcttttaatctctgagattctctgctcaagttgtttacagctttctactttttgaagaaggtattgtattctataattggctcatctcttgatgaataccgtagaatcgaatcgacactttgtgtttgtgggtatagtccaatttgctcttttaattcttcttcttcattgtaacatttataaaaggtttgttttttgtgtggccgaaagttgtttgacatttgattctgattcgtttgggatcagaaactgtttaatcacttcacgttctctcttcggctctatatatatatatgtaggattgtttctttaagggacttgtgtgatttagcttcttcgtttccttggtatttgatcttcttttatgtgtgtgatcttgttaaacagaattttggttagcctataatcaatctcaaattggaaacagaattttgtttttgtttcatttatctgtcatgaaacaaatgttgctcttcactgatttttttatcttagtggaaatgtttggaatttaggatcttttgatttattagtttgctgcttcagaacacatactggtttgtgtctcaatacgcttattacttattgttttggatctctctgaaatggtatcattctgtatgcaggtaatcgttctgttttttcgttgattactgtttgaggttttcattgaatcttgtctcgacatgggctactataacaatgtaagtgccttctgttttcttttttcccctagaacttttttttggatatttttgtcatctttctttgttctaaagcatgatactattgcaggtctttgatgaatgcaacgaccaaactgatatcggtaataacaaagcctttaatataggattaagccttgttcatgattcttttgtttcttagtttcaaagctgaactattaactccattgcttatctatatcaggtcgggttatacgcgatggaagggaagtcattctccaagtaagctcatctgtctttttatagtgtaacacttatagtttatagttgttcaattgtggtttgatccttgtcttttttatcaggcatataattgggaatctcataaatatgattggtggagaaacttggatggtaaagttcctgacatcgcgaaatccggctttacttctgcatggttgccaccaccatctcagtctcttgcaccggaaggttagaggaaactgattcctagacataatgagcctttgtacagtttgagttttgaaaacgaataaccattactaactgcagaaacgttgttactatatcatttcaggttatcttccacaggacctttattcactaaactcagcatatggctctgagcatctattgaaatccttactgcgcaagatgaaacaatacaaagttagagctatggctgatatagtcatcaatcatcgtgttgggacaactagaggacatggtggaatgtataaccgttatgatggaatttcattaccgtgggatgaacacgccgtgacttcttgtaccggaggactggtgagtgatgatgattaaattacatcttttgacatatcattacgttcttagagactctaaaggaaaagttttctactataacagggtaaccgaagcacaggggataatttcaatggagttccaaatgttgatcacactcagcattttgttaggaaagatataattggatggcttcgttggttacgcaacaccgtcgggtttcaagatttccgttttgactttgctagggggtaagttttaggcttttcgcttaggtgacttgtttatttgcttgtggagtcctcaatctgtaacatttgaatgtaaccgatgcagttattcagcaaactatgtgaaggaatacattggcgcagcgaaaccattattctcggttggagaatgttgggattcttgcaattacaatggccatggtctagactataatcaaggtttccttgcgtttcttcatcttatagcgtatgacatgtatgactagtgagtctagttccatgattctagtgttatgtaactatgacacttgttttttctacagatagccatagacagcgtataatcagttggatcgatgcgacgggacagatctctgctgcatttgacttcacaactaaaggaattctgcaggtaagtagattcttcaagacctctaaaattcattgagttttgcttacataatcccaccattgtattgaaacacaaatgcttcttgttacaacaggaagccgtaaagggtcagtattggcgtttatgtgatgcccaagggaagccaccgggtgtaatgggatggtggccttcaagagctgtcacattccttgataaccatgacactggctctactcaggttacttaacaattacttctgtaatcattttcttttagccttcatatgtttgcttaccttttttgttgctctcataggctcattggccgttcccttcacaccacgttatggaggtaaagtagctctctaaacaaaagtctgtccatttacttgcattttaagtctctccctaatcgaagaagatcggttttgtgtttttgtagggctatgcatatatacttactcatcccggcattccctgtgtgttctacgatcacttttacgattggggaagctcaatacatgatcagattgtcaaactggtattctgttcaatctctgcttatcattggaccatcatccatggtccaaaattttcgatctcttctaagacctgtcctctgtgttttttctttgttattattcattgacagattgacattaggaggcgacaagatatccacagtaggtcaactgtccgtgttttaaaagcagaatctaacttatatgcagccattgttggtgagaaaatatgtatgaagcttggagacggctcttggtgcccttctggtagagactggactctagcaacaagtggccatcgctatgccgtctggcacaagtaattcttttgtgtctatctagctttgagtccaaagaaaaatatatgtaattcattttctgtaccgggttttactataatgtcatgcccttacgtcttcatgacgtaagattttataagttatatttatgaatgtaaaatttgcatctttcgtgtgaatgttttgttaacatatcataaaaaaaaagtggatgactagtgagaaagagtaatggagactataggaaaaaagggttttgtgcttttccatgagaagtaagttgacttgtgctgtgtttcaaaagttaagtattcaggttacaagataaaaccatataggattttaaaatggtttgtacaaagcagatgataatggacttgctagggtttgttggtctatgaaactcaagttaagctattattccttggtcaaaagactcaaaaaccatatattcgtcctaaaggatacatgaggaaattaaaaaatacgtgaggtattattggtggccactagagtaggactagacgagcagagagatctttataaagtagatgatgtgttttgtgtatattatatggtcataagactacatgattcttgttttgaaaactcaacaacaaaagcccaataccctttttttactaacacagtcttttaatgctgttttaatccttatataaattttgttgggaactgcataaagaaacaaaatcgaatcaatcatgaacaccttctggcttcacgtgaacatgctgtgctaaaaagatcttctgttcatagaaggtctcctagatctttccacttttaaaattatactattgtagtcttctgaattttttaatggtcatggcgctacaagatgcattgctaattggatatcggaaactggtacatattcagttttcacaacttcttgttgtagctttcaaaacaaacccacggagaatataagtgcagaccgtacgtaatagactatatagaacataaatgtccaaaactccaaatataaagaaaattaataatgatctcataagaaattaatacagttattaatcaggagaaaatggaggtgatgatgagcttgagggagagagaatgtcccgcatgcaatattgcataagattaaaaaaaaaaaaaaaaaaaaggaaaaagcgaatggaaaaaacttgaacaaaactgtgattaggattttctggggttaactctgtctccgctgactcttttttcacaatttaccagtgttgagattttaagccacactataataattacagatcttactaatttaacgtcccattcttgtttcaaaattccaaatccaaaaaaagaagaagatggaacgtagcacattgttactttcttttttttgtcaacagtatcacattgcgtttttgttttgtcttgacttagcctatatattccaaaaaacaaatcttgcaaaaatttctacagttatatagtcaagataaatttgtcttctttattgttttctaaaaataccgtatttttttgtatttcaatatttttgtacaatttttttatataaaaaaaaaaatattacttcaatttactattctaatgcaagtaaagtccgatatttgtagggcgtttgagtcgtcttcattgatgcgttcggttcgtctataatggtacattttccataacaaatataaccgcattgacaaatatagagttctggttaaaaatatattgtagtatatatatcacgaagaacatataactaaaacaaaagttatagggggaggaatgattatttctgaaaattactgatacgacactaacaaagcaaagatgtgttgtgttatgtgtgtatatatatatcgacggttgctcctctttctgtataaagtcgctactcgcaattatagtttaccaactatccctgcatttctttttttacttttggtgcctttttttgaaacctctgcatagtttaattagagaaaatacatttgaaagtacatcattttgttaaatacatatgaaaatggtttttacgccatgttatatataacggaattcgatacaagtttaggcaatcatgcgggtggggtaaaaagcatttgtccatgcatcgagctctgcgttaaacgaatgatctaaacatgctcctccactatttttctaaattcaaatccatgtcatcaccaaacaaattaaaagcgatagatatagttatatatatacaatttataagtgattctcgtttgaatttttttagatattatgttattcatttttttttttttttttttgaacacatgttattcattataatgaaataattaaccttcagaaagataaaaaagaaagaaaaatattttaactaaaaagaaatgaaaatgtccggaagatagaatgcacatcaaaaagcctttctaaaagcgaaccaaattaaaagtgttgacatttttacagtcgagtactcattttcatgcctcaaatctgaaatcgtaataatatggcatgaataacattttttcaataattctgtgtatcatgtatggacggcattgcaaaataccgccatagtttggcattacgtcaataaagaaaatccgatatctactcatatgtttgtgtatatatacatcttctcttataacctttttaaaacataccaagacatgtgtataaatcgatagcatggtgatgttctggaaagtaaaatttaagccatttcttaaatgactcaatcataccactgacattttcactatgcgacaaacccatcgttttattattattctcatagtcaataacaataaattaaatttagactttaccaaaaaaaaaggatttagactaaaaatcaagttagataaatcgcgtgttctttattttttgccagtaaatatccaattgaacaaaaaaaaaacagtatgtgcacacacaaaacaaaagaaccaaaaaacagtaaatacgaaaccggttgttctagcacatcttcttcaataaaagtgtgttataagctagactccatttgttttcattttctggcataatatatgtttgaaagcaatgttgtacaaaaaatatatcattgaccttaataaatcagacaaaattaaatctggatacttatcattttacctttagaaagctaacaaaattaaggctaatttttctttgaagtgtaagaatttaatggatagaaagttagatgggggtggtagattttgaggcaataaattgtggggagaattatgagttgttccaattaatgcaagcaaggcatgcatttgttttctcatccactactaataataagtccatttttttgttggagtttgttccgttttataagaaaacgtaaatacgtgcacaaaaaaaaaaaaaaaacgtaaatactaccactgaatcaaatcacaaaaaaaaaggtaagagtatgtcaaaacaaattgtcacaaagaataaatgagactttgcaggttgtgggagtgatgagtgcgacctatcagtcgacagaagggaaatatgattctattatatattataaaatgaggttatttcatttgtattttctcgtcatttaaagtaagaaaacataaaaagctgggattgaccttattcttgaatgtgtatcatggttaaatactaagtcaaaagcttaacattttcttcattataaaatttgtgttatttacatgagccttggattctgcaatccactccatggtggagtttaaatggacccatcaattggaagttgcctcacacgaactgaagtcagaaattgttaatttacatgattctcatatacatttaaaacaaatatacctctttacgtattgttatcatgttatgagtgatttagactttagcaaatgttaattctgaataataattttctatcagtaacacagtttcaaaaagtcataacttttacattttattataatatttgcctatgtttagtggaaatgtacaaaatgtctatcttataaaattctctatttgattctattgttatattctacatataaattcatgatatgtgacattttaattttgttgttcaaatctatattttatcctgctgaacaaattgtaatagcgttataactaaaccctataatcaattaaaaaatggtaccgtttaagttgtggcccggaaaaatttttgagaaaaaaggaaaaacgaacggtaggtcgtagaagtaaaagagaaccccgttgaatttccttttgacatttgctaaaacaaataaaatccctagaaattttattgggggtttcgcttatatcattagggactttggaaaagaagaaaattatcgagagagaagaaagattgcgttgcccttttaattcctgttatttacttgttttcccgagaaaaaactctttcagtttctatttttcattgtttcttccacgtttttccaatcttctttcttcactgttttgctgttcatagttgttagatcttatgtcttttcaaatccgaatcttaaactttgatctctcctctcatctgattaaacccatccagcaaaatcccacctctcgagagacgattgttgttcgatcttctcggtagctttgtgacaacagaatctagggtttcgttttttgttttgtttttgtttaattcttttattaaagtcttggttcataaatattcctgctagaaacaacaactgtacatcaccatcattaagagaaacccatctgcctctttctcaatctcataaatattctcaccgttcgcttctctcatctaaatgttctctctgtagcttctctctctctctctatctttttccatcttaaagaaaaccctttttgctccttaaggtgtacctctcgatgttacattcgacagaaaggaaatgagtgatttgtttttggatctttaacctttttgatcatgcgggtttgacaaaagagtctcttacagagatctttggcattctgtccacctcctctctctatatttatgtgtaataagtgtacgtatctacggtgtgtttcgtaagaggaggtgggcatactgccaatagagatctgttagggtttctttgtaaaacccctcatgatttgatatataaagatagtgatcaatatcattcggtgaatactactaagatctaagtttgaagaaaactaggtattatctcgaaactttaaccttttttgttatctgtgactgtgagcgttacttgttcttgattaagtaaaattcatttgaattttgctgtctcctttgatctatctgtcaaactttgatcttgatcaagactaatccgattgatacattcattgtaggaactcatcatctttttaaattgcaacggcgttgacaaatgtgagatttcagagtagtggtggcgtttgagacgtttacatcatctaggaaaggtaaattatttcataaagaaagaggacccattactccctacaaggtacaggtagattgaagtcataggagaatatggtaatgaaaaggagaatttactcttcctttttatgtttgtgaagcccacacagtgttattatgatgtcttgcttttttttttttttaatttgaatctatatactatataggaagagtgagtttttgtttgtttatataggagtatatttgtttctttattatctgatgagttgtgttcaatcctataaatggttcgagaaatatcgagttcaatcttaaaatggagtatttttcttaggcattattatgacgttttcttttgttatagtcggaatgtatacattttctgtatagtcacactcacatgtttctatagatgtatttgatgtaagtgatctaagctcagtattttcaattgaggtatatatatgctgagttattgttgtccttgcgcttattttgatattataggtactttgtttttttctcttacatttatagttacgttatagtcttatagactattcccacatttttgtgtttatttatatcggttgttgactaattaggttttagatggtaccaaaatgatttgcaattctatgtggaaatatgaaagcaaaacaagtttacaatacgacttttgccaagctcttagcattgttacgattattggattctaacgtttttttcttctttaggtaaaatgaggattttaatgttgagaaagtaagcttcggatttatcatgtaatcgtgatgatatgacattcgatgacttggtagatatgtataatcctcgacgtctctgttgtgcatctagcatggtttataggggctcattaaacagggtgtagatttatacatttaccataagtttgaaaaattacaactccacgtcaaagagaaaataaagaaaataataagaattcaacaaaaactttccctagtaacctcatcattggaagtgtgtcagtagcatttaaattatcctttcaaggcaaatctccaaacttttctacgcgatttaactatgcgcgtgactcccaaatttcctttctcgtttattatgtaggtcaaagttgcttttatcttgtaatttttttcttatgttcggtcaattcactaaaactccagtaattatttatctgtagtgtagcgtatgattattattctgcaaactctgcgtaatagagactttttaaaaaacaaatgcagtagtccaaacctactttctagaaagaaaaagaaaaaatgttctttagtttccctcctaaacggtgaaaagtctctttgtcgcaatttgtttacacatatcctgataaaacgagtttattgggctttatgttgggctcgtttattcagcaggtctgaacctcaaaactatattataaagtttaagcccaaaaggctttaaatatggtatcaacaacatatgcttatgctatgcatcattttcgcaaactatggtgttgtatgaattagtgggttgttcaagatgttttttcttaagcgaaaacctatttatacagtttgcaatggatataagcttttgcaaagtctacaaaagtcacatctcaccacaaaaaaaaaaggtctacaaaatcacatgtatctttggaaaagtatccatgcttagatatttcatatttctgatccaattatccaaacaaacatgtcaacagataaaattaaaaaaaaagctaatcttttcaaaatatacaagtcaaactgtcagaatataacaatttagactagttgataaaaatatatttttgaataagaacattttagattaaattttggtaccataaaatgtttgatagaacgacgaaaccattttgacatattaacggcaatctcggggaagaagaagaagcggtagagagaaaaccgatgctcacagcgtttgcaagtcacgcgcgttctcacgttttcgcgtttgttaccgtcccaacaatcacgcgccgcctccgtataaatatcttacgccaatcacctctctcctcttctcttctcctaaacgaaaccttctccaatcgacccaattctgtttctcgtcgttgttattgttcgagctctgcgataatgggttcttcttcggtgtttggcgagcaattacagtatcctgcgactcggcgtgatgattccgtcgtcgatgactatcacggcgtcaagatcggagatccgtaccgttggtaagagttcgtttccagctgcaatttctcttattatgcttttaggtttccggatgagaacgatatttccaaatgagattttgaacacatcgctctgaggaattagcagacattggatttgacttggagattgaccttgagagaaattcctaaattgttcgtgatttcgtgtgatttgttcatttttgctatgatttagcgttgaatttgtcattctggattgttgctaggttagaggatcctgatgctgaagaagtgaaggagtttgtgcagagccaagtgaaattgacagattctgtacttgaaaagtgtgaaacaaaggagaagctccgtcagaatataacgaaacttattgatcatcctcgttacgattcaccattcaggcaaggggataagtacttttacttccataacactggtctacaggctcaaagtgtgctttatatgcaggtatttgttgagataaaggcgtttgtatcagtgcatactctgttctagctttgttttctcattgaatttgattgcattcgggttcaggataatctggatgctgagccagaggttttgcttgatccgaacactcttagtgatgatggaacagtggccttaaacaccttttctgtcagcgaggatgctaagtacttggcctatggtcttagttcaagtggtagcgactgggtgacgattaagctgatgaaaatcgaggataagaaagtggagcctgatactttatcatgggtatggtcttaaagatggtactgactagtggggttgatcaataaagttctaccgtccagatttctgatagatttatgttcctctcgtggaacaggttaagtttaccggcattacatggacgcacgacagtaaaggatttttctatggtcgctacccagctcccaagtaagtacaagatgtgttggaagaagcctttcgatatagttcagaaagctaagttgatttaccaattttatctgtttttgttttgcagagaaggagaggatattgatgctggcactgagactaattctaacctttatcatgagctgtattaccatttcattgggacggatcaatctcaagatatcttatgctggagagataatgagaatcccaaatatatgttcggagctgaagtcactgacgatgggaaggtaacacaccaagttcttatgttggttctttaactatggttacgctcttaaacctcaaatttattttttctgcgcatacttacggaaaatcattttgatcgtttccctttttctaaatgatggtcatgacttcaaactgtgttacctagttttgtagatctggaacttggattcttagttttaggtctaatcaatgttatttcttcttgtagtatctgatcatgagcattggagagagttgtgaccctgtcaacaaattatactactgcgatatgacttcattgtcaggaggtcttgagagtttcagaggaagcagcagttttcttccattcattaagcttgttgacacatttgacgcgcaatatagtgttatctcaaatgatgagactctgtttactttcttgacgaataaagatgcccctaagtacaaattagtccgggttgatctaaaggaaccaaacagctggactgatgttgttgaagaacacgaaaaggatgtcttagcatcagcttgtgctgtcaatgggaatcacctggtcgcatgctacatgagcgatgtaaagcatattctgcaaattagggacttgaaatctggttcattgcttcaccaattacctctagatattggttcagtatctgatgtttctgctcggcgcaaggacaatacctttttctttagctttactagctttctcactcctggtgtgatttacaagtgtgacttagccaatgaatctccagaagttaaggtattccgggaggttactgtacccggatttgacagggaagcatttcaagccattcaggtaacacactctcttgtagcgtcttcctgtttctttcataactactttttactttgcatatgttaaagtggtttctgctcctctttataggtcttctatcccagcaaggatggaacaaagatacctatgtttattgtggcgaaaaaggatattaagcttgatggatcacacccatgtttgctctatgcatatggtgggtttaacataagcataacaccgtctttcagtgccagccgtattgtgcttagcaagcatctcggtgttgttttctgctttgcaaacattcggggtggtggggagtatggtgaggaatggcacaaagcaggttcacttgccaaaaagcagaactgtttcgatgactttatctctggggcagagtatctcgtgtccgctggttatacacaaccgagcaagctgtgtattgaaggtggcagcaatggtggactccttgtcggtgcttgcataaatcaggcaagtttatatagccaataattcaggacaaaaacgaataatatgaagctaataatttgtaattttcgtctcatttagttgccacacttatacataaattttcaattctgctgcacagagaccggacctttatggttgtgctttggctcatgtgggcgtcatggacatgctacggtttcacaaattcactataggtgagtgagttcagttatctgcaatttgttttgtttgattttttgcttaatgtaattctaacttgaggtgttatgtatgtataggtcatgcctggacatctgattatggttgctctgagaatgaagaggagtttcattggctgataaagtaagtatatgaacttatgatatgatgttgtattgatttgtttcccaatgctgatacaaagttacaatctgggtgtgaatgtataaaggtactcgcctctgcacaatgtgaagaggccatgggagcaacaaaccgatcacttagttcagtatccatcaactatgctactgactgctgatcacgatgacagagttgtgccacttcactctttgaagttgcttgctgtccgtttccagactttatttctttaatgtttaatttattttcaatcttaccttaaatagccagcagattgttaaaactcgtatgtatacatctgcagacgttgcagcacgtgctgtgcacaagcttagacaatagtcctcagatgaaccccataattggtcgtattgaagtcaaggctggccatggtgctggtcgcccaacccaaaagatggtaatgattttagaaattctcgttgcttaagcgttacatcatataacatacattttcccatggttaactgatattgagatgttcaacagattgatgaagcggctgatcggtattcgttcatggcaaagatggtgaatgcttcatggacggagtaaaaaaaattcctttatctacaggcaccaaatatcttttctcaatatcttctgtccaaacaaggacgttgtatgagttagtgacaattacatgtaaacacatgtttcagttttttctcaggctttatgttccagttcattgacacccaaaaaggattttcttcaatgcattttgcttcatccggcatgtgcattttgcgtcactcaacatttattacaacagtaacacgatacaactaaccatttcagtaaattgtgaccgtcatcaaagagtgtttattgatggctcaatggctcattacgccaagcaaacatcaagagtcttctgacatgtttattacctttgcaatattatgacagcccaatatatctaaggacctaacattctaaagtgacgaagataacccacgaatatcaacataaccagctaacacagttttgttcctttccttcactttcgtctgatatataaccctgtgaatacatcaaaagctaagttcaagttttgaatataccagtgatatggataatctatgtaatatatcgccaaagaacaatacaaggtagagagagagacagagttctacctcaagccttcaagccacatttcggttatcagagtttcgccaggaaaaacagtcgtgaggaatcgtccagatatggttttgacagcagttgggtcacccttgcaaacacacttgatgattgccttgattgcaaacccgagtgtgcatagcccatgcaatatcgggcgtgggaatcttcaataaaacaagtgtcagtccagtggcagtgatgtgcaagttttggaagaaaaaaaaacagagaaacattacattggttatcccaacgattccatgtaatgccttagttatacaatgaataatgagggatttgaaacattttaatcttttagactcagataacaaaacttctttgacacaaaagagctttcacataccatcaaaagaatggtacaagttagcattgataactcaaaattatgatggaacttgagattcatagcagaaaaaggtagccaaagccgtttatggttatatcctccgaattactgaattaaaacgttgctatgtaacaagaaaaaagcaaactaggaaagtatgatctagcatgacaatgtctgaataagaagctatataagtggttcactaacccggcaagttttgcaaattctggatctgaatgcagaggattatagtcaccagacagcctataaagtaatgcctgccaggagaaataaaccagagggttagataaagtaaacaagtaggcgtcaaagggaacagaaacaacttaaatgaatatcagaagtacaccaaatccaaataagttgtttcaagaattaacttgcctgcgatggctgagtgcgctcttcgcacactgtcaaaggttgtctttgtgggattttcacagctaagccctggttacttggatagtttttgtaagagaatggttgagatgaatttgagaaaccaccagcacctcttaggaaaacagtcgtcctgcagagaaagtcccaatttagttaccgagtttccaagctttaatgcacaacagttcactatttacttatagagacgttttttacctattcatgcataacagttcccctgacccttcctcgtaacttctggtttctaattcaaggatagctgctttacctaaaagattgccatcagagagaacaaaaaagatcaatttaaagtcaactttctagttctctgtagtagttagttttctgcttaagattggagtatcaagtacctttatcttgcaaaccagcgaggcttactttgttaattaactgtggcaacacaaacaacatcaattcagaaaaataaagcaaagaccagtttggatattagaagaagaagccaataagaaagttcttgaagatataatttccacgttcatcaaaaaccaatcagtatgagagtacacttcctagtatcaaaacagttcctatacacacgtaataaaagctacttacggaagccttggaaggtaatggcctgtatatttcaatatactgctgcccatgcaacaagagactaggatcatatctgcagacaagatacaacaacaacatcatcatctatttggagctatctcattcaaaacatcaataaaatataagagagaacatttttgcttacttaaaacctggcaaatccagtccttctgtcaaagatccaagtgtgaatagtgaagcaaaagttggtaagacctataattgaaggcaaataacatcgattactcaatttttaataacaaaacacatcacaggtaaatccagatcaatcaattgagatacctggatcaaatcctgcccatttctgtgatacacaaacttgagctcatcggaatccacagcatcttggccacaagcgccgattcccaaagcatagattgctacatctctattttacacaagtcaaaatcaatttcttcatcgagttctttccttaaaaattttcaaatttcctaatctccttcgattttctatcattttcttcttcatttacacagagacacaagagtagggagagaaacacgaagagagaagatgcaaacctttcattgtaggtgtaacgcgtctgtgaataaaaccagaacaaaaaacgagagtgcggttacagataagttttgtctcgatcacggaaagatccgatcagaaatcaataagaatgtgaaaacgaaaacaaacctcgggaagcttgtgagcgagaagaagatcagaattgaattcagaatcgctagtcgccatctccgatcaggattagagctcagcttccgtgtcccacctggtttttctcctttcagtgttcaacgttagataagtcataactcattgctctatatgcattaaacgacatcgctttgtagattcactgaaaattcaaatcccaatgcctgctaatacataagataagattctttatttgtcttattaaataacacgtaatcaaacagattataatttttgttaagtgacttacacatttggtgtggtattatgcatttttaaagttctgtttttgaattgttacctgaatattcataccatttgaaactgtaacattattgataataagctttacgatgaaactgtggaattatattgaataaatgtttcgttccatagaaaaagaaagaatataagaatcaagaatgagacctcgagctgagatcgttacaaactgatatactgattttaacataaactcttctcattcattagcaaaatgaagaatgtgtataaaacaagaaacccgcctcaagaacgcgtcagctggtttggctgaccatctctccgtcatttctatatctaaccaccagctcaaagcggtctggtgctgcgaccactggctctcccgcagagaagagcgttcttggggattggatattcatctctgagagaagttgagggtgtgtacacacgtaaatacaattgttgtcctaagtattgcctcgcccagaactcggatcttagattccacattcctacgttgtcgagtgctatcaatatagccgtccatgagcttgggtatacctgtatatgaatgttaatcaaacggttcacatctgacaaaacaaaacatgattagattatggcttttagtatacagaagccgtggtttacctgaacggtgcagcgagcgactgcatcgcgtaggttatactcgttcctactatctggactccactgtccaccatccattctgtatcacaagaaccatctttagtccaactattatagcgatcaagatcaagatctctctttttgtgaatcaaagaatgaaacttacccaacaacccagaaagagtaaccatcaagatgccagctctggacaatatcctcagaattttcgaaaataatctccacaaaggttctgtaatcaacttgcataacagatgtgtcgaggtatattcctccaccagtgggttggtactgtatgcttccacttctgtaaacaccgtcaatcttgaagtagtccgcgattttcagaggagtgtctgcgggtttgaatgagacactgttcacagcgtatcgttgcttcccatcaacctgaccagcagagctagcaagtctgatcgttcttgtagtgtttatcataccgtagtggtacgatccttgtggatttggccttggtccgctcgctgaaaggttagtcctacaacacacaaacataacaaatcaaaacttttaaagcacaaccaaccaaatcctaaaagaagttttttttttaatgtgcacagttagtatacctgatggctcgagcctggttcaaggaccagtcgatttgaatggtaggtccaccaggaataggtccagaaacaccaccagcagaattactgtatcggaaaatacccgtggtagtaaggacatttgaggtaaaccgagaagagacgaccacgtaataatcccgtggagtctggtccgcggttacaaggactgagtaagattgtccaacatgaacatctagtgaagagaaagtagtctgaagagtgtgtgttccttcgacttccaccactttcatcttatggtcttgaatgcggaagttgagagagtcttgtaaccctacattggatattctaaacctgtatgtcttacctgaggaataagtcaaagaagaactcacatcatcagtgtaaactctgagcaatgccttaatcaatcagaactcaagaagaggaagggttaaaagaaccttgttcaacattaagagttgcaccacttgaacgaccattgatgaggatgccgtctggtaaaggaagcttcttaccattatcaagctgtgctctcaaatcctacacaaacgaaattacagacaaaatcgaaaattagttgaagttggttaaggagtttagttactctgttttaagccactctgtttttaagcttatgcatcttctttataaatacttaataatgagttgagagagccagatcacatggttctaataattaccgtgtggtttgctttgtaccagtctccgataaggacagtggtatctccggcgggatcagggaaagggaccgggattctaggacgactgaggatacgaatgccaccaaatccaccggcggctttgtgaaagccgagagaagggaagtagtaaaaacttccgatctgatccttcatctgaagaatgtaagtgtagttcttccccggcgggattgggcatgtcgttccatacactccatcaacgaaagagttcctcctctgttgaattccattcctgcgttattttcaaaaatatttatagttaaccccaaaactattatgaattatcccaaaactattatgaaattgtaaatcatgcccctggaaaagggggcaaccgtggatacagctaataatttggtagggtggaccattttcccacatgtaaatgttttaaaatatgctgtcacttttcataaattcccatgcatataaaaaaagaagaagcaaaagtcagaaaactatataataacatgatgtaattgaatttaaccgtaatcacccaactaatcaatgtcgtgttgagagttaattaattattacgtcgaccgaatccgacataaggtgtggccaaaaccaaatctttacgtaccacagttttttttttaaacacgtttttgtttttacatcactattttttaaaaaaggacatgaaaatactattcacgagaaaaagaaaaatacctactacacctagccactactatctatcgacaacgacagaattcaatatcaaatatcgaattaaactgtattatgaaatcagatttagatttagaatgaagattgaaaaaatagttaccatgaaagaaggaaaggttcgtcgaggctattgtagacgttgatgatgagattgtcattagtaaccgaatgaatgtccggtcccggaaacgccccgttgatcaaaataccctaaaccggaaaatgcaaagagatccatagtttttaataaccggatctataaacgaaaaccgggaataaattaaactgatatcgatacctgttggcgaacaccgagtgggtatatatcgccgtaagttatgttccattcaaagaatctgtacggatcttcagccgtgacggcgaagagaagagagagtccgatgaataatgcggcggcgaatgaggcactgcccgccatttttgtgtatgaaaaccggtgaaacaagaaaggtatatctggcgtggtctctctctctctaactctaagacacagatttaagtgtagagtttatgtagagaagagtcggcacgtattaaaaagagtagagagagagagatttaagagaaaacgaataagagagaagaaaacaaaggtcagtgtcggtggctggacccacgagcgactctgtgttcactttgaaatctgtatttgtcgtcccacaatccacatggctaagcaacttggtgccattttttttatgagccctaaaaacattttaattagaaacaaacgattatttggtgtaagataagctttgtaagatattggattacaatctcagatattattgagatattacaagatatatcattaaaaaaaattaggtagcatttaactacttttatttaaaatgacgaaaatcatatttttcatatatttaaatttcataatcaaacataatatgtatatcatgtttcctgttaattctctaaatttgctattattagtttctatgaatttatgaattttcctgagtatcaacatttctcatttttaatttgtattactccatcctcatttagttatctatacatattttaatattattaatatttaaacattaatttttgtatatttttggcaaagatttgagttttatgtgaaaattaaatattcagcatctatatatgataaattcgaaaatccgttgttgttatattaaaaaaacctatttagtgaaataaaattattgtttagttttaaatttatgatatcaaagatttcacactatcttctaaaacaatatcaattaaaatatatgcaacctattttcactatattttacattcaataatttagaaaaaaaattcatatattttgtactaaacttgatttgcaagaatttttcatatctttacaatttgaatttgtaaaaactttatttaatattcccacgctgcacagcgtagatctttatctaatttcgattattgtaatttataatcctcggttgtaattgattagtgattacatactgtcttggaaagaaaaatataaagcagagaaaaacttggagaaagttgtatttccattaaacgtatacacaaacatatatttatacatatcttagaatatactctaatcacaactaatccttatattactatatcataacaaaaagggaagtatatataacacaccttaggatttatcctaacatttagatccttaacaaaaaaaatctgtgcaaaaatagcggatttattttgttgtggattgtaagatttcattctctgaatacttttgctgtataaaaaacagtggtaaatagattactatatgtgtgtcgtgtgtgactggttaaacaagttaaaggaaaagaattcatctagttttgttttttttccacaaaaattcatctagttttcataagagaataattgaaataactcttctcttttagttatttttttgacattttcagaaataaataaaatcttagtgtagagaaactttgctctcttcttttttttattagtgttaactagtaatactaataccatatatatttgtttgtatagttggatttaagtctttcttactgtataagtttttaagtcaaatgtcacatgtgcattaaagaaccgaagataaggtcttctaataattgaatgggagacagaaatacatatatcctagcgtaattattctctatttaattagtaaaaatcaggctcacgtcggaaaaaagaaacaaagcttaacgaagataatcacaagcaaaaaaacttagattcaataaacagcctagattcaatagtataaaacttcgtaacgaaggtaatcacaagcaaaaaaatcggccatcaaaaggtaaattatatgcctctattgttcgaataaagaataatattctttttatcttttcatttttttgggttgttgtatcatgtatatgtcctttaaagttgctagaagataaacaagggacccttcttggtggtaatatcaaattcgtttggaagctcaattcaatttctttggcattttcgaatgtttttttctcttttatgtaactttaatttctgagcagaaacataacttcagtggtaattcttagtttttggcttttaatgaatccctactcatttggcaaaaaaagaaggaaatattgtagaaggatccaaaagtactcagaaggaaaaaacattacgtgtagttatcaaaaagtaaaacattaacttgacatgcgtttatatttccggatttatcgcctctcactactcagacttttctctggtatgagtcattagcactttaataaaagcctaactctcccaaaattaaggtaaagtatatgggagaaaaaatagaacgtctaactaccaaattagagaaatttcaaatttgatagaagaagattatgattggatgagtaagcgacgcgtcagagcaatttgaaattgccgtggggtcctagattatagaataaagtgttgatctagataggcctgtataaatgacaacactttgaaaagatcacaataataccaacaaaaaagagagaaaataataaataaaaataccaaaaaagatacaaaacgcgtacggtgtctgtaaaatgtaataacgacacatggattaggtgttccatgtgtggacaacaacattcgaattcttagtacattgataagaaccagaaacgacatcgtatagtaggtgcattttgcatagtactactacatatttgcttgtatagaaaactagtaaaactagtcagtctctttgttaaaaaggaacaattagacaaattaagcgattgtttcaatgtcaaataagtgtctattattactcatgaaaaccaggttgacttgaaatgagttaggttgatcagctagtggttgaggtcattgatggtgtaatactgcaggttcaaacatcactaaccaggaccaccactaagccagagaaccagctgcaaaaacctctgtgccataaagggaaacccataattcttctactaggataagttttacaacaatgggtttttaagtttaacagctttctatacaaaaacagtttggcaactatcacagcatccattgcagtctcatagctttggtttttctcttaatttagaaatccagagatccacattgtttgctctctatagtttttgcagtagatctagcctttatgtccttataatcaccatttacgtttcctcttggtcttccaatgcccatcttaggcagaccacggttcaatccttccaacaaaacacaagctttgcaccatttctgcatcatcgtataagatcattcattatatttactacagtgcacatctttttactctttgttagttcatatctataacatgacttgatgtgataaagagagaagtctcacctggctagaaatatacccacatcgctcacaagtcccttgctcaggcattttcgtggttgtggcaattctgaagtcttcacctgacttgatgatatccagaatagcccttggcctgtagtttatataatataaattggagaattacttgcttatttggttgtggtgaatatatacggcaacagttgaacaagtaccttagtctttccaagtcattgatgaactcacaggcgaatccacgataagcattaggggagtatatgcctgcaatcagaataaatgattcaactccaacataaatgaccaaattatgcattcagctcgtagtggacttataataaaaagctagttagctagagctctctttaagtgataaaaacgaacagaagcaacaaaactttgaaaatgcacaacttacattcagtggagaagtagtccagcttcttgaaataagcatacgtgtaactatgttaaggtctaacgaatatcttctgttgacagttaaagttgtttcgggaagcaaaacaaaagatttaatagcaaaggatatatgacaatctccttctcgtatgtatatttgaaaggtttacatcttggaattggaccatcttcgcctgtagtgattgatgtgcacctactcaatctacaatagccaaattacaaatcaatcaattaagggacatgagacatattatagccaagattcaaggaaaaacatcactagaaacgtatatatttacctagcaatatcgcctcgcagtatgtttaagacaactgtttcggctatatcatctgcattatgtccagtgactagcttatctactttcaataacgcagctcctcgatcaagtgccttcaaaaattcaaccagacatagaatcataaaacagaaaagacggttctgaagaaacttactcaaagagggaatgctatgaagaaacttgctcctcacctgtcgacggaatacaccacagaaggtgcaattgttcttcaaaccgatcatcttcacaatctcgtccattgtccatccatacagatctttgtatgaaacaatctgaagaggcaatccatactgggaaaacaaagaatgacaaatcatcacaaaattttagagtgaacacataacacataaattcaaaagcttacttgaacttcgttccttttaacagtctcgagagaatcatcacgataacccgttatcccttcatcaatagacaaaagaaaaagatcgagtccgtaactgtgacgtctgtttagttctgataacacatatgccagcactgaagaatctgcaccagcacaaacttttgagttatggcgcaaacatcaaactaaaacagagtgattcgtaaaaatttgaactttgaagcgaaaccatcattggagtgtaaagaaattaccttttccaccggaggcacctatagcaactcgttcaccgaacttaaacaaacgattcccaacaatgacttggtgaatctcttcctcaaaaacctcatagaaacactctctgcatatctttatacaaatactcacatcattattgcttatacgtaacaaactaactagcaggagattgagaaactatgatctttaacagttccgaaaatgccacaagagtaacgcaaccaaagacccagctcgatgattttgatcctaattcaaaatttacctgttgaagggttttcggtcgttttaggacaggtcgtcactggttacagatgcagcagagacgagaccctcctgctttcttgctcttctcttcccctgcctccatctccaccggtgaatgaaactccaagtttactagtcggcggtaaattgtcctaaccggaaaaacgacctaactcggagttatatccacagaacaccgtcgtatttgatttcggtatctgaattgttttagttattaatgggcccattgggctttcttacccaacattaaaatcccacatacaagattatagataattagatatacccacaatgatgagcgttaaagacattattaactaaggatgtggtccattaatggaaatgttttgtgattagctggatctcatgtgaatatgtgatcttatcataactagcatattagggaaacgttacgtcaactggtctacaaaaatatctaagttggtccattttcttacacgttttgagtagttgtgtcgaccgcaatgccaaatcaatcactaaaaagaagagtatacacgatcatgtttcttctataccaacgcatttaatttcctacatacgaacttgaatgctaatcaaactggggtcatgtttacggctttgagcaatagttgaagattatcaatacataaaattatatcatccatatcacttaatcaaatgaaaatattcataccattaaaataccttgagatcttttgtttttaaaaaccatatacaagagaaaataagaaattgtaatcaacaaaaaagccaacaaacttacacatcacaaaagcaaaagatgatcaatcatcacaataaaaaaaaaaaaaaacaaagcaaatcaaccatcattattcttaatatctttaatgataatcttcttattctttatctttcttctcctcctctacggtggtcttagggtggtatcctggaagcttctccttaatcttctcaagaatccctttcttctccactggatgcgcttcttccacaggaggaggaacaaccaccggtgccgcagcgacggctgaaccgtcttcaggtttcttgtgtccaggaagcttctctttcaacttctccataaaccctttcttctcttcctcctttacctcaacttcagtagttggcttcttcttctccttcttcttcttcctcttctcaccatctgaaccttcttcctcacttgactgtataaattcagacccatatagttagataagaaaagcattcgatcatgttatagtttatcatcaacagatcagatctaaacttacggagctagaagaactgtcgcttcggtgaagcttttcaagaagactttcgtgtttaacctctggctccggctctgaaatatgaaccttctgctcaaactctgaagcgatcggagtctcctctggttttgtttcgtctttcttctttcccaagaaatcgaacaatccacgatctgtaacctctgccgatgattcctctgttgctacctttggcacctcctgttcaggaacattcttgatttcctcagccatagttatcggaaaaagattcgatgaatgaaacacggattcaaaagtattttttttatgtgaaggtttgaaattcaaaagcagatgaaaataagaggtgatggagattagagaagaaagtgtgttatatagtgttgaggactcgggaggggtccaagccaccgcggatttcacgctctttgtacactttttttttgcaatttaaaaacatatatctaattatatgaaattacaaaatgacccgctttttatggcatcttctccttcgtccccacgttaattatcatttttctgttaattagataaagttatattggattaagaagaattcattaattaattgttaatagtttgcttacgtgatctgatatcaatttagtggaataaaaaataatggataagaatggcaactagatagttttttttcaaaagtagtgaaaacaaactaaatggtttgttcaaggcgtgtactgtttttaatttaaatattagactttcataagtttttttgtttgttttaatacttgttatgtggactttgtagttcaatgatcggtttatcaagttaaagaaaactgattcaaactttaaatagagtaagaataatatggaataagcaaaaatgttttttcatttcctctgaaagcaaaaataatttatttttgacaacgcaaaagagattttaaagaatgggatgtccctataaattattgttcttaaagtttcgggctttcttatatatatatatatattcacaaatataggaaccatcttgcaaattccaaaaatggattacagattttgaaaggattaacaatttaatgcaccatagattggaagacacgtgtcaagcattagcgcaaatcggacgacggagctcatagtcagaaatggaacgtcggatgtagacaaagaaaagagtcagagagaaatttagattaatcaattacatcttaaaacgtgtcaatataacatgggaagttgtccttttgtaggacccaatagtatgtactgattggcgtaaaagacgtgatgtcggttacgtgggtccacttgacttattgactagtgccacgctggaacaagcttgttcgagaagaaatgatgattttttagaaatttataacgttccttattttttctttcttctattctatgcgttacaaaatacaaacaaaccaataagaacttggttatttaattcttatcacgctatgaatcctcaacgattaggtgttattttaacttattattcactaaacatgttgaagaggccaatctagtaacgcatgatctttgaaattgtaaatacatgatcttggatactctaaacaaaaaaaaaaacaaatccaacaagtaatataagtccgattggctcaatcgattaggaaggtgttgttgcaatgctaccggatctcatttttagtcctaatgctacaataagacgggtaatttgcgcttgtgaatccgccaaaagtattatcaaagaaatgatcgtggacataaacaaactaaaactaaagatttagattttagaacgaatagaaagttagcatcatcttttgtttaccatttttggggcacataaaacaatctttcgtaatctcgtttatgggaaaagggtttgtgtatgtattttttcaacgtaaatggttatgttttcatgcagtttttaaagataaacttagatgtagataatgaaatcatgagtagacaaatgagcataagatgacttggatttcttatgaattaatatgttaatgtgtgggatgtcattttcgacctattgaaaaagatatactaaaaatattaatgaaggacagatggtaatcggtaaatgcatcatctcttaaaattcgcctaaaataaaaaaaatgaaccgacgtgccacatcagtaatctctggtctctaaatttaacaaagacgtagcacgaaccgtgacgtatcaacacacatatcaaacaaacctatctttttcaatactaacttattcgtctttttggttcttgttgtcatatacaccgaagctcagctcttaacttattctttggataatgttttcggtgatagcgaaccgacaaattgtagccgacacttagaattcacaactaaactatagattttaaaataatattaattaattcgaaagtttgagatatctgaacaaagttttctgaaaaacgtagaatacatatggatcaaatactataattcgaaagtttcagattagtgctaagtaatgaacgtcatgcgtttgttcttctgtcgatttcttctttttcaccgcccgtctgagttttatgggcgtgatattttccttattgtggtcaaatcaggaatattcaacaatatttagcactcgctttacttggtgggacatgagaatcaatcgatgcatcgctgttttatttctttttctttgatgtttctatttctgttagaacaaagttttcatgattcttaaaagcccaaatttcatggcatcggaacaaagttttcatatatgatgacaactcaaaacaaaagagtaacggtaaaagcccaatacccataaaatgggcttaagaatccagatcggatctataacccgacccggttgttgacaccgagagagtccacgcaacgttcgccgaattcctaacgaatcggacaccgtttcgtcgctgtaaaattttgatgcgaaattttccaattcacagattttgtttttccattgttttggatttctagattctagttatatgttggtgatagatttttcctacatctcgtgattctcaaacgcttcttgagctcttcgtcgaatcgggactgtgatcgggacttggtggagaagaagcgatgataacaagatcgaatctagcagaacagctcagggaatatcagattagatcaaagcatgattgggcctccgtttctttcttctcttccacctccaatttctcttcctccaggttagagatctccggcttatcctttcctttttaatctgctgtgatttggagctgcgtgcttagagttgtatttgaaaaattgtactttgtgatatttaattcaattggaaccgtaaatttctcatcttttaagggattgtcgttgaacattggatatctatgtgaatcctacacaaggaactataattttgacttgtccacgttgaaccatctttgacaatttgacatacacttttcattcttatcgactctgttgcaatctggattctattgttaaattttgacaatgaacattctatagtggtacttatgctattcgtttcgtttgcttttgattcagggttgatgttgtagtctttgtcatatgggaactagtgatgttagcactcgtggtgttttcagctgtatccttgtacttcaggcggttgcaacttgcttttatcctgctttgtgtcaccttactattactcctctgtatgaaaatcacaaagcaagtgagacatgctaggaagaagaagcgaaggatgcttcttcctctctctatgtaaagaccgaaaccattgagctgttgcgaaccgtttatcttctcacacaaccaaaccacaactcttctctggcatgagttttgtgcccatatgcattgatgaagatgacagctaagctcagactgactctgggacgcatcgcttttgtcctttgaagaatcgacctgaacttgagatatgaaaccagggactgcaatttcaaggcttagcttagacaaatcagaacaaaagtgctgtaaaggttgttttcctgtataaagtagtatgggaggttgctttatttttcctaggcacgatcacggattgttaacttgagcgttttgtgattaaagatagtttttccatctatctatgttacacttaatatcatgatgaagtgatttagatttgttggctgtaaaaagtttttaaaaaatgatttgcaggattttcatgtgacgagaaaaagaaaaacaacgaacactcatgaaagtagaagagagaactataaaatgaaaagtagcaagcaacttgctcgaaacgctcacatgtttctatcattacctttgcgctctgcaactactttagtatcttgttaaagaaaaagtggtaatagttagtattatttgtaatgttatggtctgtcaatacactagcttagcttgatttgattaacttaatttccaaataatgagatactgtctacatggtgatatagctttgtcaaagttcattaatgacaatgacaaaaacaagtgtgttagtaaccaagataattgcatttagtcgtaattcatgttttgaaacggaaataattagaaagatcgaaaatctctagatatttgtagaaggtcagtacataactccacgagtggtcgtgatccaatttgtggacaaatttgaaaagcaactaaaaacaatcaaataagcacgaacatccttttccctccacacacatcaaaatccacagtttggtccatatattgctatatatatagagaagcagttaggcatttaattaaggttgcatacagacagatacatacgcaacgaaactatcaaagccgaagtaacacacacacaaaaatcatatgaagaaactaaattctaaagggattagactctccgaattgatggagaaatggagaagaaggaagaaagggcacttcgctgtgtacacgaacgaagggaagagattcgttttaccattggattatctgaatcatccgatgttacaggtgctattgcaaatggctgaggatgagtttgggactaccattgatggtcctttaaaagttccttgcgatggaagtttaatggatcacatcatcatgcttgtgagaaggagcatgtcccatgattatgatgatgtggagaagtcttccacgagcagcacctgcaagggagcttcaatctcttctctctttcgtggacagagccagcttcagtcattagtttcctaaccatttggagtaattgttaactttttttggagaagggttgttctattttgtgtataccaacatgatcttgtaataaattaattattgtaatgtatcaatgatacagtatcatcatttgattttgagtctttttttgacggttaaaacaacgatttgggacgaagttataggccctgaatggatgctgattttggattcagtttttgaatttagattttagtttatagattttagattttagtttcagatttttattattatatttttgtttcaaaaaccccaaaaaattggtttttggtttttgagaaaaataacgttgattgagtaaaaactagatttcctaaattttaggagaactaaaaaactaaaatcatgaatggaaaactacaagaaaataatttttctaaattgtagggaaaccaaaattttaaaatcttgattggtatgaaaataagtttttggaaaacaaaaaccaaaaactcttacaaaatctacaaaacattcaattcatgtatccaaacttcttaaagggcccaaaaaggaagaaaacattgtgaaagaaacagatatagaaatgggcctttggtctttaaattgggcctaagccttttaattgaggccttactaaaagtgacgactcacatggttgaatcaaatctcaggtagtaaattgtcaaagctgaggagaaagaaagctttttcggtctgaaattgaagtgcgaatcggggaatctagggtttcgagagagagataatgggtggaggaggacatggcggaggtataacttacaagggagtcactgtccacactcccaagacttggcacaccgtcaccggaaaaggcttgtgcgccgttatgtggtacatttctgatttctctctttcacctaattcgcttttgattttgggacctagctaatctcgatcgtagctagatctcgccatggggattttgggctaattgatcatctgaggaattttgtatatagaatccatttgaatcaaaaaattggatttgtcaaattagtatcggagctaatcaggtagatgttaatttgaatcagatattgcttatgtcaatttcagttcgatgagaatggttgaagaagtaatcgcacataggttttaactttccctagcattcacatcttaaaaactcaatttttggtattttcaggttctggattctgtacagggcaaagcaagatggtcctgtagttatggtaaaactctttcattttttatctttgtctcgcttttgtaaattttattggtcctaatatctttcgtggtggctgaatctgatcttgctattggcaatggatagggatggaggcacccttgggatggtcatggtgatcacggtcacggagatcatcactaggtaatgtctttactagtagtattgtcgatggaatcattaagaaagatgattaaaaaatctcctttttcgtagtaaacacgcattattgtttataccgtatagcaattcctcaatgaagctaatgtctatgcataatgtagagtagcatttctaagttgtcacttactaacaagatctcttgttaactgctatctagttggttttgaagaaagatgatagctttgatctggttttggttcatacaagtggtgaaagtttagaggatctttaacttctctataggatgttcttgatttatatctactagaatgaatcattgaaactctcgggagtgaatgaaaattgagtgcctttattgtgaatgtttgttattagtttagtggtacatgttttgagttttctctttgtttagacattgatgatttgtagttatcctcgagttcacctttcatgtaaccatataagcattgctcaaactacttgacactaatctggttttgggttttgctgctaggtctcactgaacctttgaagatcatgacgaaaaaaggatcgtctcttgtttttttcttaattttcagcttcatatgtcgaaataaagagaactgtgaagaagacgtgaattgtttttgtacacaactttgtaagacttgctgcttctgttttaagttactacttgtgtgttgcacttcctgatcatgttgttattttgctgtcaacaaattaatttgaaataaaacgcattgcgagattcgtgtttttagatccagcctccaatgatacgaattacaaagaaacactagaaattagttatattcgctgtgttaagtatacaaattaacacttacgaaactgaatttgttaatggtttttataactatatctgaaaaccaaaaaaaatatgcaaaatcatcaaattgaaaatgtctattctagcaacatgaattgtgaataaataaacaaacatctataattcaaattttacttgaataacaatttcattttgactctatttttggtgaagacaaaaagtgtgccttcaacttcaagtctttaatccaagtagccagtttaggaaacgggtaaaaaaataaattatatagaataaaagaatttgatgttgcaaacttgaaaataagtttacaaatcaatctatttaatgttaactaaacatgtccgcttgaagcaaaacctaaccgatccggacatatcatatattatctagttggtgagaatattaagaagtgaaactctcgtctgaatcaatcgccggaaaatagattccaactctatttcaagctccactacagtaatctccgccgcctccaacctcgtagtcgcgctttgcaccgcagtctcgtcccattcatcatctaacaaataggaagaccgaatggaaaagatcgaagacaaagaccctttgctcgatctcttctctagccaaggaatacaaccaagtgagaacaaagactcaaccatcgtcacaacgactcttctcacttccttcaaaacttctgtgacaaacagaaggttctgttctattggcatggccactcttccttcgtttcctttcatgttcttcaaacagtttaagcatttcagtgtctccttcttgagcttgttcttataccgattatacgcagctatcttctcgttgacatcagatgattcgttgccacgtagagtcagttgtagatcttgcaagctgtgtttcacgagcgtcatcacatctttggatacgttacagatgtctaacatcctcaatgaagcttctgaaacttgttccgtccatttctcttgtccttgttgagacagagattctcttgttttcggacagtgatggaggagatagtttacgcagtcgtgtagctctctcaaaccctcaaagttaatctgagccatagatagatcttaatctattcgagatacttagctttatgaatgtaaaaaaagaatttgaaaaggtattttttgatgtaattgtgaatggtttttagggcttcttgagagttttaagcgaagattagagatatattgaatgtgtgtaagaatgagattatatatagaggttaagaaggatctgagggaaagtacgatgaaggttcccaagtttgggtttttgtacggacgtgggacatccggggaacagctcattttggaggtattatcaaaacaatgatttaaatgattcaaaacatgtcacaaggaaccttctttgtacgtaagaggcactcgtggattagggtacattgtggattcgtttagattttcaatttataatatatagttttaaagatttttattctaatatatagtcttaaggtttaattatatactatataccatgcatgcacgagcgacggtgccaggctgtgttggtaaattgcaacaatttggaacagacggacgaatattaaatgagatgagaaatgtttagattttggatcagactttaaatattatgttaagggtttgtcagatatgttttatgtatcaagttaaatggatatattaattaccaacaagaaagtaatataagtcttacagtaacagaaaacaaataatggtaactacttgatcaatatgaatatatgatcaataatcattttaaaaccggaacttatctttggcaatacatgcgattgtgacattgtgttacgtgttaacctctcaatatatgtttctggacaagcgaaatattcacagtttcacacaaataccaatataccttttctataacgtggacagtaataatacgcatacattaatacatatatgtttatatgtctaatttctctatcaatcaggtaaccacctcgacggctcgacgcatgaatacatcctggattagattttatgtttaagatctttatatctcaggttattttcaacaaattaatatcttcccacaaattatataattagattcatatccctccaactccaaatgctgaaatgctttcatttttattatgttgttagtgcagcaatcttattattcgatttcccgtttggaaggtatagctactaattataacgaataatcaaccatgcattatattttctctgttgtcatcatcatgtagagacattattgcgtgattaaaaaaagagaaataagaagacattattgcgtgattataaaaacacacagagaaaataagacattattgcgtaatttctttagctattttttttgcaaacaacccatcaaacataaaataaagcccatgaaactcaattaataagcccattatctcaaattcatccttactctgttttgcaacaacttctgataagaaaactgatacactcatcagtctcatgattgtataactataaacttatgaaatattcatagagtactgaagtgatctgctgataattgttatctcgaactcgtattcttgacaagtaatcgtttgaatatgatttaagaacgctgcacacaaagttttacaagttctaaagatcaatatgatctgagagactttgcctaaactaaagccaacaatacttcacaatgaacaaaattacatctatacaatctcaaagagtaagcatgttaagaaaagaaactcttgtcttcaacagtttcttatacacacactccaactctttctctgtttcttcaatctcatgttctgtttctctcaacttcttcagctcatccacatcaacttcttgattcttcttattaaaaatcctcgacacaattcctctccttgatcctttcttttgatctctctgatccttcgtcactacctcaatcaacaaagaaaccaaaacatcaaagctggtcttttcaactcttttcattacattaatgacatctccacaatctctcttcctcttcctcatcttctcctctgttttcttcaattgtttgacgatggttctgctcagtgctcttctcttaaacacgtacgcgtctgtctcacgcgccacgaaagcttcttgatcttctcctgacttgcttctgatcaatctcctcctcaagcttgattcgagttccctgacttgttcctttatctccatcagaacgtctctgatcgtgctgcagatatcaagaacctcgatgaatccgtcagaaacatcttcaaatcctgtgaaagacttttgagttttagtcgtttgaaaacggaggaaaacttcgacaacctcgtacagattctttaaaactccaagtttccgacgagcggactctggtcttttctttagtaacagaagatgatcttcgatggctcgagacagaggattaacgtcttcggaccagcttgttgaacgcacgtgtgcaccagatgatgaagtacaagccatggctgattcactctatagagataataatgtatagtcaacgaatgaaaaggtttagcttctcattaaaacgtactctcaccaatatatatgtatgtgtctctatgtacatgcatgattaagtttgaatatacatatacttgcacgtagaggtaagtcaataggtcgacgaatatagatacaggctggaattggctgttgcaattaagtttcttccgacagtctaacgacaaatctacactcttctccttcatgataaattttccctctttttttttttggcttggcattaaatattcatatatggctgaaacaaccaattaatcacataggtgaacatgctgcttagcaaatgattttcatgcaagatcatcatggacaataacattcacacggataatttcttcttgattattttgtacattttatttaggtaaatatgtgaagtctctcctgaatatcttttttttgtattaccttgatttaacaacatgatgagcagtaattcttctctaggtatcaatgtaatagttaaacagaaaaagaccaaatattgaggggggatcgataaaaacctgaaatgatcttacttccaaatttcagttgcttatactgattgcatgtgcggcaaccttggatgggctgcggaaatacgaaaccaacaagaaacaataaccgttggctgcgaagtcgctctcgtaatctctgcaacgtttattataataccattggagatttcacagattaagaaatgtccaaataccatttgtatacgatatacacgcatacatgtaatataatagttttccaattaggggaaagctgggaatgtgcacgaatgggaatacttcttaaactaaaccatcaaccaagttggtttcgtgacaacctggatgtgtttttataaacgtcatggtagatcataacattccatatacatctattgctattgtataacttacaaaaaaaaatagagcctatttaaaccaaaataataataatctatttattaactaggtgttatccacgcttacatttatctaaaatttgtaatttaaaaaacaaataataaaataagaccagaatatgcaatactaatgatgtggtttcatgctgagttaattagtgtgttaatatatcaaatttaaaatttattgttcttgaaaactaaactaattattgtatagttgaaacaaactacaattcatagatcattcttgctatcgttattatcacataatattaatggatcggaagagattgttttaaaacgatcaaagtatatgaattgctattattatttattttgacctatagggaaaattatacatatacacaacagacctaatacaaggaaaaaggaaatctaaaaaaggaacacttgtacaacaaattatatacaaatatgagtaaatagagatattcatgataagaatgtgagactacaagataagtagataaccaatactacaaggaaaaggaaatctacaaaaaggaaactcttgtacgacaaaaaattatacagattacgagttaacagagatattcatgataggatatgaaatatacatacccgaatagatcacaggctaaggctaaatccgatcgagggatgagaaaacaatacagagacagttagaacggaactgtatatggtaatacaaatattccgaattgaggcgaaaactgggccttagctaggaaacaaggaatctccacatgatctctgcagcaacttcatgatcatctctgcatcgttcttgatagcggctttattagtggtaacaacattcttttgctgattgttaccaaaaagccagtcatcatcaaataacgtgttgaatccagattcgttgcttggcttatacttctttctattctttgattcacaaattgcatcttcccttatcgtcttcttactgctatgactagcatcagacaaacacgcatcttcttcttctgtcaaacaactcttctcaagttgttctgattcatctgaaacttgcttgtttggtaaatattcctctttcgtattctcttcccgttgtacctttttagaagaagccatgatttgtctttccatcttcgacaaaagttctgactgaatcgaatctaggtttcagatcacgcgtaagacacctctattgttatatcgacgagagatcaaatcagcgagtttttgttgagaatgtaatggtaagacttctgtggatagtgagggttaggtctttatttataagacttacctgtggcggtgtggggataaatgcgacatttgcattgggctaaaaatgggcctacttataaatatggccgaatcataaggcccattttttagggaaagtgttcaataacatgggtgacattgatttaggaactgcgtgttgttcggaagtttttaaaacacgggggacatgtagttaaggcgtgaaatgaaccgttgcttttaatcatgtatatacttgtgcactaaaaaaggactttgatataaaggccccacgaagttttatattcaaaattcgtaccacacaaaagttacaacttttttagaacactactcaaaaatttaagtttggcttcgtctaaccccacaaagttttaaaactgtgtgtaaatttgttagccatcaattgttaacactttcaatagacctgagaatcattttatatgattaatcaaccagaaataattgctaaacataacctaacatgtctagtttagattccaattaactgaaaataaattaaaaccccaattaaaaaaggaaaagttttgtaagacatgatttaaatgcggtgtattttgttattttctctctgataattagctacaccgttttctatttggcattttgggcacgaagtaaaattgaattcctcaatagaatagatatatgtgacttgaaccatattccatttacaaatgaaactaaagtgtgacaaaaagaaatgcatatacaaatatgcatacatttttacaatcagctattaaacgatgaaaacattcttgaaagttaaaaatatatattagtttgtgtcgtaacaagaaaacattcgattattaaaaaacattcacttgatattaaggataaaacctaacatctaaataaaccccaactatacatattgacaacaataaccaactatacataattgatgtataacaaatagtgcccaataattgggtaaagatatttgaagtcctaaattattaggaacatgtaaagttcatcctaatttctaaatagtgctattaacttttaattgtgtcctaaactaatcaaagactaatcattcgtgttgaagaccaatatccttttccatctgtgttatcttctttgttgggagttggattgaaggcataaccaaatcctagttgtcaattttggcatcgttgtaacattattccaaccaaagtaaagctttttatcaacaataatacacgcaagttgcatttcaatgcaaccaacccaattatatcccaacggtaaaccggattcagtattttatgagtgattagtccggttattgaatccacaagtcgaaccggtcatagcagccaacacgtaccgccgctaagaggggaaagattctaattttgtaagttagagaaaattaataattaaccaattaattgttaaattaatagcactatatagactaaggtttgttgtccagcaaaccccacgtttaatacggtgttagtcaaataattaagtcctaatccgaatcagatcaagatgataattgaaaagcatccctaacaaaccatgtggtggcattctgagttatcactaattaaaacttaagagaggccacaaaatatcaaaacgaatccatcgacgtgaaatgcttacaagttatatgtcttcttatgtcctttaattaaattttctctctattatttccggcaagtatatgtgtcaagtgagtttgttcacgcatgctgtttgtgttcttatatttgatgttttgttgtctaccaaataaatgataatgcatggccatggtatgagatggcttgtgaaagaccttggttcttaattaacgcgtaaccattttttttctcttgtcaaagaactttttttttttgtaaaactagattaaaacaagaagaaattcgtttgaagcaactaaatctatgatcaaaatttggtatttttctaattataacataaaaacaacaataaaaaggcagcaaatttgggaatacggtaataaagcacacggttcatttataatttggattggttatgttttaagctagaaaactatatagtatttacggtggaaaataaaatttgtttaacaaattcaaataaaaatgtctccaacttatatacaaatatggttcgttatgtaattatgtttttgttttagctaatagtttgctgaattgtgaagatggaagtgaactattcaaagttcagttttaaaaataaaaatccttttaacaaaaacaaaagttcaattttaaaaaggtgaatttaattatcgagttatagatacaaggattatgtaaagtatcgtttatttatttgtttttctattttctttcatgtagttaacctcatacaaataataaaaataatgtgacaaaataacgcaaatagacaggaaacaagaagaaaaagaatgagagtgataattagttaatgtgttagggcattaagcaatgagactcgagtgctaatcaaacccctaaacactttctcactctcacattcgatttcacggatcgaattctccaattccatcatcctcttcatcaaactctttacttcttcgttcttcttcttgcttaaaccaatcaagcttttctcttcaacttgcttcaactccacgattccttcgtctagtttctcctttttttcggatcgtttcaaaaaccctataaacggcgttgttttggtggctctgagagataagtaaacgccgttaaagagagcaacggaaaccaaaacagttacttcaatgacgtcacctataactgacgcaagctctgcgtcaccgtacgttccgttaacgttgtctacgtggcagtgttggtgttttgtcttcggctcacggatcgatgacgtcagtttcgcgatatctcttgcgagagatcggcgagattttaggtaagatgcgattttctcgtcgtcttttttacggagagcgacttgagcggcggactggtgctcacggaggcagaggatcgacgtacggaagattccgtaagcgtcaacgaatcggagaagatcttctagaagattctcgaagaaaacaggacggtttcgtagagattcttgagattgtgggagctgaagtatatcagcgagcgtttcttgaacgtccttgaggagactgagaccgtcggtgatccaagaggtggtgcggctgtgagtttctccggcgaatgagaaccaggatttgagctgagagatctcgtggttaacgtgggagattaagggatgagaccggcagggtagactgatggatcttgtgtgatgagagacacgtggctttgacgatggagatgatcggccgcaaggtttgttagggaatgagagtgatcgtcggaaaactccaaccattctcggcggagagagagagaagagagagttgttgtgatggtttgattttgaaatggtgaaagatgaggaacaaggagcgtttatatacgcaagttggtggggtttcggcaattgaagtatgagatgatgtgcacgtgggagagttacgctattttttgagaataattgctttcttatttccccaactatatttttatttagttcggttaagatatacattttatacgtatctattttgttcttccaattttacacgagcatacacctatttattagacgttatagtactttcttgtttcaattttacacgattgtgtatacaactgtatattaattagacgttttgattacataatttccgacttaaactagagccaaactcaatgctatgtgacctatgtcatgtcccaatgttatgtaaataactacataggttttttttttttggcaaataaataactacatagattataaaggttaaaggatcgtatataatagttttctaataaaaagtataatagataggatataaggtgaataatgagtatattaatcagacttaacgagttaagagacataacaaatgttccatttcaagcggagaggggacacacgtgggttggccaccctagctagaactccaatccaaaactcctcacctttctaaaataaaattcacactcggtagtatcgtattaaataaacataattgagtcttctataatttatattggtataagggtttagacgcgttaagccgttagacagatttgttttcacatggttatgaacgatcatcaacatatatacacattgaatgattaatacaaagaatatagagttatatataagttttaatcatataaattttatacattcggcgaattggttcgttcaaataaacttttatatcaattaaatgtaaacttaatatggataaaattattaaaaatttatgatcggcttcaatcgaagaaggcgtgtaaaatctaaagttattggcgtcctatattaactctatcagcgactgaagatgagcacattcgggatatcaacggcatttagtgtttaaggtaatgaatatacacgggacaaaactctaacatgtacacgttttttaatcgacgataacaacaaatcagcttgacccaagacttttaatatatatacatcatagtatttttacaatgtacatctatgactatgataatctatataataacaacaggtctttcatcatattaataaactgttagactgaagattatgtgtctagtaattaacaaaagcacgaggggtgagctggtacgtgtcagagaagggcagctccaactatgcatcaaaggatcaacatcacggttttcttgttcacgacacttcatttttgtccaaccacgatcacgaaaacaagagatatataattgtataatcttacatagcccttaagtcgatattttacttaaaactaagcattagataattaggtagtgcaagcgtgtggacttttaatacgagtgtttcggcgtagatccacaaacatcaagaggggccttacttaacgctaacagtattagatttttgaaagcatgtgacttgatttgtggatttaattgcaactgacctgaaatgaaatgtgaggagccacagactctgtgatcggattttagagatatttctcgattcaagtgttttagatccacatgatgtttccaattattttgattataaatttttgtggtgagtttgagtttgatggtcatgaataataatgacatgtcattatttggagatgataccattaatatacttgactaactggatgttgagagcttgcccgacagtttaaatttgctataaaacactaaagacgagccatcgttttcattttgaagttctgttcgttgtgtattcatcatggtttagcatgtttctctacatgtattgatgatgactgaatttaattttgatattttagatatactttgttttcattaaagggataatgtttattgtcgtttaagtttttttttgttctttcacacaaactataattctatgtcattactcaactgaaaactgaaagttttgtgaaaaatctatattgaaatataacactgaagtggtatgagattagataattcgaaacaaaacatttgtcgaaaataaaagacagccagccatgtataatatatatccgcatctttcctcgcgtgatgtgacgagattccaattcatctgccaaatgttagataacttagttatgtatacatatcaatgtatacacatatcaatgtcttccaaatccataggaaaagtttccagtagtaaaacttaaaatcgtttgttccttaagagtgtatcactttgtgggtgcatgtaaggatgcgtaaaagatgtataaaatctgcactagtggaaaaaatcgaatcctgtaacagattcaaaattaggaacagatttgcttctttcacgtggtaaatctatattttggtttttttttttttttctcagaaaaggaagatcttggctcagctcaaatctcaatgtgcaattatatatatctagtttgcatttgatcaaatgtaacctgatatatatatttcaaaccaaactaaaaggcaaaaaactaaaacagattgggaaaatttgttagcgaattaaattggacctaaagcccgatatgttctaattgggccgtaagcccaaagtacaaatctgttcggaggcgggagcttcccatttaacggccattcctctcatattttcaaactcttccacacatctcctcgaatccaaaccaccgactcgtttcctcgcaagtgcgagtttttctccagcggtttcgtcaaaaatcttctcccaacctttctcccattctccatgtgcgtcgcacagctccaccgtctcgttttcccactctgtccagctccactctttattcagctttcccatcacttctgccacgcaagagccgttgcatgcgaccgtgcaaggacggcacttggcaccgtttaacggtccacggctcgatagtgccgccactggaactccgtatctatatggagggaaatcgtaggtccgatcagtcatgatgcagaaagggagaggtttggtgacgtaaggaacacgttgggttgtgagctgagccttgaaagcggactcggagttcagatgagttaacccggctgaatcgaggtcgggaatgagggagaggcgagagagagctaccgtcgaggtgttgagatctccgacgccgaaacggtcgttgagaccaccataagaggatccaggtggaactaggtattgacccggtatgaagtattccgggtcgagcgggtcagcccagtaaccatcaactcgggtccggactatccagtcgtatgtgaagttattctcgttttggtatgcctttatcatcgtgatgcaaccttccacaaggttgaagtactgtaataagccctgtcattgagaccaataagaaaacacacatgagaaaataatggattaacaaaataataataataatataacagaaacaaattactcgatgttaaaatgctagttttactagactacttatattatcatgttaaaatcactttttcaaacatgaaatgtcaaaatgttctaaaatgttatgaataatatcaactcaataaacgtaaattgatactcaacaaaagtttataccaatgtatatatatatttataatacttaatgccatactgcgcattaaccatttacttgataaaaaatacacgaaaaagcttacggattcacatcatcaccacgccacacattagcatcatcatgccacgcattagccatttcgtaaaattattaccataaattaaaaaaatacaagaaaaaacagaatacctttttccatacaaacaatatactatgtgaatttacaagctgtcagattaatcaagatcttctttatcaggaaacgtgggtccggataaggtaaggggtcaatttcagtctcggactagtcggctacaaaatcttgcgagttgctaaacaatagaaatttcaaagataatcataacttcaatctcaacctaacagtctcatactattaactatagaacccgaatcgagaaagaggcaataactcatagtattaacaaatatagtcaacaattaattgctatcacacccatatcttagagacatccgttaatacctttagaagcgtcatttttgaccgcaattttgttataaagtaacgaggaaataaaaaagaatatcatattggatgggattgtgacaacatcaaataccaaacccatcatcaaacaaaaaatcccttcacatgagtaacgtacggatcaagaaacggttacaccaaccctaaacctctccaactaaacggaggtccccgctcctgatcactttcttatccttaattatatattcccgaattttatgcacttaaaaatttaatgtaatactccaacatttaattaattgaaagttagtgaaaagaatttataaggtaaggaagttcaaaagagtcgataaattaccttaatgccattgggcgaattcataggtgtgaggactcgaaccatcggctcagtctcattgattggcttaggctcaaagatacgaacccaagcaagtcttggtgcgtccttaagtaaccgaagtttgaaagaatttttgtcgagaggactattaagaaacaaatcagcattaggataaaccctcaagatcttctccataatcgacggtccggttaactcaaaccgcctcgctcctcctaccaaacacaccgcaatcttcgacttaaccaactcctccctcttcctccgccgtcgattttccatctcctccgcttggataacgtcgttagggttcgaatctgacaattcgacggtgaaatcggtgacggttagggtatgagtgtagattaggttacgaagaggggctagagttggaaaaggatcaagtgagagagatgagaaagagattaagacgaggagggtgagagatgggattatgagaaggaggagaagacgacgatcgacgtcggagattctcctggaaacgtacataacggcggcgtaagtgatcgtaaccctaatctgtgagaataaccaccaccgtggattgttcacacacgtttcatttgccgagagagagatttttgtatttatagagttttgattttcttcaaaacttttgaagtgattcggagaggcgctggtttgttggagtggaaggtgaaatcaacattacgcgtgggtttggttttcgttttctcttttcttctagagagagatatgaaatatctatgtagctctgtataaaaccgatgcataattaattaaaatatacgtatttgattacgttttcaaaaaggaaatgatcaatgttacttttgtttttttcacgtttctttgtttgcttagtaaataatttatgaatgtttgaaatactttggtgaatagttttagtgctcgatcgttacagtaatcaattcgaataaactcttcactaaatatgctcgttacagtcttcacgtttattgtaactgttagacccccactcattgtgtattaggggatgttgacaagtatattgaagagattgatatcttgaaaggcgtacgtggactagtaaagaaatggatagtttgggttgcaagaaaagttttactttttgtattcaacaaaaggaaaagaaaagtattttttgttatccaagatatgactttatgtagtatattcatttgagagcattgtattaattagaatgttcacatatatcaatatataattatatatagaatttgctcttcaattgtaaagaagaaatgaggttccaaatttgttattagtgctctaaacatatatttttattaccttagaaattaatatataatatttctttctttgctttcccatgactttttactgtttttggtaacaagataatactttccctagtatataagatttttaaagcttttttgttgttgttcccaattagtttttctctagtttctagtcataatttatattaattccatagtttatgattatttaaattatgcagtattttttattggttaaatttttattaatgataaaacatgtgattttagccaaaacatctaataaaatgggacatatggagtactacaatagtgatagatcttttatttacctgtttattatatatgaatctattcaattttcatttatttacatgtttatttaaattatttatttaatttgcatctaaaatttgcaaaactattgttgggccatgagtgtcaactgtcaaatgtcaaccatagaagcaaaaataaaacagtttatgattcagtttgtaaaagtgggcttatttaaatgaatattggcccattagtatcatcttcacgaaacccagcaaaatcagagagcggcaaatcgttgaagagagatcttcttcttcctgaatccgtaacgttagctcaggcgtaagagcataatgcaaggaggatcatcgggtattggttatggtttgaagtatcaggtagttcacgatcttcttcatgcccgatcctttgtcaatttacgagctttcttaatggtggaaaatttgctgttttcaggccagatgtatatcggatgttaaagcagatagagatcacactagcttcctcactggaaccctaagcttgaaagaagaaaatgaggtgattgattcttaagatctgtttcgttctatttctggatcggaagattctgactttgttaaattttaaggttcatttgcttcgtttgtcttctggtggatctgagctgttatgtgagggattgttctcgcatcctaatgaaatttgggaccttgcttcttccccttttgatcaacgcattttctctactgtcttctccactggtaattctcatcatctcgaaacttctaattttgagttgatttgaagtaaaaaaaatcggacttttccgattgaatgcataaagtttcagaaattgaaactacagtgttgtcagaggagaattacagtgttgttgttttcaatttcaaggcgactcatatggagcagcaatatggcagattcctgagccatatggtcaatcgaattcttcaacattggaatgtgttgcttcccttgatgcacatgttggtaagattaattggtgagttcattgtttacagtttcagcagtctatctactgggtgtgcttataagtgcggtggtttaaaaagtcttagaacttgtaactttcttatcttcactttcatgaagactctctatacctcttgtggaaacagcgttctttggtgtccctctggaaattctgacaagttaatcagcatggatgaacaaaatcttgtcttctggagtttagactcttcaaagaaaagtgcggaggtgattgttgctacaacaagagaaaggataaacccattaaatcatttttgcctcctgtgtttttagaccacctttgaggtactttccgcttaatcatcttttttgctaattataggttttatctaaggagtcagctggtatgcgtcattctttatctggtggagcatggaatccacatgatgtgaattctgttgcagcaacttctgaatcatctatccagttttgggacttacgtactatgaagtatgtcatatttgttcctctcttatgttcgcatgaaagttaatatactgtattcctgcatgcacagctagcgtgtttcctctagtcaatagtttgtcattattaatttttgggttccaaaatcagatacctttatgttgagcttgatatgtttgcatatttacaggaagaataattcaattgaacgtgcccatgtacgtaatgttgactacaatctcaagagagaacatatactcgtaagatttctctctctgtatgcaaatattttaaatgcttgtcaagcaattccaacaaagaattacacagtgctccaaagttagaaaacaatctgttatatagattgcaaatgggtaggaacaaggaagtaattgtgtcatttctgatttaattttttcttcatagcaagaactttttatctgaaaggtagtaggtcccctatttacagaaatggtatcagatggttctatttatgcattggactgtcgattgtgtaggtttctgcggatgatgaatctggtatacatctctgggatcttcggaagacaaagtttcctgtgcaagagctccctggtcatacacactggtaatttacctctaaactcatttttgtggattattattttttctcttccatgattctgcttcatatgcacacaaatctaatgctttcgacctgaaattttgtttctagcgtgactgttctttctgaattttctttacaggacatgggctgtcaggtgtaaccctgagtatgaagagctaattctggtacccattttctcttaccttttttctcttagcacagtcgaacgaatctaaattgttattgtgcttgtcactactgacagctttaagctgctagtcgatgattctagaacaatttctgtcactcacaatgtatatttaaagtgtcagtttctgataaattaaccaaacacagagcgttggaacagactcagctgtcaacttgtggtttgcttcagcatctagtgagcataaaacatcagaaaggttaattctctttattatcgcacacaacaatttttccaactttgttttgaacttttattctaatgccgatgctgtgcagcccggtggaagcatcacgtcagcgtgtgaacccgttactaaactcttatactgactacgaagacagtgtctacggtaactcttggaacaaactgagtttagttaccacaatttcccactaaaactgcatgaagtcactatataattgctgtcacaggccttgcttggagctcgcgtgagccttggatttttgcatcattgtcatatgacggtagggtaagtgactttgcttttgacaacaacctaaagaactatggagaactaagaaatagacgatttattaccccaaacaattctaaattctgaaagcagtttggagagttcatctcataattttggtgtttgcttatgttaggttgtgatcgaatccgtcaagcctttcctgccaagaagataggtcccgatggaagaaggcttcaaagaaaaagctgcattcatatgctatcatttaagacaaattttgaatgtttttataataatcacaacatcaaaactattcttctacagttcttcaacttttactcgtgtctttgttcatctctatctctcagcacaaggcacaaagatgtaaaaccaaacctcgtgaaaatactttggtacaaagtcaatgaacctgctgctataattcagtttattgtaaagaaaatattcggatcaagtaatcaccggtgtcataatgctacacatgcctacttgttttccctttttctatagctactttctctggtaaagccacaattccgagtactaaaatatgactgaaaaaaattgatctgtcctcagatcctgataaacaaaacaatgctctatcgcgtggttctatgtacaggagacattacatgcaaaatggtgacaacaaggcttagcaccaaggttggaaaactcactgtgaagtgcccaagcagaggacagattcagtgtagtgatgtgaaggtcactgatgcgtatctaactaatctgatagcattgcttcaagctcaggctcatcagaggtagatggatcatcgtaatctaaacttgtcccgttgtataatcctctgtcctgaagatcactctgttcttcctcatagtctggctccgaccaatctgggtcatcctcttcggtttgatcatcattggttacagttactgctgcgtctttattagtggatttgtttttctttccaagttttctagattctaattgcgcctttgccttagcctctgtatcttcgcatatgcacgtggatgggttttcgtgaaattcacctctaccagctcttacttcctttggctctcccatgaaccctctctgaaacgaacggactttagatgaaaactcctcccatgtcgtgttctctttgttcatgaataatctgtaaagcttttttgcattcggcctaacagtgggtttatgtcctaagtatctcctgcaaatttcatataaccaaaagcttaaacctttgcaattccatcaaagaaacaaactgaaaaatgcttaaacaaagagatgagccaaaaaaacatagaagaagaagaagaagatgtttcagtacctcctcccagccaatatttttgccatattgccattgttgttggttacaaatacgtcgctttcatcacaaacaaggaagtcgagtgcagccattctagaagagtacgaagaaaaaggttctaactcttcctttgtagctatagtgtcttttgaatagaagtgtggaaagagtgctttcaaaggagccaatgattcttctcctccatatacttcaccagacgcgacatatatatgaacatcactgccatatcccaaagctctaagcatcagtccgacttcttctggagtgagtggacatcttccttgtcgcctctgtttctctgggttgttaatctgcaataaaattgcaaaattagtcatcggtaccttgttaatatagagtacaatgaatcgcatgtaatttctgaaacattatacagaataggcattacatgtaatgttttccatctccttctaattgctgcaagttctctcctttccttatcaccaccaccataatagcatcccgagaatgcaagcatatcaggttcatacctgcaacacaatcaatatcacttgcgtcaaacactagtatttatagagattcaagaggtaaatgtaaaatatcataattgttgactagaatatcaaaaatgtgatggagtcactagaggaactccaggataaacatatttatgtatttgattccactcgtttcacgatgcaatctcctctattagatatgagtactgaggtttaccaaaaagaaaaagctaagagcattcactacaggatggttcagctgtgctacatgttaattctccccagaataatgcccttgttcagtgacgaagtgaaaaaaataaaagaaatactaggatttagagatgagcggtggtgctaccttaaatgtaaagcaatgaagtgtttgctcctcaatctcatgcgccggaccaattcattacccattgtaagtataggatcagtgaactttagagcatggtaatttactctacatcttagcttttgcaagtcatcactcaacttgtttgaaagtctatagtcaaatttgttcagttgaactgcctgaagcataatacagacaaaagtgatataagaataaatcgagatgcttaatccaaaagacaaccactgcttcaagttcatgtttcgaagcaaacatcaatattgtagcaatcaacgaaatgggcatgccaaaaaaaagaatagtaccaaagacttgtgaaaacaattaaatggttagacttgtgaagacaattatttggaccaccctaagcaaatagtcaatacagacaacaaacaatttgcttagacatattttaaatgcaataagtaaaaagtttcagcgaaagaaggaaacttacatgccttttgagaagaacaggtaaaacacggttaatatagcatctctcgttacatttccgtggtacacgcattctacttgtactccatgtacgccctcctttcagtggaagttgctttataattctgacgtctccagacagaaatgagataaaccaatcaacatcgaaaatatgcgagaagtcactgcacaaaaattcacaaagttacaaagatgcataacgtttctcataagaaaaagctaagtatgcttaatctgtctcagacctggcatccttccagtaagacttctggtctaacttgggaacaacaagagtagcatttagaatccttgccgcaacaactgcatctacaatctgtagaaggattagacccatcagctgattaatagtaaacaaatgcttgtattttgataatccatgaagataggtattaacaagagaagtcaaacaaaactcactccagttcgttgttggttcaaaccaccactagtggctattaccaagtatcgatcatttctcgtcactgctttcgaatctgcaaacaagtaatcggattttgtatgacttgataatcagtgccttgattccatactaatcgaaagtttcatacttttcgtaagatcagtgttactaactaatggaatatgattaagagtgttacgcacttgcgaatttgctgcttgcattgctgcatccaaaaaagaattcagcatttcgtgaacgccagatatcacgatctgatctgcctccagctctctgttatggatccaactaaatcatcaaataggtcggaaaagtttcaaactttagcgaagaatgataaaacccactaaccggaatatggaaacctgtagctttgatcgcatcattggatgagtagcgaacgcgtggaggaaggcgatcggaatctccaggaggcggagcaaggaaagagagaaaagcgaagagaatgaggagagatagagagacggcgataacgagaggaaggagacgacggagacggttgtagtaagggtagcgccgccgatggaaattcatggcggccgccgtgcaactacctcgctgctcggagatatagagagattgagagagagaatgaaagtttggatttttggaatcaaagcatgttgaaaatgttactgtatttgagaatcacaaagcattgtttcgatcacgagagacaaacaacaatattctcttttcttcaaacaaacaaaatcatcagagagagagagaaattgagttcctttgtttttgagcacttcttatagagaggtttccatcttattacaatctgtttaataaaaatctgttaattttgatgacttttgactaacaattatttgatatatattagcttacattatacatttagggtaaaataaagcaaagattaatatcaaaatctttaatgacggcagtcggcagcattgattttttttactagtcttaaattgagtattagcttatacgtaattcggttaaactcatatttgcctaactttagttgttatcacattgataaaaacattattatcagggcctttatatgaatcaatggaatacacatacatataacactcaaagatatatgtccccaagtcggccaaaaaaaaaacaaatgtccctaatagttgacaaagaagaagagaattggcctcagttattaagtaaaagataatagttagtgagtaatgtaattaagtaacaaacataaatcattttggttaaaagagaaaatatcttcttctttttatttatttaaaatttaggaaagtatcattattttttgttttgcattgttgtacaatatactttagttagaaatttggtattctatggtttgaaatcagctaagtaaaggattggtcctctatctatggacagtgatttgtatttggatgagtaaactacaaaagaaaaacaggagcaagttgtaacattattaagtttgtttctgtcgtttccatctgtcctttatgttttctcagtaaatattctcttctttgtttcaagtgatcaagtttcaatatcatatgcattgcacttgttacctttatttcaaaagtggttaaatccatattcagaaaacatacttataactttgtataaccaggtgcaattggaatatctttggctaattctttgatacacagttgttgaaaggtaaaaataaacaaaagttacagtaagaatctaaagtaaataacaaaactcgcatttgatggttcgcaagtcgccttgtatttaggtggttcgtagccgcttaaaaatgcttctaaccgtattgttgatccgtctcatctaaccgaatcgattggtgacctccaaaactgtgttgtcactaactagtttgtataggatacaaaaccaaaacggagcagcttagtgaaatggcagataatcaacaccagctcttattcaggaaaacacttcccattctacctattaaccgtacttgttggagagtgctctggcccaggggctttggtcttccgaccatattatccggcccccgagcattgcacaccatcttagattcagaagtgctgcagcaagatgctcctcagattttctgaacagttcgattatctttgtttcagcttcagggtcttcgctcatgacgaaattttcctctagctctattttcttgtcctgaagactctccttgtcttcttcgttgagcatccttaagctcagaacattcaaagcttctatagctgttgcatgataccctttctccacataacaactgaaaacataatgacatgtcgttggatctggattcactttctctcggtgcatttgctccactatgtactcaatcacatcaatcattccctgcagacaaaagttatgtgtatactaaagcagtttattcactttcattactttaagcgtttttacaacaaatatctttaccttctcaaacgctttacgcaaaatggtgttgtatgataagacatcaagatgtatctcttctaatgccgcttggtccaagagattgagtgcctcctcgaaattcgcatcattcaacaaaatctaagaggatacacagctttagttaattaaaattaaatgaacagcaataagctgctagattccaaaaaaaaaattggaagttctgagcgtgagcgatggttcaagaaaatttggtatgtgtctgtactgtgtgtagaattctttcatcctgaactgaatacttacttgtagcaagttcttgagaaacaatggcagcaaacttttaaaattgtaatcagatactttgttattaccttcatcagagcagtaaatgtaacagcttttggagaaaacccgtcacggatcatcatggaaactagggcacaagctgatttatacgagtgaataaggctgcaacaatcaatcattatattgtaggtagcaacgtctgcagggcagccacatgatttcatacgtttgaatatattgatcaccatgtcagtctgcatgtaatttaagtagcgatcaatattgctatatatgctggtccagtggaaatttgataaagctattagaccatgaaaacttacttcgtttgcctcgagaagtgaatgaagcactatgttgtatgtaggcgttcctagatacatattgctgtgagcactgaggttctcagccttttgcaggtgtcggatcatctcattcaccataccttcagctccgagagctctaagctgggaaagaaaaaggaaagtgtaaacgataagtccattgttctgatatataacacaaacatacacaatgaagaagtaaagattgatagtatcgccttaaaagggattttccagattaatattacatttgattaatctgcttaaaacaggtcaagacctatctatatggagcagaaactaaccacattcagccttgagataggactgtgctgaaaaccatttctcatcatgtccatttctatagcgttaatccttttacaacagtctacttgggacaacatgttgccctcttcatatggtgcatttacattaccaaataaggaaaagagcagttcataggtcctcatatctggacgcagttttagctctttcattctagccaaaactcggacagcacgctctggttgatcctacaaagcaatagtaagaagctgaatctcacagttacacccgtaaataaacagaataaagttgtttaggttcaaggattatgtactaaaaatggacacatactaacaagacaaccacttagaatgccgattatttttgtacgaatatttcgagtacgaactaatagaacagatcattaaccctttgttccaagactctcctatgattagagtggcaacatagtcacaagtacggtcttttgaaatttctatggcatctaggatcaaactaatgaacttgagggttcgggaaatatacttgtaacagaatacacaaacagcgaaaggtaaacgaggtagctacggtatatagcttccaatatgtagaatcaaactaactcaccaaggagtcatatgcagcaagaaggttattgaaaggatatgagtatgagcattcagatatttgatccagcagatgttcagctaaatcaacttgaagggctttactgcaataggctgcaaccgtagctagagttgaatcatatggtttcagattctgctgctgcattactttcaactgcgtagagatatgatatataaagagaaatcgttataaaaaaaaccgaaactacagaaagaaagaaatgttgaaagagatggcttgtacattatacaaactcctaccagtgtcatgccatattcatatccttctggaaatgcaacagctctaatgaaaccatcatatgtgtgacttgatggtagcaacccaagattttgcatcttttagtgcagataagaagaaagaaagaaatgaggtttcaccaaataccacaaagcaggacccgaaccagttaaaggacaaaagggaagcggactatataacagacttttatagcccaacgaggacgtaaagagcgtatcaatgatcatgaaagcttcgaaatttaaatcaaggtcatagacagaagatcaaaattcccactataagattcgttaatgctgcaactgtcttctacaaatgttcaaagagtttttcttctcataactctacagtatcacgcgcagagcatagcgagtggataaggacatgaaatggatgaatgggaaagaagtgggagatacctgaagcattagctgctccgctagctcagagtttttagattgtccacatgcatgaatcacatcattgaacgaccacctgaggaccctaatagcaaggattttattgtgacctttcggcaaagccacttttgaagacgaattgcagtccacaatgcgatcagttactccaaaagcaaatttctctgatcctgtttcatcttttgatggtacaggaatatacagtctcgtggaatgcaattttcctctgttggatttaacaaagaactctcctcttaaagctagatacaccatgtgttgcaataattcatatgctgatttcaaatcccctagccttgtaaaggaccatatgaatcttctgagagaaagtatatccaggttatagtggttgacatagtgtttccagatatcattgacagttgatagattgcgctgaaaaactgcaagctgaaaataatattaatcagataacaaagaaaaagaagataattatgcagatcaatgaaaatgaaacctccatgtcaaggaacaaacgaaagtccttaagggacagcaaagctaagacagaaatggagacaataacaaaaagataagtcctctccagatcttctacactccaaattttaaagttggcatacgaccagctcttgaaaaaaacaaaaagattaaggcactgaaaaatgatatgttcttaactaaccttgagaagtgctacataagttattccattcttccccactctccgttgatccatcaattccaaacatttactagcgtgatatacgcttctcgttcgtgcacaggctccaagaaaaaagttatagataggcagaagaggagatatacgatcatcttctctgacagcgtgaataaactctgatgcctgaacaagtatgcccaaaactatttactcatctcttttagtcgcattatgtaaggaaatactggctttcgagtggaataattataccttatctaagtgtcccccattacaaagggattttactatgaacaacaaagatctgctgtccagactaatttccttcttgcacattacactgtaagtctccatgacaaactacaggaacaaattactgccttgaggtcagagacaacaagagtactgtattatgagaaacaaattacagatttacatctcagccctaccaaaatttcattgaaatataacttgtgaaagataaacgaagattaaacaaagccaaagggagactttgtcatatatcaaacttaccacaggatccggtgatcgagcacaataatatagaatatcatgaaaatcatcagcactaagtgaataattcccctgtattaacttaaaaagcaatgctgacgctccttgcctctctcctgaacgaagggcatcaacaatctgcaactgtaagatctttgactcatcttggcatcgaatgaattcattacctgcatatggaaacatgcactcttaagtcaaaaaaatctcgtctttcataatccaagtaacatcaaatagatattgagacaaatagaccatacgaagaggctaaaatcagacataccaatcattgtcgtgacactacgagaacaagaacaaccagccccattatcaattccacttagtcctcgtccctataatcaaatacccatttaatcaaattgcaataagtcttcaaatttaattgaagaaacacagggaacagataactaactcgagatacgtaaggcgttaactttgacgacgacgagctcacaataaatcgcaatggagaaagccatcttcattgcacaaacacgaagcaagtcaatgaacatttattgaaatagtaggcaacacaaaaaaaaaaaaaaaaattgccaaaacaacttacagagctctgtacatggctttccaggctcgattctgaggttcttcgagattagaaaaggcgaaaacttacttcacaaactaaaaatctaaactctaaatcagtaagcgaacatttccatttatcgaaactcgtttcaattatgtgtatctggttctagcagatgcgaccatgttagaagaggagagaagcttgccgaaaagaaaacatttcaggtttatcattctgatggaaaaaacaattattgggccgtattcttcacatttggcccatttatgcatttctgattgggcattccaatttctctccggtttaatttgatctgggctggtataagtttgtatgatagctattagcttgccttgatccatggaagaaagattaatctcataatatttatttttctatcaaaatgaattgcttaaaggtgaaaacttgtgaaagatatttccaggtttctaacattatatacataacatagtctccattaatcatcatgaatactaccccaataaaaagtaaatcaagaacaaaaaaaaacataattcaatcaacagcacctgatacaaaaatatcaaactatcagtgtgcttaaacaatgaaacgacataatagtattaaactatcagtgtgcttaaacaatgaaactacataatagtatcaagagaataatacttgccgagtcatacccattatcatctactgatatatatatttttgtcttatgttaagatcagtctactagaaatgagacttcattattttttataaatgtcaaaataacatagaacatcagaacatataaactaaagcttaaagtttacacttttttttttttttataactttattagatgcattgataaattatcatttcatttactccacagctctcaattgaacataacccatatccttggccatctttctcagaacattctttcgaatcttcccagtgggagtcttaggaacatccgagaagactactgtctttggaatcatcttcatgttcttattcccaagctttctcttgcagaactcaatgatctcttcctctctcgcttcagctccttctttgagcttcacgaaagcacacatcgattctcctaaagtttcgtccggtcgacccacgacccctgcgtcataaaccgccgggtgactatagagaatcccttcgatctcctttgatcccacgatttctcctccgcatgttataacatcttgtgacctatctttaaattgtatgtagcttcgcatgtggaaacatcataagcataaataaattcaaagtaatacattcaaagtaatgcatgattcatttacttacccatcaggatctataacacccatgtcgcgactccagtaccatccacctcgaaaagccgcttcagtggcttccttgtccttgaagtaaccgctcatgactgtatttccccggagagcaattaccctgatagtctttccgtcgtgtggaaccgatttcatggtggttgggtccaatacatcgacagcttccttggcgaaatggttgagaccatctcttgccttgagccttaaactctcctcttcaggtagagtctcccactcgggcatccacaaacaagctgttcctagtccatacacctccgagcatccataagccatcatcactttgaatcctagcttcttgagtttcaacatgacctgtccaaataaattaatatctttactatgattctatgttaaatattaatgtactgtgacggagctaacgtataaagcaagggattgattatatataacctcaaaatatggaagttcaaccaaataagcctgattgaacaaacatgtaattcaaaactctgtgatagttagttttacctcaggaggagaggatcctccgctcataacctgtacggtccatggaaacgacttcttgaccgagtctcttgcattagcaatcatgttgagaaccggaggcgagccaccaaagttagttaccttgtgcttcacgatactatcaaatataacttcgtcgttgacttccctgagacagacgatgactcctccaaaagccgtaactgtccaaatatagcaccacccgctacaatgatacataggaactgtacatagataaaccggcattggtttcatctcattcataacaccaacagcagttgcgttcagataggcaccgcgatgactatagacgacacatttgggagtcgatgtggttccagatgtgaagttgagggcgattggatcacattcgtcaactggtcgtattggtttgaaattagggtttccagtggagagaaaatcctcgtattgttcatattttgattgctctgttggattttctgtgattgtgatgatgagaggtttttcttcaatgtttgagaggagactgagagattcttcagcgacagagaggaactcagagtcaacgaagaatacttttggcttcgttttctccagcgccatcgcaagcatctgagaatcgaatgtcgtgttcaacacgcaaagtactgctccagccatcggagctccaaaataaagctcgcataacgcaggaacatttggcgctaaagcagccacctgataaaagaaatagtttaaacaaaagaaaaaagtatgaccaatatataaaagtcgtttaaccacttacaacgtcatggcgagagagaccaaggtcagagagagcagatgcaaggcggacgcaacggtcacgtgtttggtgccacgtgtactgaatatcaccatacacgacagaggttctggagccgaagacgacagcagctctctcgagaaagctgatcggagaaagcgggacgtaattcgctgagcacctcattgttccttccatttcttttctattgttattctctattgagctactaaaatcatataaaaattgtggagtatttataggcaaactattttgtgtaacgctccaaacaattaatatggaatctttgattaatatggactacaagaagccaaattggcaattaaatcagaatctgtgaagaagatttgtacattgcaacatctgtttagagaatctgagttgtcacaacttttttttttgaatctaatcaccactcggctagttgtcacaagtgtagaggagctttaatttacaaacagttcttatctttttatttttttgggtcaactaaacaaatcttatcttatcttatactaataaaacttaagagtaaaaacaaagtaacaaaaaaggcacacaacattcaactaatgggcccaataaactaatgggccgatccaaaatctaaataagaagtccataagagtgtggagctttaacgagagaagctaaattgttcaaagctttttggctgctaaaaaggaaaagggaaggttcaattagggtttagtgaatcgacgaagatgagtcggagtttggggattccggtgaagcttcttcacgaatcgtccggtcatatcgtgagtgtagagatgaagagcggtgagctttacagaggaagcatgatcgagtgtgaggataattggaactgtcagctcgagaacatcacctatacggccaaggtaatgtcttactaagttactagggtttcgtttcttggccattgcctatgtaggagctgtgaacagtttagcttcttaggttgtctctttcttgtgatgttgagagtagttcaattttggaggagaattgagaatccttgtgaaattcttgacccttaaattgtgttcctagtagtgattgggtttagttcctgtatatgctagtagtagagaagaaatgttattacaggtcttgcttatgttgttactatgtagaatcatgacatgtttgcgattaaacaaattacaagactatataattgatcttgaattgttactacagatatatgctcttacacatttgtagattgtgattagaaatttagtatcttctattcatgattgttactaaactttcgtttgggctctttatggaacaggatggtaaggtatcacagcttgagcatgtcttcattcgaggcagcttagtcaggtgctgctagatataaactccttttgacatctctgcttgtttcctacttatttacttttgttggagtattctttttcaacttagctgactgttatgtgacattttgtaaaatcttgacaggtttttagtcataccagacatgttaaagaatgctccaatgttcaaggatgttaggggcaaggtaaacttcttgaacgtgatggagaatatcaatcccatctatgctttataaacatggaagctaataaacatcttgtttacttgatcaatacagggaaagagcgcttcactaggtgtaggcagaggtagaggtgctgcaatgcgagccaaagtaagttcacctttgcctaagtccttaatgtttctgatttacatctcaagaagacaatgttgacaattcaaagcaactaattgaattttgtgatgtcatactcagggtactgggcgtggaacaggaggaggaagaggggctgtgccacctgtgaggagatagtttagttaaccctcgtaatgtagcttcggctcgtgagacattctctgcagtatccatgagaatccgccatcttcagctcgtcacttatgcatttaaggtacacagcaagtaaaatctctaagacatggagggaagagagaaagaggaactagttctgtgttttgggttactaagatgtttgaaaaattgacatgttttgttaatgtggtcattgagagacttcccacatcttatgtataatatagcacgattcaaatttctataatgaatgattcgtctttttaatcttggtagaaatcagaaatcataaaatgatggttttctaaaagcggtcgtttttatccatttattatattcattcgtttattaatctgataaagatggtcggataaaaacggagaagacacttgagttgtagtaggaaataaaacattcgacataggtaatggtaaaaagcggcaaccgcgatttcatggtttagtttcggccaccatgactggaccgcggcccgagcggcttcagcataggtagttgtaaaatcgactggttcttgtttttttcaagaaatttagcgacttgaacgaccaagtcaagagatcaaagtgattatgtccacaaaaccagaagcctaatttattttcgcgacaaatgttgtgaacttgtgattgtgagtgataagatatgacttggacatttggaaagaagagcggaaaaatatgttgaaatgaagaaccctaaaaagttaagagttttaaaaaacgctttctgttattctcttatcaacgaaaatgagaagactaaaccatccacagatatttcgaaaacaaacaagtgaacccacacagagatacgtacgtgttcagaaacttcccccccatatgatgcaacttatgttgctctctcttcagtgataaaattaggtcaagtcattatagattccgtgtgacctaattttaacagttgaatcacagcagaagaaacccagctggttcaattcttgcagcataaccaaatttggatgtgttgtatttcctgtgaacacctgttagcttccctgtccctgccttgtgatgcaaaccaaccatctttctcgaacattccctgtgagagattgatcatcaaaactcaacaacacttttagaaattccaaattatatcagtagaaaaagctacttagttttgatgttcttacagaagcgcttcttcggtgtagcctgagtggaactcactggttttgctccaatcctcgtatcctttaagtgtgctctgagcagtgtagatcgccgatgcagccaactgagaaggagtgtactgaagcatctcgtactccactaaacaaagctcgatcatgaagaatgataaaagctcaagctgaaaaaccaaaccttatgatcatgttttgattctttatatatcacataagacagaagattatcatcaaagttacacaaacctttttgtcagattgtgcagctttgagaaaccgtctcatgaacacatatggagttggcagacagaaattgaattgcaaggtattcgccattaacttctcctgcaagacacaataatgatcatccacatataaagcagagcatccatggttataatcaggacaagatttagtgaaggattttaccatatcaagaatctctgtcctagtataagccttgtcagagatcaggattagatcatcaacaactggaactgaaacttcttcatatttgcaagcaagtaacatagctgttacacccacaagctgaagctttttcctcgcgatatgttgatgaaccgcaagaaatctgtcaatgagattgattgtcaggtaaagcgtctcctccatcagctcaaacttgtaatgtacctgcaacaaagattcacagtaagctttacagtgagacaactaccaacaacagagcaattttatgttcatgtttttgtgtgtgtatatatatatacctcaatcaaccaatcaaaaaggattcctctcatcctctcgttaatgtcatgttgattctccatgtagttaggcgggacacagctacgacactgcaaaataattgaaaaagtttcaatcttgaagctagaatgatcataatgatacagaaacagaacactaaaagttacctcatttttcttgtagaagcaatatatgtcattaatgtattcaactacagataaaggattgttcttgtcacagctgtctatatccatcacagactcttctacttcagcatcaatatcatttgaatcttgcatttcaatcccttcctgcagaataaagacaacaggtttcttcatccgagtaaccaacaaaaaatagtggcttaaataaaacatgttattattattaccattttgtcaatctcttcaagcattgcttcagtatgttgaacaaacattggttcattaaagtctccttcttccacatctgttatgattctatctaatgcttcgtttgaaatcaagtctggtttcttggtttcctaaccacaaaaaaaccacttggaattagacaacctaaaccatgtcatgttttcaaatactaaattcagatagaatcaatataaaggtacctccttgtggatttggagattgttctcagctaattgagcagcaaatttcctgaaattaaataaagaattaaacaaactcatactacaattttgaaatcgaagcagaaatcaaatgaaatcactcacctagtaactggtcgatgcactggaacaggtggaatcttcttgttacaaatcccatttttcctgagaaaacaattggttactaagataagtctatgcaacgtttttattaaaggatcattgaaagaagaaagtaataaaaatataattactcagtgaatggtctcttgacagcacaaggatagaccggagctccgatgatgttcttgtttatattactcagtgcccttcttgtctgtccattcgtcggaattacctttcctccacgtaaaccccctaacattggcaaaatcatctttttagttaatcaaacaaaagattgatttttgattaaatgggtcttcttgtttttaattctgatctaccttgttgtcgattcatcggtccaatgactccgtgtctgttctcatccgatccacccattattatcttccgtatctgagaatcgcagaaacactcgcatattaacaatccgaattaaaaattgggtcttgaatccgatttgagaatctaaaagactcgacgatcaagaacaagatgtactctcttaaacccatatgaaatcaacactaaagtatttaccttgaagctttcaacgaaactattaacctctctctatctctatctctctgtcagaactcagaagcaaaatcccataacagcaaacacaaatcaacctctggctctcttcaatgatcttcaagagtctctctctttatcttctttctctcacaacgaaaacaaaattgaagaaaaagtggtaaaagagactgtagagagagtaatcaaagatttcgaagacgtgaagagcggatatatgtctgcaacacaccaaaaaaaaaatgttgttttacgaatcgttatctttttttcccctttttagaatcaacggctagttaatcttaaccgttggatacaacctcagaaaaaaaacctaatggaaaaagagaataggagcccaacggctatatttgtaaccatgtgcgtttttcaaatttggcttattttcttcgttattacttattactaccacgctcaagtctcaaaggtccaatggtcaatgttttatttcaatgtcaccgaccaccaaccgcttcctcattattaagccaatctaaatattaataccagtcgatttgaccccaaaacaaaaaacaaaacttagaccacattattattaacccaatctgataaattttaattttacccgattctgatttttaatactcaagctagtagatgatttaaatctttaaaccttagactaacggctcttcgcctttttgctttttcctctttacatctttttctccagtagctttgttagtcaacacattttccaaaaaggttgaaaataagtcaaagtacaaactgaattacccaatacggcccaatatcctgattagagagttaggcccaatatatcatcagatttgcaatcgcaagtctctttcaacttctcgtcgaatgttatactctcctcagagtttctccggatctttcaaaaacaattccggtgaagatgaatcagttctgtgattcgtgatttatgttactcaatcgatttctcatgttatagtcaccgatctgtatcgaaattttggtgtggattcatcaagcttctcaaatggagttcgagactcacgaagatgcgtatttgttctacaaagactacgccaagtccgttggtttcggaactgcgaaattaagcagccgaagatcaagagcttcaaaggaattcatcgatgccaaattctcctgcatacgctacggaagcaaacaacaatccgatgacgcgataaaccctagagcttctcctaagatcggatgcaaagcaagtatgcatgtaaaacgaagaccagatgggaaatggtacgtttacagtttcgtcaaggagcataatcacgatcttttaccagagcaagctcattatttccggagccatagaaacacagagcttgtgaaatccaacgattctcgtctcaggaggaagaagaacactccgttgactgattgtaaacatctcagtgcttatcatgatcttgattttatagatggttatatgaggaatcaacatgataaaggacggagacttgttcttgatactggtgatgcagagattttgcttgagtttcttatgcgtatgcaagaagagaatcccaagttttttttcgctgttgatttcagtgaagatcatcttctgaggaatgtgttctgggttgatgctaaagggattgaagattacaaaagtttcagtgatgtggtttcttttgagacgtcttatttcgtgagtaagtataaagtaccactagttctttttgttggagttaatcatcatgtacaacctgtgttgcttgggtgtggattgcttgcagatgatactgtttacacttatgtttggttgatgcaatcttggttagtggctatgggtggtcaaaaacctaaagttatgcttactgaccaaaacaatgctattaaagctgcaatcgctgcggttttaccggaaactcgccattgttattgcttgtggcatgtgttggaccagcttcctaggaatctggactattggagtatgtggcaagacacttttatgaagaagttgttcaaatgtatatacaggtcatggtctgaggaggaattcgataggaggtggttgaagctgatagacaagtttcatcttagagatgttccgtggatgcggtctttgtatgaggaacgtaagttctgggcacctacttttatgaggggaataacatttgcggggttatctatgcgttgtcgttcagaaagtgtgaattctttgtttgataggtatgttcaccctgaaacctcacttaaggagttcttagaaggatatgggctaatgctagaagataggtatgaagaggaagctaaagcagattttgatgcttggcatgaagcacctgagttgaaatctccatcaccttttgagaagcagatgttacttgtatactcccatgaaatattcaggagattccaacttgaggttctgggtgctgctgcttgtcaccttacgaaggagagtgaggaaggaacaacttacagtgttaaggactttgacgacgaacagaagtatttggtggattgggatgaatttaagtcagatatttactgctcttgccgttcctttgagtacaagggatatctctgtagacacgcaattgttgtcctccaaatgtcgggtgttttcaccattccgataaactatgtgttgcaaagatggacaaatgcagctagaaacagacatcagatcagcagaaaccttgaacttgtgcagtctaatatccgccgtttcaatgatctatgccgccgagccattatattgggagaagaaggatctctatcccaagaaagttatgacatcgccatgtttgcaatgaaagaagcttttaagcaatgtgctgttacgattaataccatcaaacatcccgccaggtgtgaagaagctgcaattcaagcaggagatcctgtccaggaagaaaatcaatatggatccacatcgacacagattggacccgaacctaacatacatgcaggcaatgttccatggcaagctgaaaccagaagggagaagagaagtagcctaaacaatacatctaaaaaggcaaaggttcactagcattttctactatgctgtcaaaatcatcgattaatcttttatgggtactcaataggctataatatcatacatatggccaaaagacaaacaaccatctctgctaagctgtcatagcctgatgatgtgatgcgtaactttgtttatgattgatctttcttcacttgtgcagcatgtggctcaatctgaaactgttggtgagggaagccaagaaggatttcaacatgtggtatgtttgatttttctatctgcatcccgaatgcaaaccactcagtgacatttggtgaacttgtacgtttcatatggttaagtgttctgatcgttgtcaattacaggctgatccaagacagtcacaggcggtattggcagggcaatttcacaacacaatgccaggagtattccaaaacttaattaacacgaacttccaaaacattccggctacaaatatgcaccagaacaatccccctgggtgaactcggtaaaaaaaccactgccaacaagcttgataacttctttgtgtgtaatatattagggatctcctactcaactaatttatcgcttcttctttggttccacttgttgttaggataagttaatagagtaaatggtgtatcttttgattgactattccgtgtaaaggtatggttggcatctgtttgaaagctaactaattggtcatgcttggaaaatgcaagcagtgtgagaaagctcatgaacaatttcaagggccatgatcagtgtgggtgtagaaacaagactggccggttcaaagaggcattttaattcttaacattattgaaacaacaactcattactctatctatcttcatcaagtcatgtcttcaggttcttacctactactgctatgtgttgtcaggctctgttttctcctgatcttttgaacctttaaggaagagaaatggtggcatgagattgagagattccatgtaaacatgtaaagggtttcctttttagcttaaggcataaaaaacaggcttctggttttgcagagagagaattttttggtgatctcgaccgaactatccctatgacttttatatccaatgaatttgaattagcctgttattgatacttgtgacaatcttcaacgcattagatttgctaatatcattattcgtgattcttctactatgtgattggcctcaacgaaatattacaatcttcttaagctacgaacgattaagattagtttttgactttttccaaatttacgtttggtgctaatattatgagtatgtttcaaagatttaacaagttgtcaatatgtccgagtggttaaggagatagacttgaaatctattgggcttcgcccgcgcaggttcgaaccctgctgttgacgatatttttttaaattttcattttttaggctcaaaatcgaatactctcatcttacttttggttctctcatagtttagcgtaccagcacttaccaagattagatggactctcaaacaaatatttttttgaacttccttaacttttacctggtaacagatctcaacacaaagaggaaacacataagaattcttcattcgcatataaatctgaatcgggtacaagaaaaatatccaaacacatcaaaatgtaaagaagaaatcgatattgttcaactactggatcaggaacgaagtactcttacctctaaatacaaaagaatttcataaccactaagtacaatgtagttctatacttggaaactaaatcgtatcagtaccgaagaaactccagccactgtaagctccaaccactatgatcatagtttctcttctgatttcagagtttcctttatatcgacgctgttactctccttgttctcctgcatttcaagaagtttctcttgttcctcgtcttgctcttgcggtttagcttcttgtgtagcattcggtttcttgatggtagactgttgatacatgactccaccaaacatacaaaccaagagccccaaggttccaacaaacgttgaatgtttatcccacaccatcaaattgatcaccactgtcaacagcttgttcacaattccaagaacggtgaaccccgttgcagaaatggcccgacgacatgagaacccgaagaaagagatagccaagccaaaaagacacgataaacccacgggtaaaaccacttgcaacgagtaccaatcagtctcgtcagtgatttcatgctttatcttctttaactctcccattataagcagctcaaggggaaacaaaagcagagcctcaaggttattgtagagaacaagtccccaagtgttcaagccaatcgtcataaccacatgcttgatgtaaacaaagtctatagtcatactcaccagatacgcaagagcccagctataagctgcgattgtaaactgataatccgtgaaaacgtaaagcaaacttccaccaaatatagtagccaaagatccccacgttttaacagatggccatggctgatgcaagaaaagcgtttccccaatggcaacgaaaatcggaacagcagagcgaaacacgatgaaagtatcgacattggcgtggaggagaagctcactgttggtaaacagagacaagtagaatatcatagctgcgggaagaaaccgccacatggtcaatagattaagcgaatcatgctcaattagcttcatctgagcacaaagcaagacaccagctgcacttgtaaagtactgcatcgcggtcaatgcgccggggtaaggaaacttcatgattgcccatttgttgatgattgagagaagagaagctgagagacagtaaccagcagctacaccatagacagaagcttgacgaagaaaaacactataccaagtctctgggcttggttctggaacattcttaacctcgattacagttccattttcctcatcattcgtcgacatttcaaatgaaagcacagacgaaagatcggatttttacactcagtgactcattagctttcgacttgaaactcaaaattgcttcaaattagagccgattctggaagtattcaagctctgcgagcacacatgaatgtaaaaattaggggttctacatgaaaacgatgaaatcgatcgcaacaattagatcctgggtgattacgattagatctcataaatctagctaaagttcctacaagactacaagagggtggttcatcaatcgctgaaacaattatctaagaggagaatgaaagaagcttacctcttaggagattgcgagagatagaagaaacgcgtcgcggaagaagaacagagagcgaagcttcttctttagaagttaaatccaccgtgaagctgtattatttagggttaaactgtttaagagtgttcacttacttgtatatataagagaatattataaacgtaggaaacaaaaaacaatggatttgctaataaatttattgatgttattattatgcaagtatagtgagattagtgacaacaaaagagtgatatgtatcacaaatttgtgcaaatccagttttccactcttctatgaagcacatcaaatacattaggctgtgtgtatcactcactatatgtatgcatatactttacctaatgaatatcattcaaattgtactaatctctatattaaatgcaattatgcaaacaagtagttactcacaagttgagcaaggtacaagtttaagttgaagagacaattaaataacaataattataaataattacattggaccttttaaatgttgaccaagtggtttcttggcttctgctagtcggattttgcacatgaatgaggaggtggtaactaaaccagagccatgtgtctgtcacgcacgagatccaaagcatcttgtgatctctttcactcttactggtcaagtggtcataggtaactaggtaagagagacttagaaaaagcgttgttgtttcctcaaatattgctctatgagtatgagtgttccatttcaacagattaattatataaacgtaataaaaaaagtcctttttctcttattacgggcttgaatcgcttgattgattggcattgcttctatgcgttgttactgtctgtgtttgcgatacgctcttacgtcttgtgtttgtaaactatgcacaattagccaatttttaataattaatcgactagtggtgaatataaaatctgcttataggtacagttgatgagctttgggtgtagtttacaaaatcttagatccgtctttgggaaaattcatattaatgatggctatatcaagttggcttcgctttgattacatatcaaggaaaacctttaggatgtgtattgattaaagttaataaccattcactatactttcatgttggtcattgctaaacgcttaagtggcaaaggatcactagttttctacgatattaaaacctaatatagattttcgtctgtaatttatccgattacaaaaaaaaagaagaagatgaaagtgaatcactccataggtttaccaaccaagataatgtcagctatatcaatttgcgtgtgacaagacaacaaaactagaaactctttacctaaggtatgacgtgtggaattatcacaacttgctgaaagattattcattattcgaccaatcttctaacttttttctttttaaacaaaactttattggttaataccaaatcagagaagagattcccatggcaaggaagaataacttttttttttttttaatagtcggagtcttcttccatacatgttatgtcaaagtttattgttcctttcaatattcaatcataaacttacttacgtctgctatttattgctaaaaaaaaaggtttttctaaattcagttcatctaaataaacaaatagtaagatggtaacaattgaaaaaaaaagattgtctagggggaagaacaaaaactaagacgagttgcattttgcttcttcgcaaatgcaagttgcaacaataaaaaatcatcttaacctctcgcaaaccacatttttagaggctaaagatttgacaggtaagattcatatgtcatttggcttgttataaaatggtgaacactaagcccttttttcttcaactctttatgtttttctagacagtgaccaaaacctcaaaacattgtagaccactacgaaacggattaatcagttttgacacttcttctactacatatacgtgaatgattttacaagtttcttgaagatgactaaaagagtcacacatctccacggggctgagtgggacacacattgcccaccatttctattacaaagtatcttttaatccaataggacaaacgctgaccaaaaaaaaaaaaaaccaatagggacaaacaaaaaaattgaactcctattgatttttattttaccaatgggggaaaagcaaaacctactccccaacttgctccatcaattattaattttctcttaaaacttttttctttagcaacttttaagttaagtaattattacttgacatcttctctttaactatgcgtttagaatctttctttgtatttaacaactatcaaatagttctcctttcgagggtgtacacatggaggactaatcagatcattttatgtaaacaatgggagaaaatacaccctctctttccaatatcgttgggtttacaatgtaacgtatcaaattaaaagcaagtaattaacaaagtcagcggcgaaaattcaacttttatattcattttttttataacccttattaatttgtcaactctacttggtccctttattattggctccaaaactctgcctaataaattatattgattccaaatcaaaggcattttttaataatgattagtgctaattgctgatattttctgacttcttacatagaaatatcttttttttaaagactacatgttgagaaattcgctgcccaaaattctcaaaaaaaaaagaaatggaaaaaataataaaatctctttttctcttactctagaatatgggaatctccgtcctccaacacccacgcagcctggaacagagacagtctttgttctgttgtgaagaaatactctaaagaaaccaaacaatttattagttttacaaataaaaaaaagtaataattgaagggttctttttttcccgatgcatatatgagataacgatgcctcaaaatatgatttttttttcttcctcttggtgtatggtaatttatgaggaagagaggtacacattaccttacttgttcaccaggaacatacccatcaaagagacatatctttacagctttattttccctcagatttggggttcttctttcaactgtttctcctgtctctcacaagacaagtggtcttttgggaatcttcaattaaaaaggataaaaccatttaaaacctacttcaagaatcttccgagaatctgacgtctttttttgtgagttttcgtttctattttttttttttcccatttctgaacttcaaaagtctcatcttttttgttaatcaggaatcagattagtgttaaaaaatattccttctttgattggtgttaaatcagtatctcttaacccacaagagattagggtatatttaaccaacttgtaagaatcaaccttaaaaagaaaagttagggcttttcactaatcttgattctcagtttcttttctattacaagatttttgctttgatttgattctcttcctgaaatgtgtggttctttttctgttctgttctgtttcatcttaatttgtttggggtttggtgaaaaatggatactttgttttttcagatgtggcttcattgatttgagtgagctatggaaaacaattctcttcctatggatccagctatggattcttcattcatggacggattacttctagaaggttgctggttagagacaacagatgcatccgagttccttaattttagtccttcaacttctgtagccccttttgatccttcttccttcatgtggtctccaacgcaagacacatctaatagcttatctcagatgtatggtcaagattgtccagaaagatcaagtcttgaggatcaaaaccaagggagagatctctctacctttaacagacgttggtggattggaccaagtggtcatcatggcttttctgttatggaaagattggttcaagcagtgacacacattaaagatttcactagtgagagaggctctcttatacagttgtgggtgcctgtggatagaggtggtaagcgagttttgaccacaaaggaacaaccttttagtcatgatccaatgtgtcaaaggcttgctcattacagagagatctctgagaattatcagttctctactgaacaggaggattcagattctagttccagggacttggttggtttgcctggaagagttttcttggggaaggttcctgaatggactcctgatgtgaggtttttcaagaatgaggagtatccgagagttcaacatgctcaagactgtgatgttcgaggcacgttagctattcctgtgtttgaacaaggtagtcagatttgcttaggtgttattgaggttgtgatgactacacaaatggttaaactaagtcctgaccttgaaagcatctgcagagcacttcaggtttttgtttcttttgcttttgtcgcctttgtctttgaaataagctttcttggaaccttttaggcattgtttaatcatcttcacaggcagttgatcttagaagcacagagattccaataccgccttctctaaaggtaatgaagttttaaaaaatttcgctttttgtttatcttcgtttagcttacttaacattaagccaaatgcttctgaaatcagggaccagatttctcttaccaagctgcattacctgaaatcagaaacctcttgagatgtgcttgcgagacgcataaactaccattagctcaaacatgggtctcatgtctcaaacaaagcaaaactggttgccgtcacaatgatgagaactatatccattgtgtatccacaatcgatgatgcttgctatgttggtgatcctacagtccgtgaattccacgaagctt

SEQ ID NO: 1018 - DNA, 103353 bp, Arabidopsis thaliana
aagcttctccttttcccattgatcctaagttcaaggccaccggatcttccccctctggtgtgtcaaatgaggcctgtagatataaaatacctcagagattgaaagttttgagtaatattttgagctagtactattttaccattttgttgttctaccttgtaccaagttagaggctgacttttggagtctctgtactgcttccactgaacttttgcggacccatcttcagtgtaaacatggaatttctcccctttcaggccaaccttcacaacgattttgagctagtatcagttaacatgaaggagataaggtctcttgaagaataaaactcataagttttacctgatatccccaactatagttgttgaagtacagttgatatcttccattccaaatctttacgctccgtgatccaacgactctcctttctagatgtgctcctgaattctgtgttacaaagagagacgccgtcagaaaaaatgtactccagatggttttttgatatttgctacagatactgatgtagaagtactctatctggagcaaatattgaagttcagttggtaagactggggctcaccggtaatcctaccattacgctgagtaatgccaagttatttgtgccattattcaatgacatatttttctccagcaaaaatctgtgcgctttgaaagttccatgcatagaacctaaataaaactcaaagttagaagcatttaactttgatgatgccaaaaacctttaaccttgagtaggatattcaacggtaaaaaggcatacctatgaatctcccattaacaaaggcgtgtagagcatgtccgagatggttgactttaagaactgatggagctccttcagattgctgaaacctttattgcaaaagaaaaattataacttacagaatatccaacaaagaatatactacttatcttgactaatgctatatatcttacgggatataattggctttacctagttgtttgccacagatagtcggaagtatcctgtgtggtattcatgtgctcaagcaaggattctgatcttattgacgtttcactgaaacttgggactgtttctgtaaattcctcccacatttgaggagacgacaaattttgtcttgctttccttgttctcgtgttgtattgtgcattgacctatccacaccgcgaaatacaaatgaatacatcacaagaaatctgcgtgtatgatagtcttgatgtatgagcttaccttggcagtgttgaaggctacattcttgcagtctggcaggacacttacagattttggagacaaacgatatgaagaattacgaaactgtacagtagactcgcatttgtcttgattcaccagaatggcagcgcataggttcgccttcttcccaaacacaaaagcctgttaaataagacgtaaagatcactattacaacattcttcatgatatcacgatactgttagaattttcttacagtttgtagcttccccaatgatattgtagtttgcagtcctgaaagtagaggctcttcacacaacttaactgcagcatgtaattccttaaggtgtccccattttggttgcctaagtaaccctgcagcaccaaccatttatgttgtactttcagatgaacatctgattttgactgtgaatggtttgaaatattaccatattcatcaagtggagcctgatcataataactggtgattacgaactgtgaagcatttctcccgaagttggttcctccatgatactaaaataagatacaatgtcaaatcatcattattcttgcttctcttatacattagagatttttttagtgagactggaaaaggtaccatgtagtagtttacaaagcttccattcttagcgatgaaaagagcaacatgaaacgctatatcctcagctgaccttatcaatggttcctcaccatatgtttgataactatacaaaggggtcagctgaaagttagtagtttatatctggggattgggaagtacacaataatgtagtgaatttgagtgaagaccatacaaactcgtccagttctcagtccatattgcaggtttgttgggtgaattgggtcctttgaatgtttctccacattgcctcccattgcaagcattaacctgaggcaccatagaaacaataagaaaactaaaaaaaacggattcagaagtggaaaattggcagatgagccacattgcaggacaaacataaaaaccaaccaaaggatcaggggcatcatcttgcttgcacataacccatggcactcctgtgtcaagctcaacagccaattttgctgtccatttgacatatgatttcccttcttgtcgaaaagctctaccaaccatcccatactcgttctcaatctgttttgcacataactttaagatcattaaaaaaaaaaaaaaacttcgaaggaaacatacatgaaaaaccataatgtaaacctgtgagagtatgataggtcctccttgggaagcatacaagttttccgatttcatcagcttaacaatcattttcgcatatctcttcatgtgatactgcaaataaaacgtaatcttctttagaccatagaagtaaggaagccatctgagttcagtaaattaattaccttgaatggctcattatctgtcctgaagacaatcccttggacattatgcaaccagaaaggcaaacccctgcaatgtgttattgaaaaccctaaaattccacgaacattgtgttttaccatatcggaaaatctcaacgatctaaagacggaaagagtttacccataagaccattccccttggataaaaggtccaatccgaagacagacatataagccatgattttttacttccttgataaacttcacgatatcacggcttccactgaaatcgaactgtagattcacaaaaaccatcaatcgcataaatacctaaattcgtctgtatagggtatagagacggagagactgacctggccttgttgcggctcgtgaacgttccagaacacatatgtgtctactacatctattcctccagattttgcctttgctatcaaggacggccacatctgcaagttcgatttcccattaatatttgcagaagaagaagaagacaaagagatcccgccaaattttattggaagtttcatacgtttcagaatgtttggggtcgaataataataaatcagaaaataagagcacttaatttcacgaaatccataaaactaaaaccaaatcagaacgtttggggtcgcataagaataaataagaaactaagagtacttaaactcgcaaattcgataagttcaaaacggcctagtcggaaaagacgattttatcctctctctctctctactcttaacggctcatgtgtttcgtattagcaacctgccgccgacttagtgtgctaattcacgtgactgatcggcgcgatttcgccgggaaattgcagaaattaaattccggcgacgttacgaaacttctagatatagacggatcggtgagaacggagagagaattacctgaggagtgctgcgagtataatggattgagccggagaaaaggatcttatgttcgccgtcgatgatcagcgagcgaccgtcgtatgttacgtttgcgacgtctccggcaactataaccgccatgagaacgagaaaaactagcgagtactgaaaagtcgtcatttcttatgtaaacactgacgtttgaagattctagagagtttttatagtttgggactatgcacaactaactgtgcagtgtatctcaccatcgtctcgaatttatgcgacccaatcataaatttcttctttattttttcttaaatccggtttatatatgattcaatggaaattgcaattataaagtaaaagcccaatagcgtcaaaaaaaagtaaaagcccaataatagtgaggcccatcaataatctggagtcaaacaatggtggataatggaaatctctcaaaatccaaatccggttttagccggttataaatgggtttgactggtttcgggtcacaatcgaacggttgacgtcgatcatcattctggtagttgaaaactttgtcgtcgtcgtcgtcgtcgtcgtagcacgtgttgcacgtgagaaatttcccgcacaaaatcttactcttttcgtcttcttccccaatctgggattgaatctccagaatccatggatcgtgctttaactccgcgttttgatactccagctactctctcccctttccgataccgatatgggagctctctggccatcactcgacgattcgcgccggcgattgtttgcgcgaaacgatctccgatcgatggagtgagcgacgagctgaatctgattgcttcacagaacttagatcaagctcccgcacgaagactagcccgttccgcttttgttgacttgcagcttcagctggatcactgcttgttcaaggttgcattgactcatacctttatagcaaaataattaacataatctccgttctaatcatttgtatctggtgacagaaagctccgagtgggatcagaacagaggaggtaagcagtgattttgtttatttggtctcttcgaaggagatacaaagtcgttgaatcttcttctctgaataatgatagtggtatgagagaaattcgaaaggggaagatattttctgcaagagttggttgccgaaatccggcgacgaaatcaaagctgctgtatgtttctgtcatggctatggaagcacttgcactttcttcttcgatggttcgttagatttatctctacttgcatcatttagttgaaaggctcttcttttaatatatgtgggaaaaaaattgggttgttttacaggtatagcaaagcaaatagcaggttttggttatggggtttatgctatagaccatcctggttttggtttatcagatggtttacatggtcacattccaagttttgatgacttagcagacaatgctattgaacagttcaccaaaatgaaaggtatatctaaattgtacctgttattgctttttggtgttgaatcttgcttttgggttttatttaagtggtttgattcctagggagatcggaattgagaaatttgccccggtttttgctgggacagtcaatgggaggagcagttgccttaaaaattcatcttaaagaacctcaagcttgggatggtcttatccttgtcgctccaatgtgtaaggtaagtctctaactatatcattttctatgcatgtaattgaggtctggagatttgtttctcaaatctgcaaataagattttcagtgcttggaagtatctgtattcacattttacatctagttagttcatgtttgaaatacctgaccttgggttgtctcaagatttcagaagatgtaaaacctcctccactagtcttgaagacgttaatcttgatgtcgacactatttcccaaagcaaagctctttccaaagagagacttgagcgacttcttcttcagggacctgagtaaaagaaaattggtactttctcttagtttttcaatggtacattttctgaagcatttttgctaactttgtctttgatgtttttgttctctgtggataaagtgtgagtacgatgtgatatgctacgatgatcaaacacgtctcaaaactgctgttgaacttctaaatgcaacaagagacattgagatgcaagttgacaaggttagttgtagaaccaaagaaataaaggaaagctcttctcatcatagacaggggcaaaaaacgagatctttcttttctatgttgcaggtctcgttgccactgttgatacttcatggagacactgataaagtcacagatcccactgtgagtaaattccttcacaaacatgcagtcagccaagacaagactctaaaactctatccaggtggctaccattgcattctagaaggtgatacagacgaaaatattttcactgtaatcaatgacatcgttgcttggctcgatgcccgcgttgatcccaagtaaagtgagatcatctctccacaaacctatacttattattgtcttctgaatactgtcgagtctctgtgattaaacatccggataagaagaaaaaatagatatgtggcttacaatgaatacacaaccttagccgttgtttgcttagctagtgcttctagtgctacatcagccgcatctttcgaagtgtagttagtattgtttgggtgcacataagtcaggctcagaatcaaattgatgactgatctcatttgaaccatattgctctgacagatccttgaaatcttgtgttctatttgagtgttattttgtcaatggacaggcccggtctaaagcacagacagaggaaaccgtacatatgaaaagttgcatagcaggagctccgaaaaactctgtgaacaccaagtaattacttccgaagataccaaatgtaccatggttttgggtgaaaacaagaccggtatgcattgcacgacaatgcactcagctaacattgcagcgaataggggcgtgtgaacgagtcccttggtgaaccatgtaccgaaccatcacttctaataccatgagcaggtcgcagtgcataatgtcggcgacagtgaccaaataagtagagtttgaggacatgcctgcacaaaaacgtttccccaacttttatgaccaaagcaaaatttatctcgtagtaaaaaagtaaaagcagagcaagaaaaaataaagacataaaagtcatctgaaagcccaataatatcgaggcccatcaataagaaccaaaaaaaataaaaaattgtctagagtttcgtccaagccatcgtcgactttaataattgttcttctcttgctcagatttcttctccgataggaaaactcccgaagcttcactcagtaaaccctaattttccgatgtcggtaagtgttccttgccgaattctttttttcaatttctaacttttgtttgttctgcgcaaagattgatagtatgaattgaacgataaaatcggtggacattgtggtgattcagatcttcgagtacaatggaagtgccgtcgtagctatggtagggaagaattgcttcgctatagctagtgatcggaggcttggtgtgcaattacaaaccattgctaccgattttcagagaatatctaagatccacgatcatctcttcatcggactttccggtctcgccaccgatgtccagacattgtaagctctcgtatatgtttactcctttcctcagagaattttaggtgaattacaaaatttagggctccgtttttttttgttttgtctttggtactgaaggtaccagcgactcgtatttcgtcataagttatatcagcttagggaagaaagagacatgaagcctgaaactttcgctagtcttgtatcggctattctttatgagaaaaggttggtgaaatgtcttcttctctcaatttgttattagtttctagtttcctcttaacaatctgatttcttatgattaatgtggcattgccactactaagtaccaaattctttatttcagatttggcccattcttgtgccaacctgtgattgctggattgggagatgataacaaacccttcatttgcactatggattctattggagccaagtatgctcgctttcttcattacttaagacgttatatctcatttttcgtctgtaatgccatttaatttacttagtcagtgactgtaatcgtgaaacttgctaggtcagctagaaaatgatcgtggattgatattttggttttagttggaatctaattttggtcttttgtcatccaatgcagtgtatgcatgtcatatgagtgaacttattttacatgtgttgagctgatttaaatatgattcttaatatagttgagattttaccgaacatgatagttgcaatggtgagcatgccttgacgcttgttctctctaaatgcagggagttagctaaagattttgttgtctcgggaactgcttcagaatctctatatggtgcctgtgaagccatgttcaaaccagatatggtatgtgccttctgaaaacttgtttttgtaccgattcactggatactcaaatgtgtgtttatcacctgaaaatttggtaggatcattcatatgtaagtattctattgtagaatcttgatctggtaggaatatttgtgtgcatagtgctggtgatatatgacgtaactccaataattttctctgtatattttaatttggcttaggattaagatgtttcaatattgcgattacttccctgccatagtactgcttcgataaagtttgaatttcaaggtcatcattctaagaagtgcattgtaaacagactcgtgatgaaatgaaaagcatataactagacttaacaaatttgagtttcaggaagctgaggaactattcgagacaatttcacaagcacttctctcttcagttgaccgcgattgtcttagtgggtggggaggacatgtctacgttgtgtaagttttgttctcctcatcttcttcttcttcttcttcttctttttttctgtcacatctggcttcttacagaatatacctcatgtgcacttatcttctaaggatatgtattatataagatagtaacattctttcatggtcatgttgtccagaacaccaaaggaggtgaaggagagaatcctgaagggaaggatggattgatctgatatcacatatctgcttttgtccaagttcggtatactccttaacccggttatgtagaagctctcgtcccatagtaactatgttccttctctgaaactggatattgtggttcgttctctcggatgttttatttgctattgatagagttcaatgaaaatgaagaaatagcagttgttatcttgttccagtactcgatcattctatgtaccttgttgtttctgttttaatttcgtaccaagtgttccagatttctggtttgtcgcagtctttagttttcaaggttggtactgatcagtgacacgttttgttgtttgtcttcttagtgttcatgttcgattcactatgggtgactttagaaagacgttaacatgtcaacgaaatattttggtcaactatcaataaacatggtttggctaacgaaatcatacaataactatgaaatcaatgtaatttggaaggtgatcactagtaactgcaaatagaaacgaatcaaactattatgatgatgatcctgatgctgccatctgacattgtgaatgattttgcatgtcctgttctgtttgtggcgttagatcgagccagagaggcaaaatccatacgcataagcgttttgatgatttcatataaaacgtggcatgtgcaatagatgtggtcgttacacgaatataaacccaatcctgccgacctaactaatctcggtgggtattcatatactacctgtgtgggcaaagcatataaaggttctacttgggcaatcattatcgatgctcgtaaattcatgcgtctaatcattttgattatgaaccatccacatcatgtcacgtgtctaaactcttcggtcacttttgagctttttatcaaattcaacccgccacaataaaaagcggcagaactaacattccggctccacgtggcatagatcgaagcgtttatctattaggtggcacaggcggctcgagatgacgttcttgtggactccattagagaaaatgacagaattaagtgggcattagcataagttgataactatgaggtgctttttaaaaagaaaactaacagctgcgattctgtttttttttgccgttagtgtacgctaaatcatagacctcttcgtggttataaagaaagaaacttaatttgtctcgaatttgagtttggatgcgacgttttacgtactagttttataaaagtaaatgttatagaccttgaatttcaaagtggaatgtattttacacacacaattgatacaccaacaattgtggaagcaaggatatagagtatcgatctttaatggagaagaatatatccttaaagtaatcattactttttaattacggcggaaagagaatagttaaatttacggcgaaaagaatgttcattaatcaattgatgacgttcgtttataatttcaaataagatcgaaaataacaggtgaacaaagaaaaaatagacattaaaaatagtaagatcgaaaatacaacccttaaaaatctcacgaaatcaatgagagaaacaattttgagatacggtcaacgtttggtctcctttaggaaagtacacgcataagatcgaacgtgtcgattcttattgctcgttcccaaaatcgacatgctctcggaccgctacattccaaatagtctgacgtaagcaatgacaaaactcacctacattacagtctgccacgtgtccctctccatctacttcaaatgaatcctccactatacagatttaaccatttttctatttttgtttgagattcctttccaccaacacaaagcccctgtctatccgccatgtgtccacgacctttcttatatatatagtcatctttcttctttgctcgagagaagtttcaactttcaaacatatctttacagttctttcttgctaaacaacaataaaggggaaaataggttaattatgatgaaatctggggctgatttgcaatttccaccaggatttagatttcatcctacggatgaggagctagtcctcatgtatctctgtcgtaaatgcgcgtcgcagccgatccctgctccgattatcaccgaactcgatttgtaccgatatgatccttgggaccttcccggtacgtttctttcttttcccctttaaatcacactatacactaacagtaacaggattctataaaatcggtctaagaattaataaaccggtttacaatttacagacatggctttgtacggtgaaaaggagtggtattttttctcaccaagagatcgaaagtatccaaacggttcaagacccaaccgtgcagctggtactggatattggaaagctaccggagctgataaaccaataggtcgtcctaaaccggttggtattaagaaggctctagtgttttactcgggaaaacctccaaatggagagaaaaccaattggattatgcacgaataccggctcgctgacgttgaccggtcggttcgtaagaaaaacagtctaagagtgagtgaatttatcagttcaaaccgaactttgaatatgattttgaatcggtttagttaaccggacgtgtttttgatattcttgaacagttggacgattgggtattgtgtcgtatatataacaagaaaggtgtcatcgagaagcgacgaagcgatatcgaggacgggttaaagcctgtgactgacacgtgtccaccggaatctgtggcgagattgatctccggctcggagcaagcggtgtcaccggaattcacgtgtagcaacggtcggttgagtaatgcccttgattttccgtttaattacgtagatgccatcgccgataacgagattgtgtcacggctattgggcgggaatcagatgtggtcgacgacgcttgatccacttgtggttaggcagggaactttctgagttgtcacgtgcgattagagttagtggaaagtggaaactatcactgtctgttttcgcacgtgtcgggtagccgtcttgaaacccgctagctgatccagaagtgacctcattgggcttttcaacaacaattgggccttagcctttcttctcccttagtaagacaagctactgtattgtgttgttattttcaggaagcaatataaattcattttaatcacttatatattctttacatttttttttcactcaaaactacaatctagcttcttctttttttttttttttttttgttatggttgtactacaatctagctttgttatatatatatataagttaaaaatagtaactaaattacaaactaaaataaaataaagaaattggaagatatcactagtgtttggggtattagggagggaggggagctcgagatccgattttactgactgcatggtatcgaaaaagtgtcggtaatggtagggtctgacagataacagtcttatcgttgcaacttgcattcaaacaaatctcattgttcgctttaatttctaattaatttgtttttgtcttttgtatatttatttgattttgacacgagtttgtctttcctaataagaccgaggcatgattagtttaaccggtttgaattgtttaggttaaatcggagtccaagtcaaatacatcgctatctaacgaaaacgacgactgaaatttcgtaaagttccttactataaaactgatctaactatcttctacaagaacaatataataaatttgatgcattatgaattcacaagttttaaatctttatgattttgtagctcatgaaattgaatgatgtttcttttattatcacatgtcattaaataaaaatagttatgagtagatgacataaatactatttcaaataaatttatcctccatctaattgttatgagatgattatttcctataacatggtatctactatatggccgtctaaattaagtatcaacgtttaaactgcgcaatgctcaagttttcataagatgtgatttgttagaggttaattaagaaacttgcgagtgtatatgtggtctctaatctatattttaatctataaaaagggaagtgaaaatcaagattaaaagcttggatgtcatagtataaaagaatagtaaagtaaggggaccagacatatttgttgcgaactggaaaaaaatgaagacagtcaatctcactggggaagtgtggggtttgaagtccatgttaggtctgtttgttgttgctcttacaaccttcactttcaatttacaaccaaatcttctttacactttatactaatttattattcatgtttccaatagcattaaaacagttttaaaatctatccaactctttttttcccctactaaatcaggaaattcaaatcatatggacaatatactccatcaaacagtgtaaatctgttatccacaatgcataatgttgtgtttaattaactcgcattcgtcacaaccaaattagtgatttctctctaattaaccaatgtatgtagatgtgaataatacttatgtaatagtccagttttcaacaaacatatcatagtttaacgaaattggacagattcgagatcacaactcggttaagataaaactgtgaatagaatatttttctgcctaggttataacttaaaactataatatttttgggagcatgtattatgtgacttgtgcgagaattctgtgtatatatggttgacaagatggatgctatttttgtaaatagctagatggctacatacatattcactcatgttttataacgtagagaataattagtccaccgctctatgccccatttggaataaggttaattgttacaacatatattttggttaaatggttccgagttaatagaccaaatcatatagtagtagtttggaaacaagacatggtcaaaacgcaagataatacatagacacataatttcagtttaaaagttcttaaaactttaaagaacaaaacttagatgtagttttaaatgttaatttacctggttttggcataacacaacctaggagttaggaatgttccaacttccaatacttttacatttatcaaaacatgcgttaaatagagggaaaaaatgaatcttgaggaacgttttatttcttcctaatttgttggctaaaaaatgaataagataagctcaaccaaatggagacccaaacaaagttgacattgaaaaagtctaaaatttcaatgtttataaaatctaacaataatcctattctttagattggacaactttatgctaagataagagtaattcagaattctaactaaatcacactcactccattattatggccgccgtggaaaattcaacaaccaaatcttcaatcatataaatactttttcaactgacttaaaagtaaaaaaaaaaaaaatcaaatgtggagaaataataaatcgatattaggacactcaaatgtactagttaacaagcttatgatgacagaaaattggataattatgggaaaataagattggatgattaagggctgggaaaaacaaattgatgattaaggaaagtaaaaaagtaaaaaaaaaacgaacgaaaactgaaaaaaagtaaaaaaagggactgatctcttctctttctctcgtacgttcttcttcctcattcgagagagttaatttcaccatttctgatttcgacaacgacaaacgagcaaaaggtgattttcctgtgagcttcctcttcttttaaaatcgcaatgctcctactatttctatactattattgttgttctccaattgatccaacgaaactacgaaatccattctttgttttatttttttagccctaggattctgtgatccaatctctgttttcttcttcgctgattctggaaggttcttttgcttctttgaatttctagaagcggaactttgaaggttaagtgttactttgaccggacagatggattctgactcggaactttatatcccggcgccgtttggagattttacggtgatgcggattttgagttagaagcgacgcggagagatttcataggtttcttctgcaccacattccacgaggtgtgtaattttcttctttattttaaatctgttgggtttttgaattctaacattgcaatgttgatttaatttaccgttgtaatttgagtatgaagaaattcgacatagttgtggtaagaaagaattgaatttaaaagatgaaatctttgagtttttataacaaaaaactgtgaggtttcttttttttttggccattcagagtagtagtttcacttcgtccagtgtaagtgcaaagatagtttgaatgtttggtaagtttgaatattggtttcttctattctaggaaaccagaggctgaagctaaaagcgatgttgaaggcctttcttcctggaacgcaggaggaggaaacattatcttctttgcagtctgggtaggcactttctatttatgaatagtatttcaacattatcctttctgttgtcctgagaaataacaatggaagtcgttgcctcaaatgtgcaggaaagtcgatgcaaaaatggaaatggacgacccagagaaggcaatggctacagttgctcagctcatagagcaacttcatgcgaaaacatcttcaccgcaagataaagaactcacaacagctcgtctactaggtattgcaaaaggcaaaagggaggcaagaaggctcatcggttcgtatggccaagcaatgcctttatttatttccatgcttagaaatgggacgactttggccaaagtaaatgtcgcttcaatcctttgtgtattgtgcaaagacaaagacttgcgactaaaagtgcttctaggaggatgcatcccgccattactctcggttttgaagtccggaaccatggaaactagaaaagcagcagcagaagctatatatgaggtttcttctgctggtatttccaatgaccacattggaatgaaaatatttatcacagaaggtgttgttccaactttgtgggatcaacttagcctgaaaggaaatcaggataaagttgttgaagggtatgttactggcgctttgaggaatctttgtggcgttgatgatggttattggagactgacactagagggtagtggtgtagacatagttgtgtctcttttgtcatctgataaccctaattctcaagcaaatgctgcttctctgctggctcgtctagttctgtccttttgtgatagcatccagaaaatattaaattctggagttgtcaagtctctgatacagcttttggaacagaaaaatgatatcaatgttcgtgctagtgcagcagatgctttggaagctctttcagcaaattccgatgaggctaagaaatgtgtcaaagatgcaggaggtgttcatgctctcattgaagccattgttgctccatcgaaagagtgtatgcagggaaaacatggacaatctctacaagaacatgcaactggagctttagcaaatgtgtttggtgggatgcgccatttgattatatatcttggacaagtctcacaatcccctcgtctaacggaaccaattggtgatgtaattggagcccttgcctatgctctaatgattttcaaacaaccagagagttccgagaatatatttgatccaagcgtgatagagagcattttggtaaagttactaaagcctcgtgacacaaagttaatccaagaacggatcttagaggctatggcgagcttgtacggaaacagtagtctgtcgtgttacctagatgatgcagaagctaagagagttcttatcgctctcataaccatggcttctgctgatgtacgagagcgtctgataatttgcttgtctggcttatgccatgacaaggttggaatttgggaggcgattggaaagagagaaggaatccagttatttatatcatttctaggtttgtctagtgagcaacaccaagagtatgctgttgaaatgttgaaaattttgacggctcaggtggatgatagtaaatgggctgtaacagcagccggggggatacctccacttgtccagttgctcgagactggatctcagaaggccaaggaagatgctgcctgcattctctggaatttgtgttgtcacagtgaggaaatccgtgattgtgttgaaagagctggtggtattccagcattcttgtggcttctgaagactggtggaccaaattcccaggaaacatctgcaaagacacttgtgaagcttgtccatacagctgatcctgccacaataaatcagttgttggctttacttctgggagatgatccgacttcaaagattcaggtaatagaagtgttgggtcatgtgctctcaaaagcttcacaagaggatcttgttcatagaggatgtgccgctaacaaaggactgaggtccctagtcgagtccctaacatcttccagagaagaaacaaaggagcatacagcttcagttttagctgatctgttcagctcaagacaagatatttgtggtcatcttgcgacggatgacattattaatccctggatcaagctgcttacaaacaacactcagaatgtggcaaaacaggtggctagggctttggacgcactgtcccgcccagttaagaacaataataataaaaagaagtcttacattgccgaaggagatattaagtcactcataaaattggctaagaactcttccattgagtctgcagaaaatgcggtatctgccctcgcaaatcttctgtctgatccggatatagctgcagaagcactagctgaagatgttgtttccgctttcacaagaattttggctgatggatctccagagggtaagagaaatgcgtcacgcgcacttcatcagttacttaagaactttccagtttgtgatgtgctaaagggaagtgctcagtgccgttttgctatactttcactcgttgattctctaaaatcaattgatgtggatagcgcagatgctttcaacatattagaagtagttgcgctcttggcaaagactaagagtggggtgaatttctcttaccctccatggattgcccttgccgaagtgccatcaagcctggagactcttgtgcaatgccttgccgaaggccatactcttgtgcaagataaggcaatagaagttttgtccaggctttgctctgatcaacagtttctgctcagtgaacttatagtttcaagacccaagtcaatgttggttctggctgatagaatagtgaatgcatccagcttagaagtgagagttgggagcacagcgctgctcttatgtgctgcaaaggaaaagaagcagctgatcacggagacacttgatcagtctggttttttaaagctcttgttacatgccctcgttgatatgataaagcacaattctacaagcttttctctagagactgaagtccagacacctaaaggttttttggaaaaaaatgttttccaggatacaggtagtttttattttcctgatccagctaaaatcttgggtggtacagtcgcattgtggctgctatgcatactcacttccgttgatgctaagtcaaaggtcattgttatggaagctggcggacttgaggtgctcgtggggaagcttgctaggtatacttccagtgctcaggtaaatgttcctttctcgggtataaaaaaattatatgcttcttcatgtttattggttatgggtatcctacagggcaccttcgttgggaatgaaataaattagcgaacttctgttatgagttatacaactttgcggggcggggtttggtctttaggtccttctgttagataagaggttctgttacagtaaatctcacttctttatatcgttacagacttgtcaagcatgaattgtgcatttcggttttgaatcacactgctctctcagtttctcttaggcttgacttgattctaactttttttgtggcagagatgccttgtatgatgaattttcccccttgaaagtaatcttgagctaaactattttaccaggctgaatttgaggatacagaaggcatttggattagtgctctcctcctggctatcatgttccaggatgacaatgtgtccttttcttcaacgacaatgcggatcattccaacacttgcagttttgctaggatctgatgaactgatagatcggtatttcgctgcccacgcaatggctagtcttgtttgtactaggaacagaggaataaatctgacaattgcaaactctggtgctgtttctgggataataaaccttcttggctatgtggaatcggagatactgaacttggttgctttggcaaatgaattttctctcgtgaaagagcctgatcaagttattcttcaacacctttttgaaattgaagatgtgaggcttggctccactgcacgtaaatctatcccgctgcttgtagatctcttaaggccaattccagataggcctggagcccctcagtttgctgtccaaatcctgattcgcattgctgatggaagtgacacaaataaattacttatggctgaagctggagctgttgaagctttaacaaagtacctttctctaagtcctcaagattcaactgagtacgccatatctgaattgcttagggtattatttagcaaccacgagcttagacaaaacgaaatggcactaagttccttgaatcagcttatcgcagtactgcggctaggttcacgaagtgcaagatacagcgcagctggggctctgaatgaactatttgatgctgaaaacatcagaaattctgaaatcgcctgccaggctgttcaaccacttatggacatactcggttctgtatcagaaagtgagcaagaggtagctctctctgcattgatcaaactaagctcaggaaatacttcgaatacagctcttctgattgatgtggaaggaagtctgctggaaaacgtgatcaaaatcttatcatctgctactgcttcagaggagttaaagataaatgctgccagactttgttctgttgttttctcgaataaaaacatcagaacaagtgcatccgcctccggatgcatgaagccgttaataacacttatgcagtctgaaagaagtgcagcagttgaagcagcagtttttgctattaagatattattggatgacgagcaacatttagaactagcagccgcacataacattcaggagcttcttgttggcttggtttccgggaaaaattacgttattattgaggctagcttatcagctctcattaagttgggaaaagacagagtaccacgcaagttggacatggtggaagctggaataattgagcgatgtcttgagctactacctggagcctcgagttcgttatgttccgctgttgtagagctgtttcgtattttaacaaatagtggagtaatcgcgagaagaccagatgttgcaaaaactgtagagcctctcttcgcggtcttgctgcggtcagacttgaccttatgggggcaacatagtgccctgcaagcactcgtaaacatattggaaaaacagcaaacccttgaagcttttagttttacacccagtgaagccattgtgccgctgatttcttttttagaatcttcatcccaagctatccagcagcttggagcagaactgctgagccattttcttacaatggaagatttccagcaagacatcacaacacagagtgctgttgttcctctggtccggcttgcaggaattggaatactgagcctgcaggaaactgcgataaaggcattggagaagatatctgctagctggcctaaggctgttcttgatgctgaaggtatttttgagctatccaaggttattcttcaggaagatcctcagccccctcttgatctatgggagtcagctgcctttgttctttccaacattctgcagtatgatgcagaatgctttttcagagttgaactgccagtgttggtaaaattgttgttctcgacaattgaaagcacagtgttactggctcttaaagctttgatgcttcatgagaagaacgacgcttcaagtacagtacaaatggctgagcttggtgcaatcgatgcattgctggacctcctgagatctcatcaatgcgaggaagaatctggaagcttacttgaagtaatatttaacaatccaagagtaagagagttgaagttatgcaaatatgcaatagcaccactatctcaatatctgttggaccctcatacaagatcagaacctggtaggcttcttgctgctctggcactgggggatctatctcagcatgaagggctttctagatccagtggttctgtttccgcttgtcgggcactcattagcgtgctagaagaacaaccaacagaagaaatgaaagtggtggccatctgtgcgttgcagaattttgtgatgaatagtagaacgaatagacgagctgttgcagaggctggtggcgtattgttaattcaagagctactgctttcttgcaacccagaagtttctgggcaggctgcactgatggtcaaatttttgttttccaaccacacactccaagaatatgtctcgaatgagcttataagatcactaacaggtacttttcaatttaagttatacgaatcctatgtccctgtcactctagcactacagtttttatattctgataatttgttttgttctatcttcaactgtttgacatcttattcttgtgaacagctgcacttgagagaggcttgtggtctacagcaactataaatattgaagttttgagaaccttaaatgtgattttctccaattttcctaagctccgtgcctcagaagctgctactttctgcatccctcatttggtaggggcgctcaaatctggtgttgaagacgtccagggattagtattggatattctttacttgctaagacactcctggacgaatatgtctatagatgttgcaaagtctcaagccatgattgcagctgaagcaattcccgtcctgcaaatgctgatgaaaacatgccctcctaggtttcacgacaaggcagatagcttattgcactgcttaccaggttgcttaacagtgaacgtcatgcgtgccaataacttaaagcagtctatggcaaccacaaacgccttttgtcaattaacaataggaaactgccctccacggcaaactaaggtaaaacaaatccatcacaggagaatattctacactcccaccattgccaaaaactgtctttgtatcatttggtttttgtctctttttctgtaggtcgtgagcaatagcactactcctgaatggaaagaaggctttacttgggcatttgatgttccccccaaaggacaaaagcttcacatcatatgcaagagcaaaagcacatttggaaaggtaacattgtaacaagagccacactgttcaaattgcagtgttgggatagagatctttgatatgtattgtcttatttggtctttgtctaacacacaacatattccttgtctgcagacgactctagggcgagttactatccaaatcgacaaagtcgtgacagaaggagagtacagtggatctctaagcctgaatcatgaaaatagcaaagatgcttcttccagatcactcgacattgagatagcatggtccaataggacaacggatgagactcattgatcttcacaagcacaatgcacttggtcattggaagactgaaatctgtctaatgctcctaatgactgcattttggtagtagaagaaggaaagcaaagtctgcagcagatgtatagcaatacgtatatatgggtagagaatatggtgtgtgaaaaggaacatagaagcaaagagttcctgcctagcaagagagaagggtcttattgtataggttgaatctcttcttttttttggtctgcgatgttcggtatttgacagtttgtttacgaaccttttcgctcggggatcaactaagcagcacaaagtgctctgatttctgtagcgatgttcaagttattttaccataattttgttgcgttcattcatagttagacacgaccacaagatcattaaaacataatttgatcaagaaattgaaagttacaaattcgaggagatgagaagaggataacaaggtggcattgaaactcttcataagaaataaaaagcaagcctattggtcacaaacgccacaaaatgtacagagactatcaggaaaacatcacggagataaaacattctagcggtttgttaaggtggcgagctactgcgggttccaaaatggtaaaaacatggtttactttgctgcaccaacaatgatagaccgggcatgtgtgaaagtagaaatgatagctccaagctgcagtttgtcgttgcaaccaaaacttaatctgtacctataaacagtaaaacgactcgaaattacaaaaaaaaaaagattgtggataacacaagcttaaatattctactccaggcaatcctaattttaagtttaagatgcaaaagatactaactcaatgtctgccaaatcgtttatcagttgaactctgacagcggaaggcatcttgattttaaaaataaacctgatgtagaaacaaaactcagttcacagacgtacggataaaacagcattagaagcagcaaccaagtatgtcactcacaaggtaatctctttgacgatatcaacaatggcaagtccttttctcgtcttgatttctgaaacgtctgcagggtgaagtaataatcaggactcaggagtcaggaccatggaatcattaagtgagtaaatatcagttatcgttcaatacttttgtaggtctcagaaaatgatatagtacctttgtagcactcatcaaatggtttattcagaagccagtgagatatctgctcaatgtccttgggcaatgggtttccggtgcagaggtaaacgtcttcctctgtaatttgctttgactcttcctctgtaatttcctttgacgccatatgcgttgactgtccacaccaataaatccgttagaaatttttacagatccattcatagtgattgaaatgtattatcttttttagatttacaattgtagattatgtgacagaaccaaaaggaaatattacagaacctgcaaaatgttcaatgcttttctcatgtccccattgctcagccgtacaagagctgccaaaccacagtcacttacaacaagcctagtccaattatgaaaaggaagcacaaaacaaagggttaaaagaaacaaatagtgaagagggaggatgaagaaaacacaataagaaagtttacaagaccgaaatagctataattctcacctttcagcttctattacatgtttaagacgttgactcatatgaactccatcaagaggggcaaatctaaatcgagtacatctcgactgcaaagctgggatgatcttattgacatggtttccaatgagcgcaaacctagtactcttagtgtatttctcaatcacttgcaaaatttaagaaaataaggacgccaaagatgttagaagttagaaccgtgcttaagcaaaataaccagagagagctagataacactaaaaggttttacctctacgcaaggcaaactgagcatcttttgtcatggcatctgcttcatctagcaaaaccaacttcaccgaagattttcctctacaatcatgaattttcttttatttctatatccacagcaaacttgttaaacacaaacttatgatgctacatttaaacatagctcacgcccatcacaatgcattcgatattatgagtaataaaagccagtttttgaggtatctaaatgcacaaatggaaacatgataggatactcacaaagagaaactctgcgtgctagcgaaatcttgaatctgctgccttacaacatcgattcctctatcgtctgatgcgttcagttcaagaatcatattccggtactttggtccatatagtttccgggcaacagctagaatggtggatgttttgccagtaccgggaggaccatacaacagaagatggggcaatttgttctcattggtcagcctatcaactgttttcaaaatcacaacaacaccttcagtgagcatataggtaataagctataacatgcattagcctactcaatcatatatgaaacaacatcaatttcaattttagaaaactgtaaacactaaatccctaaaaccctagggtatggggaaatagagggagagagtgttatgtgtaaagttcaattactcgtatcaataatgtcacgatgtgcagccacgtcatcaagcgactgaggtcgatacttctcaacccaaggcgtcgccttactctgcggcggaggtccaaaaccgacgacgtctttgcccttgtttatcggcttgcgaggctgaatttcgtctacgtcaatgtccatcgccgacgttagctcagtcatcttcaccgccgtaaaagaaattatttcagaatctctctcgctcagccctaatttcactctctccccggtaatggcgccaaaccctcaaggctctttccttccgccattttctctaccttcgttgtcgaattcccattttacccccaagaaatgtagcttatgctggggtcattttcgtaaagcttccggttacataaaaaaaacaccccaacaagtgaaaatttctgaatctttgcttaaactctgttgcattttgctattatatgatgatatatatattcacaaaatattttccttgtttctatgataacaacaaaaccaaaaaccaaaaacctcaaaatctttttactacaccactttaaaaaagactcttctcttgtgtcaaagctctccatctgagaccaagttcttgttctttgaagaatcacttcctgagaaaagctcttttatcaaaccaaatcctattggataagcttcctccgacagatctcctccatagtcgtgattcacactgttaacagaatagttcagaggcaacaaggcaacacaagaagaaaagagaaattttattattgatttgatgaaacagaagaagacgatacaaatcaaatcaaatgatatattaaaaagaggtgaataaaggttcagacttgggaagtttgtcacagtctgaagaaatccatccaatcctctgcttctcattgtcatagatcaccattatcccttggaaagatatgtctatcacacacatagacacgagatattgttgtcaagttatgaacaaaagaaacctgagaaaaacttagtatatatatacgtacctccaatgatattgtagccctcgagaccgatttcagttccattcagaatacccaaacatactcttcctttttcctgagaaaacaaaccagaagaaacagacttctcagctatagatttttatggagatacaagtcatatctaggccagtatatgtgtgacttacggtgattatgagatacgactcaggtggaacctgaaatagctgaccattcttttgattcccaaatcgtaaagtaatcgtcttgaagtatttcttaacctcatcaagtgatttcaaaggttttttgcctttccagcagactggtaagcttttatcatcttttgtgtccgtcaaaggcttcccattcaagtcttttcttatctgtaggagaccaaattagtcataaaaaagtggaaaaacataaacggtgaagctaatcttttttttccagagaagaaattatcccatacaagatcgagaatagcttggtatgcttctgcattgaagtaagtgtacgagcttccactatcgaaaactacgttaatgcctttgacacctgtggtcttgtcgttaaagagaagctctgctggtccagccatgtagtttttactacagaaaaaattcacaccataatttcaacttgtcaattataaaagtgtgagtaaacaagtggcagttataaagaagataatgctcaaagattgctcacctaggtgaattagtagccaatgaagtccatgtaactccagaagaaggaacaagctcatctccaatagagagaaagcctttaccagtatgacttaagcaatgcacaatcacattcttcgttatccccaaggactttagctgagttgagaggcctactttccctcttccaaggccaagtattcccgctgttggaggaggaggatgtggaccaggattctgctgatcatacccacatctaaaagaaaatttgattcaaaaattaggaacttgtacaaccgcaaatttagtgtttttcttttctaatgtgtgaaaaaaggtagaataaaactaacccaaatgtcaaacgaagattcataatggagccatttgcgagttttagaggaacctcatcagttacaagtgcaccaatagatgatgcatgatcggagtatccgatttcatagtcacattgatcctcagggtcagcacaaggtctgtcctggggaaggtcaagaccagaacacaagatgtgtgaacaaggcaaagtgttgtgattgggcttgtactgcttagcacgaggctgcaaagaaagagaaagaaattctaagatagaacctttgcttattatgtcacacactaaaaagcatatcaacgcttacctttgtgcaaccgttgcaaggtgcatcacactgaacccaagtgaggtcactgccagtgtcaatgtccaagtcaaagagcttaggtgggttgccaatgttaagcaacacataatagtacctgcaaagatgaattcgttaattacttcaacaatcaaattgggcgttttcaatacaaggtgaaaatcagaatcaacattgcccaaaatcttcaattcgtgaaagtagcaagctttgaaatcatctcaaagatcaatagaatgaagatttcacatcttgtcaagcaatgaaatagattacaagtgaagaatccacacagatgcaagagaagccaacaaagtatccgcaccaattcaaaatccagacataagtcaacacaatcccgttaaggaaaatcaaagaaacaagatcaaacccacgaatgggtcactgaaaagtagcataaaacagagaaattgaaacaaaaagatgcgaaatttggcacttacccaagaggatacacattcccggagacaggaaacacgacggtggagctaagtcgacgattctgtaacttcacttgagccgacgagtctttagtagcttcagaggtttgaaagcgagcacagaggatgaagacatagaagacgaagacgaagaagaagtaaaggtttcttctttgctgcttattcggattcatcatctcctctttttggcccccaagaaagcgaaaccaaatcccaccaaaaaggtttcttttttgacacagggcaacaaaaaggaggctttttctttgtagaattgctgctcccttataggagtgagtatttgtttatatatctgatctctctcacactcaatttcgtgcaacttgcagcagaggtttctttgagttcccgtaagctaaattgagaaacttggcatttggctaaaagaaactcaacgcccaacgctcactacacttagcgtgtaaagcacgcgccaaccaggattgactcaaaggcctaacgatcttcaaatgtacagggcccaatatactcggcccataaactctaaaactattcaaatgttaggcgcgtgacgttcacctgtgaatcagctgatagaaatcattatccaatatccagttatgagtgggtgactccaaatagatccaactggcaacgcattattgacacgtgtcttttcatttctcttcttccggcgttttctctccgccgtttcgccaccgtacgtgacaatgtctgtttctctctccgccgcctctcacttactctgttcctccaccagagtctctctttcccccgccgtcacctcttcgtcctcgtcccctgtcgttgctctttcttcctctacatcgccacattctcttggaagcgtcgcatcttcttctctgtttcctcactcctccttcgtgcttcaggtattcgtacttcattcatactttttgtaaatttctctccgaacataacattttctgttgattttagaaaaaacatccgatcaatgggacgagcacgaggatgatttcaccaaaatgtgccgcttctgatgcagctcaattgataagcgctaaagaagatatcaaagttcttctccggactaagttttgccatcccatcttggtgaagtatctttctcttcttcatgatgataggacagggaatttttgaattcatggaagtaatagttctttgcttgttactaaagatattggaggaattttgtgagtcatgttgctttgtgttacatgtttcattgcaggttagattggggtggcacgatgctggtacttataacaagaatattgaggagtggccactgagaggtggagctaatggaagtcttaggtttgaggctgagcttaagcatgctgcaaatgctggtactggtttcatcatttcacatgcattgtggcttaagacttttatttggtgtcttgatattctacttttgacatttacaggtctgcttaatgctttaaagctcattcagcctctcaaagacaagtatcctaacatctcttatgcggacttattccagttagctagtgccacagcaatagaggtctttcttcacttttcttgggcttggcctattaggaaactattttggtcttaaggctttactgataactctagaaataaataaaacttcaggaggctggtggtcctgatatcccgatgaaatatgggagagttgatgttgtagcacctgaacagtgtccagaagaaggaagactccctggttaactaatctttccattgtctgtttcatgtcttctatgagtttgtttcagattttgtttatggactaattgaaataacgaggtgaaatatgctatgtttagatgctggacctccttcaccagctgatcatttgagagatgttttctacagaatgggacttgatgacaaggttattttgattttgttctcttttgtgttattcatgtcaaacgtgaatatttttgttattctgaatattctttttgacaaacaggaaatagttgccttgtctggtgcacataccttagggagagccagaccagaccgtagtggttggggaaaacctgagacaaagtacacggtattaataaacgacaaactgaagctaccttatatatagttctagggatgatagtgtagagagatgttatggaaacgttcaaaatggcagaaaactggacctggagaagcaggaggacagtcatggacagtgaaatggctcaagttcgacaactcttatttcaaggtctatctctctatctttcttagtaacttggtttgggactgaaaaagagttttctatgaagttttctaaaaatagttttatcaaccattgacttctatgactttgcaggatatcaaagaaaagagggacgacgatcttctggtgttacccactgatgcggcgctatttgaagatccttcattcaaggtttaaacaacagtgattgctaataagatgcctcagaattagtagttcactgttacttaagaggaaatgtttttaaaaacaatagtttcttacagaactatgcagagaagtatgctgaagatgtggctgcatttttcaaggactacgctgaagcccatgccaagcttagcaatctcggtgcaaaatttgatcctcccgaggtacaaggaaaggggagaaaatctaatatctatgcacttgtgtataccattataaaccatacgtttaaaatccagttcagtgacttaaaatctaaaactgctaatgtgtcactatgaaactaatcagggcatagtcattgaaaacgttccagagaagttcgtagctgcaaagtattctacgggaaaggtttgtccttacaaaacaaaaatgcgcttgtgtagcttattctaatataggattcggttcttgtttttaatctctccggcaatattttgcagaaggagctttcggattcgatgaaaaagaagataagagcagagtatgaagcaattggaggaagcccagataagccattacccacaaattacttcctcaacatcataattgccattggcgttttggtcctcttgtccactctctttggtggtaataacaactccgatttctctggtttctaattgacaaattatatattttgatttctcttacctacatacataattacgtggtgatcatatattccttgcaaacaaaaacatcattgttaaagtttgcttgaataaaatcaccttataaataacattgtttatttggtttttagaattttgagattagtgtgagtttcttaagtataggatactaaaataatgtgtgtgaatcactgctacgcctttgcacgaatagattcaaaaattaaaataagtttttttgagattcattaaagattcttctctttttgtaaagaaagaaaagtcttgtcgcttggattaggttaaccatcgaccatcgtacttgtttccaaatctatacaaacaaaggtgattatttttttcatgaacaggtttagagaacttttacaacaccacgtgtgacataataaacgtgcatagttatgcttgatcggtccttctcttctcaatttttttaatacccaggaagactattggctaactaatatttagtttgttgggataatcaatgtgtacttaacaacaaccaactttaaatattaaattctgaatctagaaagatgtatgaatttaggttggtatggaaaatgatgttccttcttctagtgacgcaagaatgcttacggtgaaccgatgggattggtcagactcaatcaatcccattgttctaatcgatatttgaaacttttccctcttttacttttgtatatatgattgagcttatgtttcctctgtattttatgacgaaactaatttcatatagtatattgcaatcatgttagtattatattgattttgaggaaacattatgctatggatttggctgtttggtgattgggataatgaagtgcatgtgagcttgattttggtagcacatgtcctactttttcatccaatagtcttaatgtctcatgttatagatgcattattttgttatcaacgacattatgatatgggaaaaatgtgaaatttattaagagaactttttttacatcatggtgcgttgtactgctgttgtgtcatgtgtgcacaaaaatagaaataatgggcaaaattagtagggaccaaaactaaacaaatcttaatctttagggaaaatatcgtaaaaaactaaattcccgcgtcaattgtgaaaatgacaaatacacgtagacgacaaaacaaaaaaagaatacacgtctccttcgttgacagtctctcccggtgaattgcgaagaatttcagatattaaaatcttttttcgttcctcatcgcggccactttcttcttccccaattcaatatgcaattaatatattgcccagatcccctagctttcttcttcgcacatctttatccattaaatttactaaaaagttgaaaatttaattgcaagacgacgactttgaaatttccttttttgttttctttcatttgtctttctcctctgattcatgttttcacgttttcatataaatcagcaaccatggattcttctgctttttcctcctccatcactcgtataaaactcgttttcacgaaaattcttacttaggttcttcaaatcacaattttgctctgttccttagaaaaagctaaactttgctctgtttcttcaacaaaaaaagtgaactttgctctgttccgtccatgtccgatgatgatcggagtggaagcagaatgagatttgaagcaaacgtctagagttccgacgttatgggttgcggaggatcaaaagtagataatcaaccaatagtgattctctgtagagaacgaaaggagctgcttaaagcggcgtcgtatcatcgttctgctctcgctgtcgctcacctaacttacttccagtctctctccgacgtcggtgaagctattcaacgtttcgttgacgacgaagtcgtagctggtttttcttcttcttcttcgccggattctccagttcttacacttccgtccgacgaagggaaaccgacgaaacacaagaggatttctccttcttcaaccacctcaatttctcattccgtcatcgaagaagaagacactgatgatgattcgcatttgcatctaagctccggatccgaatccgaatcagaagttggatctaaggatcatatccaaattactagcactccagaacaagagcggtcaacggaatcatttccttccggttatcatccaacaaactatgctccaccggtttacccacctggttatccacccggttacccattcagttacccgaccggttattcatcgggtaattatcaaccgggttacccgaattacacaggtgagaatccatacggaaatcgaggaatgtattacatgaagaaatctgcgccacaatcacgaccgttcattttccaaccggagaatcatcgagtggaggagaacgcgcaatggccgtcggattctggatttagaaacacaggagtgcaacggagatcgccgtctccgttacctcctccgtcaccacctacggtttcaacttgggattttttgaatgtgtttgatacttatgattacagcaacgcccgttctcgtgcttcgggatattatccgatgggaatggcgtcaatctcaagcagtcctgattcgaaggaagttagagaaagagaagggattcctgagctagaagaagtaacagagcaagaagttatcaagcaagtgtatagacgtcccaagagaccaggattggagaaggttaaagaacacagagacgagcacaagcacaacgtttttcctgagaggaacattaacaaaagggaagttccaatgccagaacaagtcactgagagctcattggattcagagacaatttcgtctttttcaggaagtgatgtagaatcggagtttcactatgttaatggtggtgaaggaaagagtagcagcatcagttcaatcagtcatggggctgggacaaagagctcgagagaagtagaagaacagtatgggaggaaaaaaggagtgagctttgagttggaggaaacaacgagcacttcgtcttttgatgttgaatcttccaagataagtagcttatccagtttgtcgattcatgccactagggatctcagagaagttgttaaggagatcaagagtgagttcgagattgcttcttcttgtgggaaggaggttgctttgttacttgaagtcggcaagttgccttatcagcataaaaacaatggcgttaaaggtactgtgtcttaactcgtatgttttgctagccatgatcatgcattagtttacagctagaataaaactatctgcttttgtaacccatgcgtttaaattttgcaatgttatgtcatggttacaaagtaatgctgataaacttaagtttaatggttatttgatgaattgtaatatgaacagaaatgttgaaaactctaaattccaatataatgggaaagtatcttaaattattgtggtttagactgatttgcttggtgttgaactatgaaccatgtattctgtccgcactgctttttagatgaaggtcttttttactgttttgtttggtggggttttaaatgaaaagttttgcttttcagttatcttatccaggatcatgtatctggtagcaccatccacacggtcatcgcactctcagcccagactatcaatacgtttaacatctagaactcgaaaaatggcgaaatcatacaatggacaagatgttaatggaggcttcaatggaaacctctcatcaaccttagagaaactgtatgcgtgggaaaagaaactgtacaaggaagtcaaggtattaatatttttaatatttgatgcagctttgtgtttctgaatcactaatgggaatctatatcacatatagattcttgcgtgatgttaaattgtgatttgcgtgtgatggcaggacgaagaaaagcttcgtgctatctatgaagagaagtgcaggagactaaaaaaaatggatagtcatggagcagaatctatcaagatcgatgctactcgggcagccattaggaagcttctgaccaaaatcgatgtttgtataagatcagttgattcgatttccagcagaatccataaacttagagatgaagagttgcagccacagttgatacagttaattcacgggtaaatcatctctctatattttgacatctttttacagattaagctgaaaaaactgatattttgtgttttgaaggttgataagaatgtggaggtcaatgctgaggtgccaccagaaacagtttcaggcgatcagggagagcaaggttcgatctctaaaggcgaacacaaccttacaaaatgactctggctctacagcaattcttgatcttgagatagagcttagagaatggtgcatcagcttcaacaactgggtcaacacccagaaatcatacgtccagttcctaagcggatggctcacgaaatgccttcactatgaacccgaggcaaccgatgacggaatcgctcctttctctcctagccagatcggtgcaccgcccatctttatcatttgcaaagattggcaagaagcaatgtgtagaatatctggagagaatgtgaccaatgcaatgcaaggttttgcttcaagcctacacgagctatgggagaagcaagaagaagagcaaagggtaaaagcgcaatctgagcagcgagatgcagagtcagagagaagtgtggtttcgaaaggtcggtcagagagcgggatatcagctttggatgatttgaaagtggatttagattcaatgaggaagaggctagtcgaggagagaggtaagggtaaagaaaccattaagcttgtgaacaacgcgtcttcgagcagcttaaaagctggtttagttcccattttcggggcactgagaaaattcacatcagaagttgtgaaagctcatgaaattgttaggcttcaacatcctcagacctcttcttgagtagagagtgtggacttaccacatttttgcaccgttttgaagttttgttacttgcaaattagacataggtctatatagaaggaaattgttgtatagatgagttcatattcaattattggttggttagtttcccttgtaaaccgtttttaaatggtgaagaagaagatatctagtttgccttgtaagccgttacttgctgaattaaaaagaatgtaatatgactgttcctggttgagattaaaaggaaaataggataaagctatgtggaatagattagagagtatggttaggcatgatctatgtctataagactataatagagtatctataatggctagaacttaaactaagaacgattatgatgaattgtcaactattggatcagttttggaagaagaaaagaaaaattacatatacagtaaaacctttataaattaataatgtttggactgcaaaattttattaatttatagaggtattaatttatcgataaattaataaatattaatttatagagagattttcttaatttagtaactttttaaaaaactttatgagattttttcattatagaaaatatatttctagaaccagttacaagtataacataataataatgactagaaaacaataccaaaaattttgatacactaaaatatgaaaactatagtcaaacaaagaacaaatatgaatttaagcaaaaaattattataaatatattttacagaatttttttacatataatatatatatatatttgatatatttatacaattattaatttataatataaatgggaccatatatttacatagaattttcaaaaaaattattatcttattaatttatcgatttgtgtaactttttacactggtcccaacttgggaccggaagaatttattaatttacagaggttattaatttatagagtattaatttatgaggttctactgtaaactactgtgacatttttcataacttaacttggaaaaaaatatgaaatttagatatgaaaaatcacaaattcacaacaaggtaaatagtttcaaactatgcacaatgttgcaggcgatagtttcaaactcttgacaagttgacatgcataaactacaaaactatcaaagatttctcatgttttggattcgtatttagtagttttatgcattttgttcattatcacacaacttaataaatcatcagtgtaggtacaattacaaagacaatagtctagaacttaaaaatcatttttacaagtgcagaaatgggctatgttgccatatggcttcacaatgtcaaaacgggagagatactatggttaggcatgatctatggtttagggttatcaatactggctaattatgtatcaaagtcaaaccaccatggctttcatttttttttggtcagttattttttttaaaatgcacattacattattatgttgactcagcaggatataataatgagaaaatctaatgctatttaaaatagagaaaaattaagaaataactttctcctaattgtgattttcttttcaatggttgattatggaagtaaatattgaaatatcaataaccgctgtgggtcaaagagtcaatgacaattattacttgcccaaaagttaatgaaaaaccaatgacgaggtttatccaatgaaaactctccacgtgtatgtatgaccagtaatcatccagcgatttcgtaatttccagtgtaagaaatgcgctcataaatatcatcttctctattgagaagaagaagaagaattcacaagaagaatattcacagagaagagagagcgataataatggcgtttaagggtttcgcgtgtttttcgattcttttgttgttgtctctattcgtttcctctatacgaagcgaggagacgaaggaatttgtcttgactctcgatcactctaacttcaccgaaaccatctccaagcacgatttcatcgtcgtcgagttctacgccccttggtaagttctctattactctactcttcaatttcttcttattcgtgagagatctctgttgccatggacttatgtcgtgaaattcgtggttagtgttaatttaaatggcgcaaagcttttgattttgattgattgcgtctagtcgaattctgtagataaagtgtttaggactatactttggtacaacgatgcttgatttgtaattgattcgtgatatctatgtgtttttgctttgtttcaggtgtggtcactgccagaagcttgctcctgaggtgagaaattggctttgaaatcactttcttaggatttgtgtgtgaaaccaatctattttagctaaaatggtttatatttgattgtttacagtacgagaaggctgcatcagagttgagtagtcataaccctcctcttgctctcgccaagatcgatgctagtgaagaagcaaacaaagaatttgctaatgagtacaagattcagggtttccccactcttaagattttgagaaatggagggaagtcggttcaagattacaacggacctcgtgaagctgagggtattgtcacttatttgaagaagcaaagtggtcctgcttctgttgaaattaagtcagctgattctgccactgaggttgttggtgaaaagaatgttgttgctgtaagtgtctctaatggatcattttttcttggtttcttttccattagtattgcaggcactaatgtctagctctgttgtcttaggttggagtgttccctaaattatccggggatgagtttgattctttcatggcccttgctgagaaattgcgtgctgactatgatttcgcacacactttggatgctaagtttcttcctcgtggagagtctgtggaaggacctgcagtgaggctgttcaagccttttgatgaattgtttgttgactccaaggtaaaggggaaccttttcattttgtacattacatcaatgagaagtcaagttttatgcaataatgtttcaaattatttatttgatttgcgaatcatggattcaggacttcaatggggaagctctagagaaatttgtcaaagaatcaagtatcccacttgtcaccgtctttgacagtgatccaaacaaccacccttatgttgccaaattctttgaaagccctgccactaaggtaattctcagtaaagttattttggatctcactgcagtgcaatacattaatggacgttttcagttatgccttgcatttttactggacaagtattttagatttctgaagatggtagtttagtaatttagtatgtgcttgaaggttaaaagcttttctttgccggtggtagtgttaactatgacaaaagctgtgatatcataaagtagtgattgaatttgggtaatagcatcatagttctctagataattgtaaaagcatttgttctgtttctgaaatttcaggcgatgatgttcgttaacttcactggagcaacagctgaagctctaaaatcaaagtaccgtgaagtagctacatccaacaaagatcaaagtcttgccttccttgttggtgatgcagagagcagccaaggcgctttccaggttactacacatttaagttttgtctcttattatcattttctcatgccaatgttaacacatctctaagaaatttttttcttttcatgtattggtttaacagtactttggactcgaagagagccaagttcccctcatcatcatccagaccccagataacaagaagtatttgaaagtcaacgttgaggttgaccagattgaatcatggttcaaggacttccaggtttcattctcttttgcacacattcacacaaggttttatgaaaaaagaagtacgtataaaatcaatataacctaaacaaacaacatgttttcttcaggacggaaaagttgctgtccacaaaaaatcccaacctattccagctgagaacaacgaacctgtgaaggttgttgttgccgagagccttgacgacatagttttcaagtctggaaagaatggtgagtacattatttgaaaactctaataatggtttcaatttttttgcgaacgcaagactgataaacatcaatttatctatcagtcttgattgagttctatgcaccatggtgtggacattgtcaaaaacttgctccaatcttggacgaagtggctttgtcattccagaacgacccaagtgtgatcatagcaaaattggtaagcctctcttttatgttctttacatgtcaaactataacttgatatactcctcctggattgacttaaccgtgtctgtgtctgtgcaggacgcaaccgcaaatgatatcccaagtgataccttcgatgtgaaaggattcccgaccatttacttcaggtcagcgagcggaaatgttgtagtgtacgaaggagacaggacaaaggaagacttcataaacttcgttgagaagaacagtgagaagaagccaacttctcatggagaagagtctaccaagagtgaggaacctaagaagaccgaggaaacggccgcaaaggacgagctgtagaaatctcatgagttttgtttcggaatttgagtaggagcgtttctcttcttcaccatatccaacagaatcttcttttttctttagcagttttacagttttatcttttttgctctcttgttcgaacccaaaattatccccattaataaaaagttaaacctaataatcatttaatctgttttatgatttgaccatagggttggttagtttggtacgtctatcatttttggtggactgttcggtaaatcgtcctgttgattttgttcgttcaccgatagagccaaactctcaaatctcaatctctgagatagaatcaacaatgtggtcaaatatataacaagtatataaatatgaaaagttcagtttatatacaatgtgattaataggaaaagttgcagtaagaatatgaaaattttagttgaatatctttaaaacgttacttttgaatttaatactgtgtgtgagtgtttctcccttaccaaaagatattcaactaaccttcgaggttaattaaatttgtataggtaaagggcaactttaatccgaatcatatgacaatgacatgacaaatgatgatcgcaatatacataccaacaaatgataaataatttgatatatatattcgaagatagaaagacgacaaatatctactacatattacaccaatgaactagctctgatggctccttaaagtgatagcctgattcatgtggtttcgtggacccaatggtcctgttaatatactacatgatttatttgtgtgtccaagcattgtgtatatcgtatttgacagaattaatagctttcgctgatgacatgtataattttttctaatcatcggaaaattttggattgaagtgtagacatatactgatcagtgcatgttaaaaatcatatattttgaatatgtaaagtgttcaccataatcaggcatatatagttgcaatcgtaaagaagtacttgaacccatcccaacaattcatgatatgtatctttcatttatttcacgaattcccaaggaaactaaaatagtatacgatacacttggcttcagattgtttccctatataatggcactaactctccatgttgaaaccacattaatttcttataaccaacaacaataatgacaaaccatcttcaagatcccttacctacttacccaaaaccggttttaaccaaagaagaacaagaagtggacgagaaaatggtaagcttgcaagcagagagtatcgtgaacaccgtggctttccctatggttctcaaagccgccttcgagcttggcgtcatcgacaccatcgctgctgcaggaaacgacacgtggctctcaccgtgtgagatagcgtgtagtctcccaaccaaacccaccaacccggaggcgccggtgttgcttgaccggatgctgagcttacttgtcagccactcgatcttgaagtgccgtatgattgaaaccggagagaacggtcgaaccggaaagatcgagagggtatatgcagccgaaccggtttgcaagtattttttgagagatagtgatggtacaggatctctcgtgcctctgttcatgttgctccatacccaagtgtttttcaagacttggtacgtacttcgctagttttttttaaaagtcaaattacattaaatcagttaatatataaccaacttatttacaaaaatatattttgtataaaaaatgaataaatgaagatttttctttcacgtacaggacaaatcttaaagatgtgatactagaaggaagagatgcattcaactctgcccacggcatgaaaatcttcgaatacataaattcggatcaaccatttgctgagttgtttaatcgtgcaatgtcggaaccttccaccatgatcatgaagaaggttctagacgtatatagaggatttgaagatgttaacactttggtggatgttggaggaggaaatggcactgttttaggtttagtcacttctaagtatcctcatatcaaaggtgttaatttcgacttagctcaagttttaacccaagctcctttttatccaggtatacaatactaattaatatatttgataaatattgaagtactgctagtttcatagctaccacttaaacctactttttgttgtacctattaaatcaaaggagtcgagcatgtatctggagacatgtttgtagaagttccaaagggagatgccgtctttatgaaagtaagtttataaatatatgaaaatagataaatttatatctctaaagctaattattaaaattttgttaaatgattgacagtggatactacatgattggggagacgaggattgtataaagattctgaaaaattgttggaaaagtctaccggaaaaagggaagattattattgtagagtttgttacaccaaaggaaccaaagggtggtgacttatcttctaacactgtctttgccatggacttgttgatgttaacccaatgctctggtggtaaagagagatctctttcacagttcgagaatttggcgtttgcgtcaggttttcttcgatgtgaaatcatttgtcttgcttattcgtattctgttatcgaattccacaaataaatttggaatttaagaaagaaaagaaaacaatatatacgtaactttttctgttttgttaaatggcttttattgcatgtaatatagtttggtattggtttgagccttttcattgttcaagattatggttgttttagtattaataaacggtgtgtaagaaataaattcggataagtataaaagtgtgtattcgcattaggtttgtaaattactgcttgaagcttgatcacgggtttaacggtctgaccaggtcggtccggattttaaaacattgagtgaactcatttacactactattaaattcaacatatatcttttttcacaaattccataataacacataaattatgactaaactataggtacaaacattaatcagtacatgcaattgcattccaattcaatatatgtggatccttgttccctgaattcagcttcttgattgaaactatttcacagcatgtaggccagatggccctaggcttcgaccaggtgtttcacatggtggacttgtactcaacaagccgtagaattagtaacgggtatggtagctctcaccggaagaaagttgcttttttaaaatgttacttttttttttgtcgaataacgatttcattatagcctcaaagggaaaatatataatgttactttaattattgtctttccaacttatacataatgggatgacaaagaaatatttaaaaagtctaatttaaaaaactaaattaagtttttaacattaaaagtacaatatatttggatttaaaaaataattttagtacgacgttgttaaatgattataggatcaatgagtagttggtagttcctgaacgggttacaaaaaagtgatatcctgattcacgtggtttggtggaccgacggatcttgttaaatcacctgaaagatttcattttaattttcttaacatccacttgaaagatattttttttaataatgaacgaatcatggagttgttgatgttaacacaatgctcgggtggtaaaagagaatcaaggaataaacagaatataattcaaggtggaattttttgagttgattacatattttcaagacatatgctgatttaatagtatattgcaaatatgtaatcaactcaatgttttaaaattgttagcctaagtttaattatattctcacttgaaacaattttactgcatgtagtacgccaactggccttggacttcagccatgtgtttcacatggtggatttgtattcaacaagcctacccacccatgagttttaccagcaacgattaaaacaattgcaaactcaacgcgtctaagcaaagaagaacaacaagttgacgaaagaactctgagctttgcccacctctactcggtatggttcaatgttactatagattactttctaacattaaaacacacactgtttttggatttaaaattttattatagacttaaaaatttaataatagtatgacgcttttaaatgattataggatcaatcacaagttagtgcttccttaaagatattttcctgcgtgggttagaagaaagtgatatcctgattcacgtggttcggttgacccctacttttgttttcgctatggaattataaataaataaaagagaactaaacatgtattcattccatttcattatgtgagcctgaattgtgtgacatgatcagaataccaccacaaaataaaatacgaaactcatcacaatcctaaagctttgattgatacaataagacgcggctaatttaggaatcaaatcgaatcatccacagattggtaattcttagagtggagattatacgataaatcacagataatgggaacttcaacgctcaaaaatggattggttttgtaaactattacattgctctcgagggatattttatttagggtattttgaatttttatgaatcaaatttatttcctacccggccatgacacataaatcaaagataaatatctaatttttattaaatagatttagttctcaagattcagtaacgcatacatataaaggaaacttatcaatgagtacatgaacaatcatgtccacttgcttgatttatacaaacgcaattaggatagtaaggatccttagtttcatctttgcactgttgaggaccccgagcacgaattggactacaatatgttcccggaaagtattcaacaagtacaggtggacgatcttctgcctccactgtttcatatcaaccacaaaaatattagatggtggatgaaacgtgttagataaatacaaaattgataacacaaaaatttacattcataacattttttcatcagtcaatgttttcatattaagcaagtatataaacaatcgaaattatatgaattatatatatctcacctttagcattatacatcacgaaaaacatgagaacacaaagaaccacacacgcactaacagatttcatgatgcaaatgatatgtctatattttttcttttgttgttgtgtttatctggtactgaatattttttcttatcaacaatgtctacatatatatacagacaacacacacacagatatttttttattcttactcaaattaaaggcaataaagttaagtttgaccaaaataattaatgccaatttgagagtcaaaccaaaatatttattaaaagaataacctaaataagataaacacatttaagtaataaatcatatatttgacagctaatctacactcccaacgttccagattataatattttctaaataagcacaaagtttaagagaccataaatgttttgttattctaatattaaatacccataaatatagtatctaacatttattttaaaaattaaccaatagaaaaagattgcaaattattaatagtcataataaattatgcattgatatttgagaaaaaataatagaacgacaaagtgagtaatatgactttacttgcatatataattattttttttcttttctcttcttatgcatttaaatcatcatccacctgttaataataaattggttttaagaaattactattaaaaattatgacattgtttccttttttggataattaatatatatggattatgatcccttctcgttggaatttattaatattatcattactatgattagttttgatttacaaaaatttcacaattattttgtttccttttttgggataattaatatatatagattatgatcccttctcgttggaatttattaatatcattattattattattagttttgatttacaaaaatttcacaattttaagaaataatctaaaattaccattaaataattaatttgcaaagattcctaaagtgtcagttttattatggtcatatattgaaaaattataattgcagtaatttccctttaattgtgagatttctagaaatatatctttttctctgaaaaagaggttttccttgaaatatatatcatgataccagttagtgacttagtgttgtccataataaatctttgtttatcaccacaataagcatactgaaactgaagatatcaccaaactttggttatgattttctttcctatcgcatcgtatgttttatatagttgaccgttttaaaatttgtagtttttttttttataatcgtcgatattctattttaaccttttcgatgtgaagaaaaaaatgaaaactctgacgcatctttcattagttaacttttaattcgcatttgagtactactacacgcgtctcagtgcatggcactagtgtgaatctcgaattcaatcttctttgccattgttatctatatcaaaacaacaacaacaacaacaatcgcaaactatctacatgaaccatcatcttttattcaaaaaaaaatacatgaaccatcatctttttgtccatccccgtgacaataaattagtattaaacataatcagtccacttgtctttgggatttctccttataaaaacatcactaactgtgaaagttaaaaccacatcctcaaatcaactctacctttgttatcatcttcttcaatctttcaacctatatcgacaattatgtcaaaccatcttcaagatcccttaaccacttaccctaaaccgggtttaaccaaagaagaacaagaaatcgacgagaaaatggtgagcttgcaagcggagagtatagtcaacgccgtggctttccccatggttctcaaagccgccttagagcttggagtcattgatacgatcgctgctgctagcaacggcacgtggctctcaccgtctgagatagccgttagtctcccaaacaaacccactaacccggaggcgccggtattgctggaccggatgctgcggttacttgtaagccactcgatcttgaagtgttgtatggttgaaagcagagaaaatggtcaaaccggaaagatcgagagagtatatgcagctgaaccgatttgcaagtacttcttgaaagatagtgacggctctggttctctctcgtccttgttattgttgctccatagccaagtcattctcaaaacatggttagtgaacataaaacgtaaatgaacatttgaagatattttttttgaaaaaattccatatataggacaaatctcaaggatgtgatactagaaggaaaagatgcattcagctctgcccacgacatgagacttttcgaatatattagttcggatgaccagttctctaagttgtttcaccgcgcaatgtcggaatcttccacaatggtcatgaagaaggttctagaagaatacagaggatttgaagatgttaacactttggtggatgtaggaggaggtatcggcaccatattaggtctcatcacttccaagtatcctcatatcaaaggtgttaatttcgacttagctcaagttttaacccaagctcctttttatccaggtacaaaactatacttagtatatttgctgtgctagtattactaactaatgtacctcctaaatcttttgtatggtttgactaatactaatgataggagtcaagcatgtctccggagacatgtttattgaagttccaaaaggagatgccatctttatgaaagtaagtttatatgtttatgaatcgataaattataattgagtctcattattttcgaaatataatatggttaagttattgacagtggatactacatgattggggagacgaggattgtataaagattctgaaaaattgttggaaaagtctaccggaaaaaggtaaagtgatcattgtagagatgattacaccaatggaaccaaagcctaatgacttttcgtgtaacaccgtgttgggcatggacttgttgatgttaacacaatgctctggtggtaaagagcgatctctttcgcagttcgagaatttagcgtttgcgtcaggctttcttctatgtgaaatcatatgtctttcttattcatattctgttatcgaattccacaaataaggatttggaattcacgaattctgctacatgctaagttttcttttcaagattgtttagtgtattatattaacagattgtaataataattgtgaaagggtgtttgctttaggtttgtaattgaaacatttcttcttatgctccgacaacgtttctataatgttttcttactgtaacctttgagtttgattgcaccaaaaagcacgagctagtaaatcccaatttcgattcattgctatcgaaagcagtaggattcataaaatattcatttactctcattttgattacaatcatcaaacgacatttacttattacagagcacaatgagaaacaagtgttattcaaatgctagacttgaatacctctgaatgaatcagaggcttccatgatgggtttcgaggaagaaacgtatcctgcaaaatacacaaagctcacgaattcaatttcaagatccagaatttcgagtagatttttaaaagaaattcgtaccgaaacgtaggagcaagaagggatgatggagatggagtgagaagaggcgtgttcgaaagcggcgacgcagagatgagaagctaaacctaatcctcgtttgaatgaaggaacgtaagtatgaaccagatccatcactttaccgttgtttctcatcttgtattctatgaaagcttcgtgatcctccgtctcgaatcgccttttgccttcgttccacactatctttggtggctctgtcgccatcttcgcctccgttgtcgccgccgtgttcgtcatttgtcaataaacgtaaatcgaaggaatgtttctttatctgattcttatcgggcctattaatgggcctattaaccgcggtgttctgttatgaataatttttaggaggacttttaagattttaaaataacgaaagcttcattggctaaatgtagctaataaacgtacattaggatttcaattttccacaatgtagctaataaagcaaaactctcattgtgcataacttacaaaagacatgattataaataaaaccattctagtttggaactaaaccaaccatcttctctcttctctctgccaattgagctcacaatggagtaacgtgtgcagtctcgtctaagaagaggcacccgaatacattattgaagaaatctccgcctttaacaataccttttccatctatggtttccatgtcatatttgcaagcccgcatgcaatcaggacagtatgtaacctgcgttgcatagacaatcatgagaacttgcaatttccaagagtttttctcaaggaaacaagtatatgtcaggtagttttagtaacgaacctccaaaatttttggctcgaaggagctatcgagcattacatctactccgtacattgctctagatttgggggattgcatctctggatgcgcgagagctgccgcctcaaacactgcccgtatcacctgcttcaccttctcatggatatccatccatttaactattgagagttgaattgtgttattgacaaaatgaaatgcataaaaatctggagaaagtaaacccaaatatagtgtataccgttatgttcttgttcaaattctctcacaaactctgccgtgggcttgtgattcaacttccgaccatagttctgaaacgcataagagaatgaacatgaaaagggaaaacgagagttgctgaatcattatgtggaaagagtgttcttaactaataccatgacagtgaagtgagtttcatattcaaagaaactgtgcttttccaatgaatatggattgttggacaacctaacctgaaatcaaacatataggattgatatatatgagtaaataagcgcttgtattggttgtaatgaaaattaaaataagcattacccaaaatatctctattaggtaaatctccagcgggtcaatactccgcactagcacaacatatcgcagatcaaacttgttccccttgaacaaagcagggtgctctatgtacttctggcagatcttgggaccagtttccatcatgcggatgatagcagataaattatcggttatacttgtgtcgattgtccgtgccatgttccatggtttcaagatccacaaattgttcaattgatcacgtttgcggacacaatagtccccaataaactgggacaattgggtttcaagattataggtaggctgtaaccattttggagatccataaccctgtaaagcaaaacatagggatttcagaaacaagttactaacgtgctatgataatctaagggtataatctgctgaatttaccatttgaatagtctctgcaagatgatgcttcataacaagacatgcctcaaagggaaactgatttatgtactggtcatctgttattcccacctcttttttgagctcatcatccacctgtacacttgtccataatatgtctgcatcttttggttcatttgctgcaggcaggcaagtgacacaactcagaaaacacaaagaaaattcttgattcgtctaatgcatttatgcagacgattgcttagtatatccatccaatgagacgtagatatcatgaaaaatggatcaaatcacatactgatcacaaattctgggcgtgtcagaaattcttcaacttgaggtagatccgtgtaaaccagcaaaggagacccatcactatgctgtatgcttcgggaaactgaagggttggaaggttttgactcgaaggctttggcctgcagtttctgttggtatttctcaaattcctaggaaatcatgacagcgaatctgttaattaacaaaaatctttgtatgaaatgagaggaaaggaagtctgctaatgaacagaaagctaaagaggacaccgaggaagtacatgaataaaataattctcaggagtttgaaaccaggctgtgagtctcgcagaccgctgtttgtcctccccaataccagatagaaaatcacgagtgcactcatcacctttttgagaatgctttataggccacattaccgaatagctggaacatataaaaccaaataaacatgaagatagaaaatatttgcatacatgacatgtgagccctgatcaagaagcgcatgtcaatccacattacacttttgaactatagcaacataacacgtgtttacagcgcatagaagttgaatttaacaaatacgaggagcagtgcaggaaattttttaaaagttgctacctcacagcagattctagtttcccagaaggcatgaaaaggaagggagctactttgaaattgggttcatcactatgcctcaaagctgaacccaattcatccatcacatacctgcgaaaaagtgatatcactgcaccactcacagtcatacatatccaaaaattatgtgcccaagaactacagacaagactatccataaactgtttgattccccctcctaattctaacctcttaagaagtagactagcatcaaatgttcattcccaatactatagaaattttgcacatatatacaccaaaggagacctcgcccagtcaaatcaaagaaggctttagtctagagaaacaaatgctagggtgagaatacattccaaaagtgaaaatggtcattccgacatacaaagagtggtaactctttcagctttcagtgttggattagaatcgtcacaaatattaaatattggatttctctaatttgtctatttaactgaaaattgttatgatagtttaaatagtaaatataaacagccgtgagttttatttcttatccccagcaaatccaccgcactaattctaatatagcaaaaaaaaagagaaacattgcataccataaagaagtttcatcaagcttttcatcatccgcaaggcgataattcagcgcatacaaccacattgcatcaagaacacgatcaacaagagtatcatcaggattcagctcaggaatgcgtggttgaagcattgagtcaacaacatgctttccagtttccaaaatttttgccgtatcaacgccatttagtaaagaaaggtttgagagcgattcaagaatctctagagcattaattccaagaggtccaggtatgtcaacctacaaacaagaagtaacacgtgagctcatctctgcataaataaattttagttaactttgtacagtaacctcaatttgtatctgaataaggacaacttccaacatttacctctaatgaagacagtgaagggaagagcttcaagacttcaagtagttctccaacagaattctgatccaatgagtttccacgaatatttaaatgagaaagtaatggcatctcgtgcacagagaatgcctgaaaatgaagaaagcaaaggcagataaatcaggcacgtaaaatacaaaattgaaacatacaccttcgtcaatgcttgtagcctctacggtcaataaactacactccctgcctctctgagagaaagtagggggacaaaactgaccttattgactagattgtgtattgaccggtttgaaaggtcaagtgaggtgacattgcacaagggttgatcctgctgaacacaaccaggattatccttcccaaagatatctccacagaaaccaagtgcccataacccataattaggggtaaaacacgagttgtaaatctcaagactcggacagccttgcaatatttcgtcagccatctgacgttcactgaaaataatcataaaaaagaaatacatgagaaattaattatatatccacacacatccatatattttgtaaatgcatgattacctcttctgaagaacaggattgtcattcagccacaaagccttcagattcttaaacttcacaatctcttgtataaccacatccgcactctctattttgttcccgataagactaagcgccactaaatcctacccaaaaaatggcagcagcacaaacaaagaagctttagaatctagcatttgaaataaaccttcaccatctgagctagagtctagcatgaaagtactaaaggagaagaaagatctaaagacatgcctgaaatttactaggcaaatgcagggacaacaatgagtcatcaacaccaagaccctccaactccaaccatctcaaagagtcatatcctttatctgctgcataacgaatttcattgtcaattatctgatcaacagagagttcctctgccacttcttcttctccagcatccacatcaatatcaacactcatcaaagaagccatcctctcagccaatccaggaatttccttaagctgaagtaagagattaaaacaaaccttaagcttcatcaccaatccaaaattcaataagcttctttcgagagtgagagtaggcgttacctgcttataggcatcgggaagacgaaaagtccaggcgtgatcgacaaggaagacgtcagaatctttaggcatagattcggcagtgaggagaagcttccgtcgctgatcatcctcgcaggattcgatttggaagtaatcgccgccatcaaaagtatcgtaagcaagtttctcgaagaggcgtgggtaaagcttcggcggcaaacctgaagccgccaaaagtattccatgtactttgacgaaatcatcaaagctctcgattttgctcattgttctctctgaggggttttagcttaagctgcgttttcggcgacagaagaagaagagaagtgggagtgatataatagggttaattttgaaaagtaataactaaaaaaatgtaagaaacaaaaagaggtcctaccgggagtcgaacccaggtcgctggattcaaagtccagagtgctaaccactacaccatagaacctcggatgcttgttaggtgaaagctatcttatttatatacataatatatgcgtattagaaaaaaggaaacaaaatagaaaaaaggaaactttgtaacttttaatcctgaccgctgaaattttgctgatatcttgaccgtcctttgaattgatagctcgtctataaataatgctcttgctcttcctctctatgctaaaatctcgaaaccctaattattctaagattctaatttgtgaagtttgtgaggttttagggatgggttacaatttctacatgagagtgtatgaggttgttgatgatgcttcaacggatgcaatcatatcgtggagcgaaagcaacaacagtttcattatctggaatgttggagagttttacagaaggattctgcctaaatatgtagacttgggcacaaacctctcacggtttttctccaaccttcgttctcatgggttcaaaatagttaaaggaagaactggagtattggaatttggacatgaagattttatcagagataaactggagcttatgaagaagatggttagcgataaacgtaaagcaaggaaagctgctaaatccaaagcaaggaaagctagagttcaagtcgagtttctcttccaacacttgcaaatttgatcgtccattaaatcagtcttctttattatgtatattcgtctccaagtagattcaagtctaagaacttttcaatagtatgtttctctctttataggaaccctctttatatgcctagtctttgattcttctcttatgatggtggcttctcttctttattgtcttatattatgattcataacaacatcacatagaaacttcctaaaacctcttaacagaaaattgaaaacttttgaaacatcttttatggaatatccatccactgcattacactagagattaacttttaaaactactactatggattcaaaatctggaaaagggaacaaagtggtgttaaaaacggatcctttttaaaccctaagagataagtttctctgcctactctgccaaagttatgttatatagccagatggataccgtctttacttcttgtgaatactgttgcaaatccattgcgattcttctcagaactccctcggtttgttgaaactggcattgaaacagcagcagacgcagtagaagaagaagaagatggagatgtttctttggttggtttgatggactcaggatgatttcttgtcatgaaagtttcgtttttgtgaaccttccaactctctgagttgctgctgctgcttacaccatttgcagccattggaattatcggtgtatcggttaagaaatcttcaagtgttgcaagggactgcaactgtttccccaatgaagctattgttttctgacaattcgcaagtttccctgcagctgtttctatgtcttcctgaattatagtaatcaagttttagtggacaaaaaagtgattgtgatggaacacagtctaagtttaactaacacctgaactttggagacagacctgtttgatcttgggttctttattttcactcttgattgagttctctttatggagagagatctcttcttcaagagcctcacattttctcctaagctcatcaaaagcaaacctctcctttctcatgtcttcttccaaagattcaatctttgcggatttagtctttgcatctgcttccattgcgatggtttgagactctacttcagcttttagttcgttaacgagtttcatctccgtttgtatctcccccagcttcgtctcgatttcttgcagacaaacttgagattcttcatatttatctttgattatgtcaaaagatatttgcagctcagctttctcaacttccaacttctccaacttattttccagctccattttttcacaagcaatagcttcgagctcaaatctcaatgtgctctccacttccctgttacatttaacttcacttttgagctcatctttctctacttccaacttctctaacttctcctcaagttgcttgattcggcaagtcaatacttctatttcagtagccaacgagttctctacttgagcaacagcctcttctctgttacattttacttcactttcgagttcaactttctccgcttctaacttctccaactgttcttcaagttccttagttcgagaagtcagtacttctatttcagcagccaatgagttctctacgtgaacaacagccttttctctgttacatttaacttcacttttgagctcctctttctctgcttctaacttttccaacttttcttcaagttccttagttcgagaagtcagtacttctgagttctctatatgaacaacagcctcttctctgttacatttaacttcattctcgagctcatgtttctcggcttctaacttttccaacttctcttcaagttccttaatgcgagaagtcagtacttctatttcagaagctaacgagttctctgagggaacaacaacctcttctgtaactgattcaggtccactcttaccgttcccatctggcgtctcaggcaatgctacaagacgttccatctcaagaaaatcacccatgagatcaagttcaatggaagaggaagttccctgaaggcttctcttctcaatcaatgtggatgatgcccatgaatcagagcaactcacatccattcgttcccctccatcagaatgactatctgtagatcgatgatcgttaaacgaagctgatgacttagccaacatccgaaacttcctgcactcagcctcaagtttcgccactttctttatgctatctaactgctgcttgctggcggtttcagctgcttgggtactcaaatccctctcaatagttctgatctctagctcttcgcatcgcgcaagaagctcgtgtctaagcatcacgttttctttcgccacagattccgccatttggctaagctcctcagacttggttgcagtttcaaaaatctggttctcaaggctggttctagaagactgcaactcctgagttctctcgatcacagcatcttgaattctctgttcttgttcatctcttgcttgccttaactgtctcacacactcctttaaagctccatcaagatggcttactctatcttccaacactctattcttatcatcagcagcctcaagcttctcctttaactcaaccacttcattttcagctttctcccacccttcacaacaagagtagatatatcttcactaaaaagtcgcagaatcataaaacaaaaatgtagaaaaaaagattgataccagcgacagcttcttcagcgactttgacatgttgcttcactagatcatctttagcactcacattagcaagagcagctgaaagtttctcggctaaagtcttcatgctatctttcaactcttccttttcagtttctacttccaaagaaaccgttggtgattgtatctcgtcatcacgagactccattgtactctcaggcttgagcaaaaataaaaacagacattacaatgatcttttagatgcaaaggacacaagactaaaataacaaaaacaaaattcttgatcttacttgaatttcagaatccttctcagatagtgaagacacagactctgattcaccaaagcttctctcagatgattctctcttccttttctccatttatagtttccaagatcacaatcagcacataacagtctcaggatctgaatgagagagaaaacacacacacacacacacatacattggattctttaaaaatgctgaaacatacataaacatagtcaaagaagaaacaaactttaagatgaagtaaactgaaccaatcagcaaacatgcaagataagagaaaatcttgaataaaccaatcatttaacacaaagtattagaaatgatttaaaggaactgaatttgtctttatagtaacaaatgtggttccagatgtccgtttcataatcaaaaaccaacggttgagaaagctacaagacaaagaacaaaagcttgaaactttaaatttgaaactcgttgaggcataagggaaaatctaccaaaaccccaaatccaagagaaggaaataaaagctacgagggtaatggaacagtgataagtaagtctcaaactacactccaaacattggtctatttcagagaacacttaagtagataaattaaaaaaaaacgaacaaaggaagagaatattgtgaaagagaccaaatgtttggtgaagtaaataccttttggttggggactgtatgaagaactttgagatcccaaaatgccccaatggaaacaaaaaaaaatcagcgattaaacaagcaaaaaggaagaagctttcttcttcttctactactgtctgaaacactattacgatttattaacagcgacaaggcagagatatagcgtgagagagagagagagagagagaagagagaattctctttatcttgttttttgctatttttgaaatatttctctaatttttcttctttaattcaaaagatagaaagagagatagagcatgtgatcttctgtatgtggagctgtgaactcaaaaaacatttaaatcttaactttttcagctttttttaaggaattattatttttgtgtatataaatgtaaggaattaaaagttaaaacgtaatttcgtactaattaatttgaattattgacatttaaagtgcttataacaattcccgcccgagaatacattattgacaataatttaggataattaaattacgaatttagaaagcagcttttgaatttaaggaagttgtaacggttttaataataataatgtgattaaagaagagctcacgcgtctcgctgactctggtcattgggttcactgacaaaatcagtgagattcacaatttatccgacggtttagattgctcccatctctcactctgctttctacttttttttttttttttttctgttaagtacaatataattaatttatacactaatctccaatttatcttttcttaattgttggtagttggtaagattaactttattttcactccagattacaattgatagtctctttccttttgtcgtttatctcgagtcccaaaaacaaataaactaaaaactatatgcataggcttaatgacgtggtttgataaaggcccattaagttgtatagacatggtctcaaagcctaaaaagattgttgagagtaagagacccattactctgttttttctgtctcgtcctagttcccacacaaattacacgaaaagacagaaacatcaatgagaaaagagataactattcttagaattaagtttttgtgcatctgttaagtctttcgaatgcatcgagacgtaaaaaaaaaaaaagtaaaggaagaagaaaaatttaggcatataacttggtgagatcttcagagaattccctcctaattacatctcttttcagctttagagctgctgtgactaatcctgactctggcgtccatggagatgccaataatttgatctttgctggtatctcaaacttctccaatcgtgattgtttagccgcctgcataacacagatgttataaggaaatgactgggggactcaaatagcttggtaatgagtagcaatgaacataccttcacaagggacgcatacacttctttcacggcttgctctttcgtgcacagttcttcgaagttggcaaagtctattccttgctttgaagcccaaccttcaactgtatgttgggacgcgaccacaagagccacacagtaactgtagaacgaatcagcatgaaccattatgttttcaacatagggacttatacttagagcagcttcaacctgcgaaaaaaaagaatgttttaagaagcttctccggagaattgagtgatgaagacaaaaaagggtattcggattgagaaaactatactttgcccaaggagacatattctccatgctgaagtttaacgatatccttttttcggtctattatctcgaggcagccatcagggtgaaatcgtcctatgtctcctgtgtagaaccacctcattcccttttcatcaacctttgaacattcaagtgtataaaacggttagaggaagaaccaaaccaaccaattcttttaacattgccgaaaccaataatgttgatttgccaccttgtacacttctttagttttctcctcatttttgaaatacccaagcgtgatatttgagccaccaattacaatttcaccacggggcatcggcttatcactagttagatacccaccttccgcccagtctactagctgaaacaagatataagcatatgatcacaagagactacgacatacaaactaataaatagctaacaaagtattaaaagtggacaaatcaggtaaagaggttacctttacaaaggagcaaggaagtggagcaccaacacggccaacggatgtgtcctcaaactccgagaaggttccaccagcacaagtctctgtgagcccatatccctgaccgattggagccctgaggaatatcagtgttagatcatagaaatggaaagggacgaaaagatatattggagagtagcaagcctcaaggagatattcagggattcgtttacccaacgcagatgttaatgaatctctgagtgtcaccagaaagaggggcaccaccagagagcaaatagcggatttgacctcccaaaactgcacggattttcctgaacacaagcacatcccacaaaagcttttccaatccccaggctccaaaccaacttccattgattgcagataatcgccgagcatatgcaaagtcaaacaatttctttgacaatccgccctttgcatcaacctgatggtcataaattgtcagtgcttatgcaattataatgttttactcacaagagaatgaagacaatttagcacatcttggttgctgggagatagccggaattatttaaacagctaggagagcacgagctcaactgctttaacagaggatagccaaccaaagaatttcgatgtgtatctaacatgcacaaacctttttgcggacaccatccctgacacgatcaagaatggctggaacagctgtcattatagtgggctttagtgctgtgacatctccttttgtacccttttttatcttgtttgaagtatccgttagcgtcaagggagacccatatccaatagcactcccaatagtagccattacgctctacaacaatggaattaggccgcattcaaatactctgaagtgtggaactgctatataaacgcattgagtaatgaacttttaagatacctcagctgctaactcaaggatgtgagccaaaggtaaatatgccatgtatatatccctctttccaaggtcaggaacaattgtcatcactgccgaaactgtagctaggacattaccatgcgtcatcataacaccctacattatttgggaagtgggaaagtcagattaagtaaattttgcaggaccaataacaaatagctgatagaacaattttgataaccatagacaagatttttattctgagacaacagttgtacacgtcaactggtttcgaaaactttctaaccttgggaagtccagtgcttccactggtgtacattataacagcaacatctgctgagagagggaaattaggatccacaggattttcgcggccaagtttctgaacatcagtaaatgaagtcgccatccaattactgttcacatcagatgggaattcatcatccatgcatatcacacgtttcacagtttcaagctgttggcttatgtccatgagctttttgagttctttgctaccacatattacggttgtgacctctgtctggaaagtgaaagaaagggaatcatgaacatatgaaaggtaagcatacacaaatatgaaaaatactaatccacatgataacatagagctcattccaacctatgtgactcttataccagaaacaatcaggacataaacaaccgcagagcatatatgacatggatttaggtcgccataataaagagaaagcagaaaagaggagcaagggctacctcattcagcgagtgacaaagagcttcctctcccaaagatgaatagatagttaccacagtgacgttgcgcctgaagcaaccctgaaacattgaatcacacagaatatttcataaccgtaccaacagtccatccggattataaatcagagaaaacaggaaaaggtataagaaaagatggaaatcacctgtagggagatgaaccattcttctctagtatctgcaaaaatggcgacacgctcttccgtcttgtgcccaatctgaactaacccagaggcaaaatcacacactgcttcgagagtcttcccaaaagtgagccactcgtagtcacctaaatgcagtttctcgaacgtttttccatcctcactagtctcaatctctctagagatcagctttcgggtgccaaggaaaaccctatcactgtgagcattacacgatatctcaaagagctctggaagcgttgagatatgttcccaatgggaactaacaggctcagtaaacctgtgattcctaatagcataacctggttcaccaccaacatcaacaacaacacctcttttcttttctttcttagatttctgaaccagaaacgtcaaagccaatggcacaataacaccagcagcataaggaatcatctttcactaaacccccaaacaaagaattatatggctaataaaacacgtccacctcctgcaaccaaaaccccatcacaatattaataacataaatcaatttcaataaaaccaactttaatacacgcgttagttgtatgtattacagagaagagctacacgaaataaactcaagtaaatcatattcgttaagaagaaccccctcgagaactaattttactacatttcgtttgatcgacggaggaattgagtttaactttcaaaagatctgagaaaaaggcgagtgtagaacaaactaatctagccttataaaaaacacacacacacttccatgaaacaaacacattcgaagaatgtaatcgggaatgtgaagcataagaaagagaggaagatggaatataccgtgatcgaagcagaacggaaccagagaagacgtcgtcgggaacaataaaaaatggaaaacagcagcgaggctcaaatatagagaggaggaagacagagagaacagtaaagggtataatggtcttttagcggagacgtcgagaggactgtggaggcggaaagacgaaacgaaaaaaatataagaagaaaacaaagttattagttttttattattattttgaaattattggatgaggaaataaatacgtggaggtatagtcaggtgatatggaccgttggatgtgtgtaattgttaggtcatcaatctgacaacggccatgcaaataacctctttcctgttggtacgccaattctcattgcacaaaacgctcttatttgtcaatttcaaacctaatttcacaaccaatcgaactgcatttaaacctaataacatggtcttctcatcaaatatgaacaaattttgcaactaaaagaaaatggatttatgtgaaattaggaagattttggttgagtttagacaagtttaaaactaattgacctggttgattatgaagtcgagaaaccaacaaaaagtgaccaactttttctttttattaattttcttttcggtgtgggtcatcaacactttaactctagtcaaggattcgctaattattttgtacgagattatcaacatatttaggaggaactccgtcgttaaacaggatcatgttcctacgaaattctctgtctccgacttcttcttggtccctgaaaattgagcaatagactttttaatcaaacggcattctgatttctgaatagagttataatcattggtcatattagcaattattagaaagagtgaaggaaggatttctctaataacaaattttgaaacgagacgacgcttacaatattgtcacttgtgtcggtcacttctgaaactgatccttctccagaatccgaatttccttttttcgattttgctgacatcatgaaacatggcactcttggttagatttcaaatccaaaagcaatcatgaaaaatgttagcacatataaaatctgaacaaatttgaaatttctattcttttatgagaagaagaagaaactgttccccattctatggagactcattcattgtgaaaggtagatatattaaaggaagcctcatgtgtttatacttgcaccagacggactcagccactaacgagctaaatatctcaaatcgacaactgaagtagcgtcaataaataattgagaagtttgcaacaatttaccagctggaggattcaatttggcaggcacctttttgttctgctgctttgttgtagttgtctgcttttgggcagtaacctttgcaagcgtatgactaatttcagggacgctgcagaaagtaagattattacagatgacacaggaaatgagcgtcaacaaaaaaattaatgatatccagcgaaaggaacaaaaaaaagcaccaatcatgtaagtttcttaatacaatcagagattcagtagttcaaagaaatttggttgatcgtaacctaccaattccgagaaccataagattctgtctcctttcccaatcgttcctgaataaagaaaattcaaacagagatgttacctattgtactggtgtcgagttcattttgggttccaagatggtagcatttgtatcatggattacacataaagcattccatttacctgttgccccatggattcatggctcagggtctcccagctctcgctatccaagcaaaccaattcaacatccccattgtcgaaaataatctgcaacaaagcaaaacagaagccatggcaaatagcgcagcagaaagaaggcagagaaggggccaatgaaactagctgcaaagatgtacgctattcgagttctatatgaccaacttctaccataacccagcacatagaatcaaatagttaaatggaaaaaaatactaatgatgccttcatactattgagtttcaagcaaaggaactcaatagagcatgttcaaagtcaacatgaattcagtgtcatctgaaattagcacaaaggaagataaaatgacaagacaataagtcttgtcaatcatctcatcatatgccatggatatgcagtgcagaaatattccgcactaaaaatttataatataagtacagtatttgatcaatagtaaggtaaaactcatggggacaaatggatcaagagtcaacaacgaaaaaacaaaataaggacttcgaagtccagtggataccttgtgagagttgcttttagaattaaacttctcaacagtgccaggatagaaactggtaaaaaaggacaaaaaaaatattacagaagctccagcatatatatttggccaagtataagaaattttttaccatccatctgtgggagagagtaatttaatccgctgcccaatgattgcttcgccgtggttgctaatatcctgtgacaattattaactggtatcacaggaagatatggatagtcaaataaagatctaacatatactaatgtacttacttttaaagcagatactaccccggagtgtttggaagatgtaattttattgcttacacttgctttgacactctcctttgcacaagtagtgtgtctttctagcttctttattggaatttccgactcaactgttctcaaagataaggagttacaagaaatatgttctcccagatgagttcgcttcctgctacacctcgtgttattttggctggcttcggttgaaccagtaatcgacgtttcgatttgattgcctaataatggaggtaaaactttatcttccgaaccaactgctaggctatctttttgacacctctgatcatgcttggaaagcgttcatgtaggcagaaacaggatcagaaagaaagcttacatagcataagttaagcaggcaagatggtagaaggatagtaaaatgatgcagcgtggatataccatggagatctgtgattggaatatatgaactattctttcaatgaaactctgttccagcgcatttcgggtacgagacttagccttattctgcagagtgcattcaagaaatcataaataaatgttagttaatttcacaagtagagcaatattgacacaatgctggacttgcctggttatccgttatgctagtgaggctgtacaacgatgatggcagcaaaattgaccgtggcgcttgtggagaagtgaccacaatactatttaatatgttgacagctgagtaaccaatatcggctagaatgtgcagcctctgcagttcaaagcataattatattaagctatgaatgagaaagaagcatatgtgttattctgtactatcaagccacacttacaggcgttttacgagaatcaactgcatcttcagctcttttaattgcacggaagatacaaaacaaaaaaggggcggtttccttgatggtaaaaccattattgttgatactaagtaacacctgtaagaccgagaacagagggctgccaaagggaataagtgagaacaaaaattcaaaatgaaaccaaccatcaatagtagtaggaacatagcaaattacccacaaaagcgagcatagatatgctcgtccctgcagtcttctgaagggaactctgggtcatgtgcaagaacatgaattaggaacactgtcatgtaaactggactatcagtgagtgattccccttgatctaaatcccgacatgtccgagattctcttgtagccttgttgatgaatccattgatgtatctaaacgactgaacaaaaagacaagaaaattttcagagaacctaaagggttgaaacaaccgaaatatttccttcttagagtgaggagcatgagaagttacatcatcgtgcagatctctgcatggactagataaagaaaacgaaaaagcacatgcatatctactgggtatcatatgttccgtcaacagcttgtacaacttggtgagaaaagtcttggtaataaaggcgttggaatcctggaagatgataaacgtaaacagtcaaaaagacgatcataaacaaagtaaatccaactttctaagcacgtatatccagtacatgaaaccaagagaagcaattaaaagccagactgcccttacaaggttaacactacaataaacaccttttcttcagaaataaattaccatacacccaagcctatacaatcagagctactttgggatacttcctatatgcagttgcaaggacagatactctcagaagtgacaaaaatgcaggatgcagtatgtagcaactgtaatagtcgactcatgacttgctatcagttaacaacgacaaattgaaaaacaatctgttgaaattattaggataatattcaaaaatcttttctagattgtttggttgttggcaagatggaagtccctttacctttgccatcaaaatggtaagacggaaaacttcaggagaaatatgaaggtcccatttccttgaaagcaatagaacagctttagcagcagccagtctaacattagctcctgtgtcctcgctacaaatttcaaggacaaataagcaccttcgaacatatgacaagtcaacaaggatcaagactgtaccaagagaaactgataatggaattgtgaaagcacataaaacttgtggcttcgtgttaagagcatgtacaacatgattgatttgtatagctatccaaaaagaacataccatgatttgatgccatcgtgtccttgtgattttaatgttttcttcaaaatgtttagcaagtcgtcaattttccttacgacttgaccatgacgaggcaagaaacttttcacaagtgttttgagcccatatatctgccaaagacaacaagtcaaaactgaatatacctcatctttgtaagcagaatttgagaacttcattacgcttatcacaactcaaaaatctaaaatatcttaaggcttacattcaaatcattgcctagctaataaagggataacaccattcttaacaataatgtgattcacacttatttctatatgcggcagcattattcttaaaaattctggagtaaagtatgaaaatgctgaacttcttcgaaagtacacaaataactggcaaatgttgagcagaggcatttacacttgggtcacacttggtttactttgggtttaaatggtaaagtaaatattatcagaactaataaacgggaagcaaaagagtttctttctccagcacttgcctttagcttgcaagagttgcaacaaccagaagactgatcacaagggagttgattgtcagatggttccgcctgtaaatattaccatcaacaaatagaaaagttaaaagaaaacagagaattactagctggatatctccataacgaagaatagcacctcttgtcacttacttgaaaaacccggtatatgtagctggtgatatcttcatatatattgtcatattccaaaacagaatattgcccaacacacgccaaagactgcaaagttgttggaatgttccgtccacacagcaaagaatccatgagcatctgagtaaaaggaaggcaaattaaacaatgtgtcattgctcaattttctctaaaaacggaaaaccatcacatattcaaaggaagtactgtgaaagatatgtgcacacagcagactgtcacatgatcacttcaataattctacttaagccaagagttaggttccctagaatataaagcacaataaagttatatcctaaggattttcccaagttagttacattaacatacacataaatgtgaacaagtaaatgtggagtaaaggaaagtaacaaaaagttccggttgctgaaaaaataacctcgcataactcagaaaagactgatttttcagatgatccagccaatgaactgatggcagaaaccgcacatttggtctgagaacgagtaccctccagacaaaccttctccagaacagggtaatagtcactgcaaaggcaagagtatgtctagttctcattaaaccataaaaaggatattagttgcctaggcatgctataacataagccatttttaagaagaaaaaatatctagaacaaacttatagcatctaatcaatctgaaaacaaagttaagaaaatgccatgtaaaccaagttctctagcaagaattttgctttagcaacacagattttatattttaacctaaacccattgtaagtcaaatagtgctgaagagattacccgaagttgacagaaatataaggagctgcctttgataaaactacaattagctcatcagcagctgaatcattctcctctagcagcttcagaaactgcttttccgaacctctcaggtaagaagggaacatgttgagaattacctaatttaagaaatcagtaacagtgtctcatttgcatattcgaagacaatgtaagcaaaatactaatgcatacttaagaacgctaatatacctaaaagaaaagttcaaaatttataatacaacaaaagttaacaaggaacacctaaaatgaacaaaggatagatatcaattggaacaaaataacttaatgaaaggataataatcagacgatgctagcatgtttcgcaacatctttccttaccagaagaagtttgatggaaggagccttcaattgcgtgttggcagaggtgctgccacaaagctgattcaaaagacactgaacatgctctgagctaaatatactaggcgaacattttgtagaaagtatgcgcaagaactcgaaaagagaatgtttaacaccaatcatcttgagaaacttctcctgaaaaataaaaataaataacaacaatgagaaaatgatcacctctctaatatgtagtaaagttgaatatatccaatatactaaagcgactatttattttcttcattctgattaccaaatgcattttctgtaaaatactcttgctgatactactaaacagaaaagtttgaacttactttaataatctgggcatttgtggatgacagttcctccagcagtaaagttaagacatcaaaaattgatgcatccctcattcggtctaatttttcaaagagatcttctgcctcagaagcatctggaaagcatgctgacagcttaacgaagtagctctttttctttctttgtgcttcttctatattgtctacctaaaacgagtatcagttaaattaataaaatgagcaaagtaaggtttgcgaatccctcaggatctgtgaaacttcaaaacttaagagaaaagtgtaaaacagaccttagctttcctccagagggttaggcaatgccgcaattcattttgcaacctggaaacatactgagtgaataacaagaaagacttttaaccaagacttgatgctgaattattatctctaccttcttttctgagataaaattgaattgagtgacttcaagtggatatgattcataatggcaaagcattggacccagtgccgcatcctctcttcaacgggaagaaggcgaggaaaaagatcatcggagagcacaagttccaaattttgggacctaaatgattcatagaactgtattagtgtttcagaaatatttagaggaaaaaaaaaactcaaggatagttagtaaattatgatacctgaattcttcacaatttttctcgcagcaaagtagcaagattttgcatgggatttgctcgaaattatcagtaattgtcatgtctccttctgaacacttgtcacaataatcttgatatacttctgtcagcttctgcagagccttcttcctaacagatatctttatcaaacaaaaacagaatataaaataaggtggtaggtaatcttgataaaaatagatccctaataatgcctcatatactgtaacatagagtaccttcttatcccgaagcctctcactggcttcagaaattagattcaaaggaacatacttcatattaaacttcataatatcacaagcaacaattagagcctgtgttcgaaccctatcatcaaagtctaataggcgttcctggatagcagctgacacataaaaatacgagtaaaggacaccaattagaagatagtcagaaatgaagaaccaaggcaaaaagagaatgcagcttcaggaatattactgagaactccagatgctttatttccagatggattcgcgaagtaacactgtttgccacatttcaatgcagccattctgacttctgcagatttatctgagaatcttctcaagaactctgcataaagatcttgatatgtctctacgtaagaacttaaacagtgcttaggctgcgcaaaaatccttccagctaagttaagggcttttattcgcacatcgacctgatcagtctgcagacatagaaataacgaccctggtgagtagcaaaaaaaaaaaaaaaacaggaatataaacgctaacttaaaacaaaacagtctatacctgcttaaatagtacaatttaaccaatctcatagaaaagctagatcatatgtttataaatataaaagtgtgtaagagataccagtagttcctgggtcaattttgggataactgctagcagcatctggggagcaattaaggagatcttaaatatgatttcgtgataagaatctttgagattggtctggatggaatctttttccataaaacatgatgttaaaaagctgcaaattaacggctcgagcctgtcggcacacctttcaatgagagaactggcgagcttatcagctccagaagttgtatcctgtaagcacacgagattgaaaacatcacctaatcattttgaaaaccataatctacagagataatcgttgtatatccatacctctccttccttcacaagattttccagaataacaacgacaaaagacgaatttgcctcttcctccagaacatcactcattatagctaaaatgttgttaaataaactatgttgtgtttgctgcgtgttagcctttcgctgctgcgttttcatacttttctgattaattaaactttgttgatggtgctctctgtaaagacaagggaaaaaaaaataccttgttaatgcagttcaactaccaaacaatgaaatcagagtagccatgaaatgaataaatcgtttcatctcttacctaacaagagagaaaaacatgttgaacatctcgtgaactaaatcttggcaatcctcgtccagcattagcagacaaaatttcaatcgagagactgtctccaagattttcgccctcttagagaaataagggcttacagtatcagatagctcagaaaactcagcaataaagagagtgaagatatcctgaaatagggatatgacaatgttagtgcgagtagccataaaactgtgataattgggaagaatgacttaaaagactctatataccctgagatactcgtcttcaaaaggtagatgaggtgctaaaatccggaaaagctcggagacacagacagtgaccaaaagactcacgtcattatcacgatttttaagaagagcatgcttgataatggacttcttcagaggtcttaactcagcttctatcagtttcaaacctttttccttgttggtagctgaaggctggtcgattttagagagagtattagcaacttcctacaaaaaatcacagaaataaacaaactcttagcatgattgaaagtgacaatatacgttaatcgtccccgcataaatatctcggatctgattagaaaataaatcatagcaccagaaacaaaatcgtcgcaaattaggttttctccgatcacacccagacacaaaactcactcaaattcaagtcaatttaaaaaggaatcaagcaatttcggagtgattaaaaagttgtatcaaacccaaaagtgatgaaatcgagtaaactaaaacaaaacccagtaacttgaaaataagcttaagaaattttcgaagtttttaaagtagtgattacagcagtatcagcttaagagatattacccgtagaagcttgaccagagaatccttgttgggacgagataattgtagcaaccgagaacataattcggaaactatctgcgtcggagttttctccattcaggtgtaccgctacttgtaaatcgatatgaatatggagacgaaacgaacccaaacaaaaaaaaacctagaacaccttagtggagtggagaagagaaagcgaatctaaaatccaacagtgagagtctgcaatgaaaacggagagggaagctttgggcgggactgaccctattttccttttttattttcgttaattaattattctctgtgtgttgttcattgcccatcggagactgtaccaggctcaggagaattataactaactttaaatacacatgccgacataaaaaaaaaaacgcacaagctatgattatttatatgggcctacaggcccaactttaatcacctaaaagcctaaatatgtttaaatcaataactggagaaagatcagccatctaaacgtcgtcggtttatcaaatttttattttgttttctgacggcaccggtttatcaactgttaatgtcaacattttttatctaagccaaacgttttgagttttgacggcctcgacgacattcataaatatttgtgtaaactcactaaaaatcctaaaataatcactgcttgagaacataggcaacatttaacatccgattggcgtcaaaggatttcattaaaaatgtagaaaataagtagtataatgatttgttcataagttgattccatagttttgttattctactcattagctggtgtagtaagcaaagagacaacaccacccatgtgcttagtagaaccatacacacacacacttagtggcaacaccacttgactctagaccataatgatcattttctgtctccatttcgtttctgattttataatttcttggatcaatgttcaataattgaatcccaaatatggaacaataataatggtggttgttaataggacaaaagtttctctaaatagatgcgtttttttttaacttttgtaggtttctttccctatctttcgagatagtttcttcatttgcttttgtgaaagattggtttatgtgtcacggatcgatcattgatgaataatgtgagaaaatgacttgctctttatgaagagagtaactgaaaacgatttgatattcaaacaatatttcaaaagttatgtttctcttttgattatgatctttataacaaacaaccaaataaatatccgatcagcttttcttgttcaacaatattttgatctatatacaaatactatcattcattgataaaatttaagatatgtaatgaactatagtatgttctattgttaggatcctacatctaaagttagatggaatctaaagtaatatttaaatgagatacactaattcattaattgttatttagttttgagttagggtctctattaaacttgagaatctaggttattgatccgggtggagtaacctaagaatgatatgttgcatgtccaatcttgagatttggttccacatgaagggatgagaattattgtcttgaaagcatgttaaattttttacaagatgatgcaaatagtaattaacatatcatgatcaaatcttgtaaattgaaaaaactcaaccttttgaggggaaacagctacaatatatactaatgattatctagctactcgtctaagaatataaatgtttagcatttaggtgaccaatatcaaactccgagctacttgccttacgttttacccttgcaagtaagtcaaattaaatttctattcattactaatcacattatgaaaaagggaaaccaaaacttgctgcctacttcattctttttcttgaatctttcgatttttcttaaaaattattattttgataaatatttcttccctatcttagtgttcacataaagtgtgaccgtaagatgggttagctttctcgtggtttgaccaagtcattcaaaaactcaatatactcaatgcctgaatggtcgtgcagcaacatatatgaagtctgctggctacatatgttaaagttggtttcgagtatgtaattttatatataatcttttaatttgttgaaataattttagatattttatacaaaattacaacctatacctcaaactatatattatactatatgcattttgcttgtagtcctatgaatatgagatttgtcttagagtcttcaaaattttatatttcatgaccgatcaacgttcaataaagtcgccgcttctttaaaagaaaaaatttggttgccaaacctattattattatagcttgagatataacttatgatcctacttttaatgcagtttcgaaattattcttctccaagacgaaaagaattgagaaggttggtccataatctttataacttctaagactttaacgtacaaatgatatatcgtcgttggttttttgcatttaaccagaaccagtttcttgtttatttatattttaattaattaattacaaacccctgaacagtaaattaatattggattttaaaacgttcaatttctgtagagcaataatatttcgaatttgtaagatacacgacaatcgatttgaaaaatagacaatagtagtgggatgtcaacgtcatgaacatgtaaggtcatcggacggcagcgatctcccccatatcctcggacgtatgtgggacaaaataccaccaaacaaaaaaaaaaaattgttgctgcatttctttaataatttgcgttatcataataattaattaacaaaaaaatatcaaaatatttccgataaaaacaaatcttcaacaaaatatttaacaaaaaaaaaaaaaattgcgcattttaatgtagtttatgtagtatttcctagtcacaccattatttacctgatataaacaaaaaatagtataaaaacagtaatattatttatcaccatggtttagtgaatgtacatgaaaaatttgttaccataccaatgagttttggaaaattgaaaattgactcagaaaacatgaaaatacaattttgtgatatttgttttgattcctgaatgaatttaataagctcacaaaattaaaattgcgaaattattcttaataaataaatatttcttactaaataaaaggaaacctacggaagagcaaaacataattttcatggcataaagagtgagagagagagagtcatagacaggagacgtttgagattgatgaacagcgaattcgaaacaaatcacatggaagaagagctctctttcgctaccgttaccttctccacttttctccttcattagggttttctctcttatttagctgcgcagctctctctctttcttacggattcacttcttaaaactcgttaatttcttgtgggtttttgtctcttttgcgatctgattccgaaagttgagtgagagtgagagaatcatggaggaaggaagtatgttcagatctctattagcgattcttcagtggtggggtttcaatgttaccgtcatcatcatgaacaaatggatctttcaggtttcttcttaaccctagaatttttaggttttacttaattgtatttaatacccttttgatctgatctattgatctgatgttgctgatttggaatttggtttcagctttatagattggtgataaagttttgatttttttttgttgttgttgcagaaactggattttaagtttccactatcggtttcatgtgttcacttcatatgttcgtcgattggagcttacatcgttatcaaagttctcaagcttaaaccattgattgttgtcgatcctgaagatcgatggaggaggatttttccaatgtctttcgtgttttgtatcaacattgtcttgggaaatgtcagtcttcgttacattccggtttcgtttatgcagacgattaagtctttcactccagctactacaggttagggttttcagatggaaagtttcctatttgtgatatttctattgtctattgtctaattgtttcttatgtatatgtttgagcagttgtgttacagtggctggtatggaggaaatactttgactggcgtatttgggcgtctctcgtgcctattgttggtggaattcttctgacatctgtgactgaacttagttttaacatgtttggattctgtgctgccctgtttggatgtttagctacttccacaaagaccattctagccgaatctcttcttcatggttacaaatttgacaggtcagtgccccttcctggagtctccttatgaatgaatttcttgctatgatatactattcagttcttggaactttcatttccatgatcattgctgagtcatgaaaactgcacttagtttctaattacaatgatatttgcttgttatgtcttttttggatttgatatgcaataactttgcttctattgcattagatatgacatcttagtccaaattgaaaaagcagtcactttaatgtgatttagccataaagttgattgatgtataaagattcaatcacatcaccttttgagaagtaaactatgaatatccatctgcgtagaggaaaattttgatttttctgtttttcattatttagcataaacaccgtttactatatggcgccttttgccaccatgattctcgggataccagcgttattactggaaggcagtggaattttgagctggtttgaagcacaccctgctccctggtcagccctcatcattatactcagttctggtgttctagccttctgtctcaacttctccatcttctatgtcattcactccacaactgcagtcacattcaacgtggctggaaaccttaaggtaactaagacaaccctaaacccgttactaaatttttctttcggattgctctggatggtccaaaccaacaaaaggataagcactattaattcattatactggcattactaagttcttatcaatttacctatcttaccatggtaaaagaaatagaaagcctgtcagctagagtttcttcgcatctacgtcttaagcgtacttcatattccattatacgtcttattcgtagtggtcagggcatgactgtatccatataagtttgttttaaacaagttaatcaccactagaatatcaaattttcgaggcacattgctatggtttttgtcatcaccaacttgtgatttgtttgttgccttggacactcactctcatgtttgtaatatgatttgcaggttgcagtggctgtaatggtctcatggttgatattccgtaacccaatatcatatatgaatgctgttggatgcggaattacgcttgtgggctgcacgttttatggatatgtgaggcatatgctttcacagcaaacaccgggaactcctaggactcctcgtaccccaagaagcaagatggaattacttccacttgttaataatgataaactcgaaggcaaagtctgatcttcttcattccgcagctcagtttagtactcactggttcagggtgctgcagaagagaagcattgacacaaggggtgttgaatttttactaaatatgcattttactcaaaaaccttagtagagaaaagttacatttttttttttcgttttgatttgagctcgtagaagagataatggttcctactactatttatatttctgtgaagtgtagaatcttttaatttatcaaatacattttctgaaacccgaaggagagaactactacatttattgcttcttcttttttgaaatttctgtgtatattcattactactatgtcatgctctacataggaagggtcgagagaatcatctcggctaagttaacgttgagcgaacaagtttaaaataaagactcttcttgaagtgtggagcagttctgatttctatacaactgaaaactgctttattattcatttctattgtatgtgctgtgttggcccaataatgcaatatcttcggaggatagttccattgacaggtaatgtcgagcttctcttggcctgaatcaagaaaaaatggagattaggagagaaatcaatcatactcagaaactatggtgaaccaactggtactgaccttcgccgtctgcctttctccaaggctccggataagttagagggatctgctcttgaaatctgccctatgaatgaagcatattcatggaaagctcttcctttcaatgatctcagagggactactgactctaagacaccggaaagccgtgtcattcgcctactgcatgcggaaaaaaacaaaaagcaactccggtaatgagaaagagaacaacggaaaattttggaagaaaagtgagccagcaagaaatttgcattgcaaccgatggacccattggaaatgatattctcatcatacatctgaagaaaattatttaccattttagtaagtcttcaagtatatctggtttcatatccaagcagcttccattgctcgatgtgtaatcctgccttgcctcgtctactgttaatcctctttctggtaccatggtggctgatgaagtaggaacggatcccgttgtcgtaatttggtttgtcaaaaagcaaaattcttgctgtgacacggtggaagtcatctcttcaagcatctgagataaaccagacgtatcaagatctcctgaagtgttcatcattggctccaaagctccctaaataagtgaattccataagtcaaaaaagtctgagctggaaactatgaaaaaatctagaaagagaggaagctgaattgtaatgtaatactcacaaggttcaggcatctggaatgtgttaggtcagcttctgaaattagattggttatctgatgagtgagatcaagaacttgtggagcttctacaggttctgaatccaagtatggcttgaaatcagcaagattggaacagattttttcccatgattcttgcaccgcagatctagaggtatctagctttggtttctcagccgtcttgtatgtcttaccaaaatccatacggctacattcatctgaaacttgttgcatcttctgggcagcccctacatattccttgaaacagtcttccatcactgtcgcatcagaagattctgcaatgatctcacttgtattctttaaacaatcaaaaatctggaatctgtctatgtatatctcttttgatgggggagtctgtacaacgtcctcattcattgaaacctctactcttccatcaaaatgtccgcaagatactgctcttggcgacagctcagcttcaccatccattaaagtttctggaacatatgaagactctggtacacatgatatttcaactgactgggacacctcattaatgtaagagaattttgatgtctcatactgataacaagctgcctccaatatttctgctctagaaggatcagctaatgggtttgtttccttttgcatatctggccaatatgaggacaacgtaccatcttcttggaaaatcaatctgtcgtccttctgatgttgagaaatggaaacccgtatgtcagtcagaggctcatcttctgaatcagaggacatcacaacattgagcttccgccttctgtttggctgagagaaagagagtggttggtaggaagtgttgctaagttcacacggaatccttaagacgtcttctaattcgtcataatcttcaaaagtagtgttctgcctgaacatcgctgctttcttggcttgtatactgttctttcctgtgccacgcctccataatctattaagcattttttcgttttcaacctcttcaacaaatacttccactgtgttatttctttcctcttccatagataataccttagcaatctcattctccaccaactgagataattgagaagggaaatcccgtgcaattatcttgggaagcagcaagtggccagcttcatgatcaaagagatcttgattacctgtattcttcacctttctggctgtgtatgggaaattaaaccatgaataaatcaaatgtctaaaccttcataaaactgaaaatatccacacctagtcattcactaatttttttttctcgtacgtagcaatttacatccaaaatacctcttttcggtttactctgaaaccaaaactgcaattgcataattgctttccgtatatctccaccacaaaacgtggtcatttcctctagtgaaccatgattaactttaacttcctctgctgcacaaacctgtgaaacaaaaaatgttaaaagaatccattgaaatttaaaggttacgcatcagaatactaaccagagaaaggtggttaaacagttcttcttttgatggcaatgaaaagtatatttctatcctctctaagttgtctggtaacccatgattcttgtctgtaaatatgcatgtgatacagatgccatcagcagattaattaaggtgaactgcaaatgaaataaaaataatgtttttagcatggacgaaaagtaccattggcagtcaataccacaggcccttttgctttcacagcaatctgctggatagcagaaacgagaccacgatcttcagcaaagcaaatatctacatcttcgaaaagaattaaaggcttcaagttagctccatcattctggatatgtaatacgggcatcacttcaactacatcctctaccccattgccatcagtacaggaattgaaaagagggtccaaggacctgaaaaaacaaattatgtgaatacaaacgctattttcaagtttgatagtaccgactgaaatggagaaaataacaaatccaagcattattgttgcaattctatgtaccttgacaggctatatgacttgagagcctccccaaatttctgcctaactactgttccacttcggcattctgatgtattggactgtagacaaaaatcattagagacataagctattttgaaagtaaacgtttccatgccagaagaggaaactaggtcttttagatacatatagcggaaacagttcatacctctaggattttaaatccttgttccttggcgcatgcatgaatggctgcagatttcccactctgcaacacaggcacaattgtactcataaacatgaaactcagaaagcattgtagacgtaaaaactgacagttcatggcagaatatctaatcacacaccccagctggaccaacaattaagagaacattcttctggctatcttcagcaccacttttttctgagtcagagtcactttcagaacagttgtaatcagcatcttgcgatttatcttcatcactactcaaaaagtctttgtttggctgaaaccctctctcataccattggcgcagccattcattcattacctttacagattcagtattaccacatacctgcaagatacgtgggtaagaaagtgtgagaaatttgtgtttggtaagaagatataaacaggcatatctactttgaaagcagtatgctcaaattgtctgacctccgaggcacttcttggctggtacttatctacccataatcgattacaaggttggccactggagtcattactgcatagattagaaattatagatcaagcattctagaaagaacaaaaagtatgctcaacttaaaacatgtgtgctgctactgatatcaaatacaaaatcactacctttctcgacatgacaggtgttgcatttcatgagaaatattggcttcaccaccagcatcatcagacaagttaattgcttcatgaacttcacaatcctaaaaagaatgatagaaaataaccctttattatgaatggttccaacaaaccaaaaaataaagaccaaaagagaaagttttaggtcatcaccgattctgctccatctaagaagccgaggcacccacgtttctcctcctggtcttctattaagactaccgaagatgcctctgcaataccttctgattgactagtgcattgttcaggctcctcatcatcgatgacacacacgtcaggatgtgaaagagatggcaattcatttaaatcaaactccttgggccgaggttcaagagagttaaattttatttgttgatcaggactctcagtagtagatgtttgctcatagaaagtccagttcttccaatcaagggtggttggataatcatcctaagaagaagattttgctattcagattcctttattattacaaacgatcgaagaagttaccctatatgtattagtcatacctgaaacttgtcaaatacatggatagggccaatggtgacgattttatctctccctcgaccaagacacgtaccattctctgctgcaacagcttcttgatttcttttacctcctttccaagtcgagaaaaacggatgtatttgcttcccagcagacatccgcgaattttcctgatcaaatagaaagcaaaaaaaaaacaattttagatgagacaaaaaaaagtcacaccaagttttgccaaaacatgcttaattaacttacctcagctcttaacttagcttccaggcgcaaattgggaactggaggtgaaacattggcagcaatcatctgatcaccagcagctacaattccgtttttagttgcacatttcttaggagttgtttttcgaggactctttcctttagccacctaaatcagagaaaaaaaaatagagagatcactcttacaaaatcttctccaaagtagttccccaccgtaatttatagacgaacacaaaccttcttggtagctccgttcttcggagttctctctttctgttttctcgtcttcttcccttgactacgaccatctcctacttctcctccttcatcgcacatcggatctccattagagtcaattacatcctccggtttatgggggagcaaagacgactgaaccaatttccgacgaacattccgccgtggagtctgatccattgcaatcaccgtcgcaattggaggaaatcagagttacggtagaatctagggtttatgtgtgaatttggggatcttggtaaaattaaattataacgttaaggttaaaagatgacatatgtctgatgcttcttttgatgaaagatttgttttatagttaggtgagaatttggagggaagaagattcttttttcgctatttcccgctaaactttaaggccgtgtttgtctccgtctctctcgaaccgcttcttcttttttttttaatttttttgcagctctttttacacacataaattctttgcattacctctcgggaaaaaaggaaagtgggcttctaagtgggccttaatttcaggcaattaatttaccggattacccttaaaggcttaaaccgattctggtagggggggataaatgttgagtgttgaccgttaaaccgttgaattatcccacgttgtacatataaccggtaggctcaaaccgaacggaaataaataggggcaaatccgtcattgaacattatgttatctcctaccgttgtcctaccgttgaacggaaataaacagctgtgagctatttcgataaagattgtaacttttcctctctctctctctctacttcgaacaggaagaagatagattctctcagttctttcaaatccataaaaatatacctggaatcttgtttctatacttcttctgtttctcatactctccactaatactaacatttttccagaattttgttaaaccctacaaaaatttgaactttttaaaaccctagaaaattccaaattcgtaaaaccctagccaagttcctctattgcgtgaggggaactcatcagaacccacgaatcgaaatgaagaatccagaaaaacccttacttctgtttctaattttagcttcaagcttagcatcaatggcgactgcaaaatccacaatagagccttgctccagtaaagacacttgtaactcattgctaggctacactctctacaccgacctcaaagtcacagaagtcgcttctctcttccaagtagacccagtttcaatgcttttgtctaactccattgatatctcttacccagacgtcgagaaccatgtccttcccgctaagctcttcctcaagatcccaatcacttgctcctgtgtcgacggaatcagaaaatccctctcgactcattacaagactcgtacttctgacacactaggatcgattgctgactctgtttacggtggtctggtctctccggagcagattcaggtcgcgaattcagagactgacctttcggttctcgatgtaggtacaaagcttgtgattccattgccttgcgcttgcttcaatggtaccgatgaatctcttccggcgctttatctatcttacgttgtgagaggaatcgacactatggctggaatcgcaaagagattctcgacctctgttactgatttaacaaacgtgaatgctatgggagctcctgatatcaatcctggtgatatcctcgctgtcccattgctaggtaagatccaaagtctctcttctttatttagttagaagagttctaaagtttcaatctttgaatagaaatttgccaattaagcacagattataacagattattgaatgttctgtctatttgtatcaaaacttctcagcttgtagttcaaatttccccaaatacgctacggattacggattaatcattccaaatggaagctatgctctcactgcaggccactgtgtacaatgcagctgtgttctcggaagccgaaggtattaagcgattgagttttgttagtcgaattttggatgatttgctgatatttagcattggtgtgatgcagtatgtattgtgagcctgcttctatatcagtctcttgttccagtatgagatgtagaaacagcaacttcatgcttggtaacattacttcgcagcagagtagctccggttgtaaacttactacttgtagttacaacggtttcgctagcggcactatcttgaccacgtaatgagtctttccttatcacatttcccctgctaatgaatttaacaacctatataaccaatctccctccgtctctctttgtttgtttttcaggttgtccatgtctcttcaacctcgatgccctggtaagtatactgtctcatgcgttatgataaaacacaatgagtgaaatcttgatctccagctgaaatgcaattggtaaaaacaatttgcaggaccgcaacaattagcaccgcttatagccccgcctgataatgttccaaaggaactgatgtatctaccttcaccttcaccttcgccatcaccagagtttgatgatattgctggtggaggatcatctatagccgcagtccccgcggcttcacctggaggagctacggtttcttcaagcaattcaatcccgggtaatccagctaatggtccaggcggaagtatttctatagcttcttgtccattgagctattactcattcattgcgttactcatccccattggttcttgcttttttgttttctaagtttgaatgcaagacaatctcatgaacactgctagtactttggtttgtcattgttaaatttgtattgaatgcctggccggttgacggttttttccggtttaaaattgtccggttcacagtcttgcaagtctgggcaaccaaacccaattcaatccaagaagaagcccaaattagtttggataacgaaaagcccatttaagtttttgattcttattgtatataaacgataatttgttcaaagggacaaaggaaataagtagttttttttttctttaaaaaagaaattggtttaaagaatatgtagttgaacctagagcatcctctgccataatgatggaaaaccagttatcttcacttgcctagaaatttctccataaagcatgtattttattcagcgcacatatttaatttcaaaaaatctaaaaatctcgattctgcaaatttaattatttccatcctaagcgaattattttattttatactactatacatttcttcaacctagaaagacgctcaattttgaaccttctacgaaattcctcaagccaaagccgtaccaacgtaccatttctttatccatgataaaattaattgtatctacactgtatacacctatctatctacatatattatattcagaattaaaactaattatagatatcgtatgataatatttgtaatggtaaggccatctctttgttcggttgttgggaaagtacggaggaagtacggtgccagtgaagctgcccattatgggaaaccgcttcaccaagattattgtcttatttttgtgactttcggggtaaactaaaacgtcttcattgccaaaaccgtctcgagatgctattagtttcttcatgcaaaaaaggaatatttttgggctggaaagctgacaaaaatggcctctgtttgacctttttaagggtttgcttaggaccaaagtgtgaaatgtctaagcgaagacatgtctcataaaccctcaaggctttgtgagaaagtcaaggctgtccccaaaagaacatgccatctctcatcaactccttcgatcatgtgctcttgcgtgtcttaaagttctatataagttttttggcttttgccgaaatacacatgcttcttttgaaatcatcattttgctttagtatctatctacaaatctccatattctcacatgcatgcacttatattattgtggtattatcttttataagtatcgagagtcttctaaaccagaaaataatctaaattaatttttcattacgcagtgattatacaaatttattgataacattagattgtagatatatttgaaatatacgaaataatatctttaacaaacaccttataagtacttgtcgataagcgtcgatctgatggagtacgtatatccttttacttgtatgattgttatatacatgcagtttggagaatttagacaatagtcatgcattttttactattaggttgtagtatacaattaagaaaatctagctgagtagcttagctagattcgacgtggagaatctcctcaaagtaattcacaatatcaactgtatcctatctctaaaaagagaaaaagggaaagttaacttaaagtaggcttaagtatgatgtgtaattgtgtattgatatgcatccatgtgatacaaacacacacgtgattccttcaatctctaatcccacgtaactttgtttcgcctttctttttcctaaaattattagaaacaaaagaaaaattaagtggttgtactccataattttatcaaaatttgacctaacctactactgtatgtttctgtttacactttacagtttgttttctatgtgtgttaaaagtgttgaaaacgtatgataatagaaagaaaaaatattgtcatcgagaactgaaataaaataagaaagaacgcggttttgtgccgcagcgagacagagtggaaacagctgttgttgaagtgattaattcactcacttcagtcttcactatttggctgcgcgtttccattttcattaactattttatattcgcaaaaatatctatttatataaatatattaacattttagagtacaacacacatatatattaaaatgtttagacttttcataaaagggtttaggtttattttagtttatcatttttgtttgtgagacctcactaagacctcacatgctacttcgtgaagttgcctccccttgtccctccatatcagaatcctatgtattttcttccctttctatattttatttctttattattttcattaattattcttctatttttagtgaaaacaaaagtttacgattcaatatttagcctataatcaattttaaaagatgtatattataaaaataaactctacaatttcttaaactgtgttatatttagatgtcatatagatttggatgaaaccattttaatttgataaaggtcaatctgattaaagaattaacttttgaaaataataatacgggaaacatatataatattatagtataatagcattcttatgcatgttatcttagtgacttttttattttgtattagtgatttttttaccatccaccaatgaattaactcgtttaatatatatatattttttaaaaaacataaagaccaatgagcaggtttgaagggttcttttcctcgaaagatcgtaggattaatcaacacattatattcaaacgcagctgtaatttgcaattgcagaaagtgatagctataagtcatcaaaaacataaacttcattttcttttgacaaaaataatctcaacctcaatactaatcctcaattttcccatcaagtagcttccgtacagctagctgtacactcatagatttttatattttaaatgttaattaattcaatggttactttcaagtttagaccaatattaaatatttactttaaccttcatccaaacgtcacaaacaacgtgttggaatgttacttcactaagtcggcgttcaagtagtggagaagctcgtaacgagaatttagctttttacatatctcataaattagtttgagattcgtctccgtgcaatgatctatcttggtaccaaaagaaattcttacaataattaatgaagattaagcttactatacataagaaacaaaatctgacatatccatttgtgagtattcgggtgaaaaatacttaataaagaaaacacctgtcatgcaccaaaaacgtcatattgatacacaaaaacgatactatttcatttgaccaaaatttaaatttattaaataaaccattattgtccccctctatcacaatccccccaaatcaaatcatgctatatataatctcatttccttgacattatttgtcattcagaatacttttatctcatattcccaacacttgttcaagcatatctaagtcaataacaacattacaacataacatggtgaaacaagaactcaagatccaagttactacttcctcatcatcactctctcattcttcatcttcttcttcttcttcaacgtcggcactacgtcatcaatcttgtaagaacaagataaagaagtataaaggtgtgaggatgcgaagttggggatcatgggttactgaaattagggcaccaaatcaaaagacaagaatctggttaggttcttactccaccgcagaagcagctgctagggcttacgacgctgctctcttgtgtcttaagggacctaaagctaatctcaacttccctaacatcaccactacttctccttttcttatgaacatcgacgaaaagacccttttgtccccaaaatcaatccaaaaggtcgccgctcaagccgctaactcctcttctgaccattttacccctccgtccgatgaaaatgatcatgatcatgatgacggactcgatcaccatccatctgcttcttcttcagctgcatcttcaccaccagatgatgatcatcataatgatgacgatggtgatttggtatcgttgatggaatctttcgtggattacaacgaacacgtgtctctgatggatccatcgctgtatgaatttggacataatgagatcttcttcaccaacggagatccgtttgattattctccacagttacatagctcagaggcaacgatggatgacttctacgacgatgttgatattccgctatggagtttcagttaatccaacggtccatattattatactacgaaacacttttaattcacattatttcatttaatttattctttcaattcatattattcgtccttgttgtttcgttatgtattaaatatacacacactaatttaagaagatcacatggactagaggtttttttgtcacgtcttcactttttttcatgtgtttttttcttttcttttcaattttattacaaatcttgtaattcattgattatttaaggcccaatatggtagacgcctagacggagatagtgaaaagagcccaattaatatactaaaggcctaataataacaacaacacacacgcatgatcttgtactagctttacttcttactacatacatacacttgggcttgtacttgaaccgttaccactagacatcatccccctaagactataaccaaacgtaaaagcaaggttaatcaactagctacacttctaagttctaacaagtaacaactctaattaactactctagtgagctaacacttactaacaaaacacaatttcacttttgggcctatttcgtctgcagcccaaaatctcttttgttgacttgtctcttctttgtcgttgacatcacgactcacgaaagtttcttcagctacatcttcttcttccttcttccgttcttcgctagcttcttcttcttctcactgacgctttctccatgttaaatcaaggactcaaatcccagcaatttatatgatcgtcgtaatgatgaggatggtgatttggtatagttaattaaatagattatgttaaaaaaaattataaatcataataaaattatctatttaacaagttccattatgcatgaatttaaattatatattaatattattttagttaatacacttatttgaaaatagagattaattactaaacatatcttagattttaaaattttataatatattataatatttgtaaaattatatgttataatatattattccttattcatatagagagagactctttctctttatttatttacacacattgacatttcttttttggttgatcatatatggcaaatttttggtaagattagagtcaagttaattatatctttgatcatggtttcatatgttattatttctaatgagtttatgatatgtattatgcttaactgtattcacaatattgacacttttattcttttctttttttttaatcattgacacttttattcatgttactattatagactatataaacaaatataattaattaatgaaattaaatatatttaaaatataacttgatataatttaaaatttatcatttagatatattctaatttaagattaaatttaagtattcaagttaaatcatattataaatattaaattatacttatttgtttttaaaaaatatattattatagtaatgagagatttggtgacaccaatggaagtaaaaaatctggaaaaaaaaatctaacaataaatacaccaaaaattataatattaaattggtgagtatattaagtctctcaagcaatgcacatgctcaaaaatactattgggcaagacagcacatttcagtttccatggcttttttatcgctgccttctgatgtagtagaagaattccttttcaagactcctattgaatcgttggtactatgcaaaccaacctgcaaacaattgtacgctctctgcaacgacaagagattcatttacaatcacttggatctctccgaggaacgattgatgcgaatttatcttgataagattaaaatcattaatccggtaaccctagatatcttatgtctaccagtaccagccgagtttgattctgtcacttttaatgttattcattgcgatggattattgctatgtcgatggaccacaagaggactagatcggtacaacaaacttgcagtttggaatccgatttcgggccaactcaaatttgttgaatccttttttcacggtgtaactgatctatacggtttcggatacgctaataatggaccccgtgacagttacaagattttgagggttagttattggcgtaaggaatgcgagatatatgacttaaaatctaaactctggagagctttttccgctactttggattgggttgtaaatacgccacaacaaaatgtgtttatgaatggaaatatgtattggattgctgatacgttgggtgataatattcgagaaaccttcatacagagttttgatttttccaaggagacattcaaacccatatgttcgttcccctatgagaataagattattgacacacttataatgaatggtatacataggattgctgattcagttatcctttcaagtttcagagtagataggctttctttgtttcgtcaacaacgccttgaagataaaaaatatgagatggaggtttgggtcacaaacaaggtgactgatgaggttgtctcatggactaagtattttaatgtgactcaccaccctgatctccccatcttaaatccctatctcttcacatacatgcgtgttcctacattcttcatccacgagaccaattctatcatgttatggtgcgataaagctgctggaaagggttttgcttgtacgagcttttacgaaattggtgatcagggtgaggtcaaacatcaacttgagacaagaaaacgttttagagctaacggtgaacgtaactcttgtgtttccagctgtgtttacgttccaagtctggttcccattccagagtaagctaatgaggatacatagacccaaaaaaaaaaaaaatctaatcacaaatcatgtgtatttgtagcattatgtatcatagtttattgatcactggattgatcaggttttgcttttaatgttgaatcaaattaattcttttttttgttagcactaagatttgatctgtaagttaaacccaattatgtatgcatgaagatgagccctcatacgtacacacacatatgaacaagctctattctgagatttagattctacacctaactagaaagaatcatcaactactttgtaatgtaatgagcctctctatacagaaatctaattaatagtagaaacattgatataaatagaagtgcaccatatcatagttgtattatacaaaatatgtaacacacgaatatagaaagaccaaaacaaagcttagaacgaacatgcatgagccaataaaatacttactccatgagacaacctcatcagtcaccttgtttgtgactcacacctggttatctcttgttttggctccagcgtattgatataacaaagaaagcctatcttcttggaaacctgaaaaggcggataaatcaagaggaacacaccaggcataatcaaccctatcctcaacaggccacgaacatatgggcttgaatgtctccttggagaaatcggaactttggagcagtgaataacagaaacggtagtatgcaaaataccaaaaccaaactcttgggaaactggtagacataagagatctaaggtcaccggattcatgatttcaaccttatcatgataaattcgtatggatcgtttctataagagatccaagtgattgtcgatgaatctcttgtcgttgaagagagcgtaccattgtatgcatgtcgctttgaatcgtatcagagagtcgatcggggtcctgtaaagtatgtcttctactatacatcaaacttattcaaaaggcagcgacgatttggttacattagggatttaatgtaatcgggctatatacattaagtcggtttctcatattgggccttaaatatatatccaccaattacaaacatttgaagaaaaacttttatgggccggacatatttgtttctgggaaaaaagaggcgttgtaagaaaattaatagtctgttaacaacaaataagatacttaacagattcactttaaacaaacaataatgtttaaagtgaatttctaaggttaagctcacgtgctttgttgatttaacagactctcttacagaagcaatatgttacttaggtgtcttttttgcttttgacttatattctgtgtttcattgtttatatatatactgtattataaaactatgtaatacttgaagataggagcgggccgattgaaaaatgaaatggtccataaaaaggtagtaattgccaaactcgaggtgacaaaaaatagaaaagtcggtttgcttttatttttgaactttagtgttaataatgcaacttgtaattatgttgtctacttttcatgttttgtagcaaccaacttgaaatatcaatgatccaaagtaaaggagaaagagagaatatgagtttcgagaggttaccatttggcagctcctgtttgattcataattttggggaggtttaatttttgtatcaaagtagtgaagtaacaatataaatgcaaagatagcattaatcactgaatacggagtgtcgcgtggaaagctgtttgaccaatatgctttgggtcaaacaatgaaccccattggacaagcactttcatcaattccttcattaatttcatttaaaaatctccattaatgaggttaataaacaaacccattaaggttatttgtatgatatgcctttactctttgcatgtaattgtttttgttataaacgaggcaatagacatgcatgtcatatggaatgatgaaatcttaaaattaaaataatgaaaatcgtagtatgatacaacacatcatttttcattatgcaggaaaaaaactctaatttaatgatatgaaagtataaatgtttaattatttagttgttgatttgtaaaatttgcgtagtaatatcacatcgtcctattgtatactacataaacaagtattttcttctcgtccacaattttttaaaaattgttatagatattgaagtattgattatcaaataatttaaacaagtggtattcgtgcaattatccaaattattggctgtgcatagatgtcgtatattgaatagtatggcagccttaatctgttgtcgaccaatcaaataaataaattacgtgtcgtgagttatagtatatcaatagtttcaataaatgcttgttactcatagcttagctacagagcaatatttattgtgattgaaatttcatttataggacacagtacattttctgtttatagaacttgaaatttggaccgacctttatttttcttagaggaatattgcatgttgagtggttagagactagagtagagagactgcaaagtttgaacctccaaagatttgagtcaaactgttgatgtaagcaaaattaccacaggatcttcatgacatcaaataatttccttaagagtacacaattatttgtttcaccacacacgcaaaatttcgaactatttcaagacatactttaatatgaatcagtccagacaaataaatgaatcaagataattgatatatatgtaaacgtaagaaaattggattataaatcgttttaactttatttttgtgatatccatagtaagattggatatatcttgaaagtgtgaatgagtctacatgcttagctatcacctttaaatatttggattatgcatttaactgaaaaatcaacggagtacacaagatgacgtattgagagtatatcagctcgtatgctcaagaatgtccattttctttctttcaaaactacttgttgcttttttcaatcataatccaactccattttatattttgtttatgttttcaaagtagatcttagttatacctctggatattcttacaatttaaactgtttacaatggtgaaaagccaacaacggaaattagtaattggtaggattcaaacctagacccacaatagaattattttgtgagaccaacatcagacaaactgctctagtctaaacctttagtttaagcaatgataagatacggtttctacatgcttgtagttattaaaactagtgattcttatagttccaaacaaattagagatggtagaaatatttaatgcgttcacctaataggctaatacatgcataaacgaaatatgagtttcgtgtggattttttggcaactaatttggttagactacttacagagttacagtttcaggccaaataacccatatcgatccattgatttttttagtttttacttgatatggctactatagcctgcgttgacaagtctgagtacgaagaatcttcttcattgattcgtcttctctcttttccttgacagaaataatataataatactactctaatcgattttttttttctttttaaaaagagatcaaatcaagtacaaaacgaatcacatattccgatttaaggataatgtatcaaactaaaccaaaaaaaaatccatctacctgtcagtgattgagatcaatatcaaaacatcaatccaatcatccacttttttttttcttttacaaaattgaaaagacaaacattacttcttctatgcacatttacattagttagataatgtaaaaaaagaaaaaaaaaaactccatagtaaagcttctcataatttaagctcactatgaatacataaaaaaaaaaacaagatataaacatttctctatgtcatctttaattgtcacaaattttaccatccatttgattttgaactgctttcacagctgcaactctagcagccgtcgcagctttattagctgcagccacagctcgtatcacctgctcatcgatccgtctctgattcactccattctttgctctttctcgtgcactctgcaagtaattaaaccattaagtaatcataaatccaaacaatgtttaatttctctaattgaaagtttcattatgtatgtaaaatacctgaaccgccctacgaaccgggtcagagtctaaaggaagatggttaacgagattaccatcatcccattcaccggatttgatatcaccggttctaaatctatacgtgccatagccttgtttacgaccttcatgccaagctccttcgtaatagtgaccattagcgaaatggtaaacaccaaatccatgaatcttgtctccaaaatactctcctgcatacttatctccattcctacaacaacaaaaatttcataataacagaactcagaaataaaacagagaaataacagcttttgtttgttattacctgaaatggtaagaaccaagtccatgtttgacaccaaatttgaattctccgacaaaagagcttccatcagcacaagtttgaactccaaagccatggctttgaccgttaaaccattcaccagagtaagaatctccggtgtaaaaccagtaaactccaaaaccatgtctaagtccttgcttatactgtcctttatatttacttcctttagaccaacactcgattccataaccatcgtaccttccattgatccaatctccttcatatcttccattaacgtaataataataaactccacttccgttacacttccctctgttgaattcaccttcgtagaaatctccattgctaaagaattgaactccttctttaacgacaagtcttgtttcttcttctttgatcggttccggttttgaatctccgatgtaccattgaaccggtttcggtttgtgtttgattcgagaccttacacgaatctgcttgattgcgattacggtttggttaataaccgccatgtttctcgacgcgaagaacagagcaagagcgacgaaaatcaaacctagtaagagattctccgacgtgaaaatctcatcaacgaagaacagtaagaaagatgagagactcaggaaagagagacaagcgagtgtgaatgcgagacccggtttaattcggttcattgacccgaatgatttaaccggttttctcctcctctgtttttcctctttctcaccggcttcgagatcttgttcacggcggtggtgagaggtttcgttgaagtcatcacattcagtgattgaagaaaggctttggatcgacgatcgaatcgtcggagatgatctgagtaacgacgattgagtcctcgtcagtttcttttggctcatctccgcggaaattattttttgcaaaaaacagaacaaagaaacaaaaaaaagctttgattttgaaggcttaagagtagaatcaccactttcgttctcgatttttccggccaaatcttaaacggtaatatgttaaccaccactgcaccaccgtgccaagcatcgcaaaacggagaagaagacgagcgatctctcaactccagcaatatcttgttcttatacgtcgtttttgttttccgataccggagagttttcacggcgaagctaaaaagaaggagaagaagaagaagaagctcactttgcttaggagagatcgagaaagagagagagaagctttgcgtcgggtttgggattattttaagagacaagaaaaaaggagttagatttaatattgaccgttagatgaaaatctgacggttgattaacgaaagcgtataacaatagccgttggatctgagttaaggaagaagaagtcacggtcttgacggggaatattaggagccggacgctttttagctttactgttgcaggccggcacgtgccgctacacacacatctattggtcacaattttttaatattaaacaaataaacataactttttcgttttacaaaatttaaaattttgctgaaaaaatctctgctttttgggggaattttctatattaatataacagttgaactggactttcaatagagtattttaaaattttaatccatattcatagtaagtatactttatatttattaatagaaaaagtgtgactatagactaaaataaaatcaacgattcatattgggaagaagatagttggtgaaaactgtaaagataggtaatctactaatcgacggtagagattaattacttgattcggaaacaaaaatatcaataaagataagaaacacaaaaaatgggttttgatccaatttgtgaataaaaacatatttaccaaacatcctcgcatggtgcactccgcattactaggcctcatatatatactttaaaaaaatgctcacatgggacaatattttatcaaatttccaatataatgtataataaatgtatatttattcatatataattatatactggaaaacgttaaatcggagccggaggctaatgacattgtataatgttattttcaaaagatagaaaacgacaatcttaagctaatgacattagattaaaaatggttcttctagtatttgattgattaagctaacatcgctttcactgagatctaagttcttctgatgcattcaattactttatttaactttcggctttagaaaagataatccgaccactaaaatataataatttcatcaatttcagtctttcagagaatattcaaccttaatctattaatttactcattaaggacttttcaagattcaacaaaagactctaaagactattattgcatttgataacgtaaactttactttattgatttgctttgctaaatcaaagtctctcccgaaatggaaccgaagaagaagttacacaactagataaaaataaggtatctttctaattcaaacttcagacttttctcttaagcttctgcttcatcctctcaattgcaccacgcaacgtctcttcgtctttacagaacgcaaacctaaccaaattcttcccttcttctggattcagataaaagacgctcgttgggatcgcaacgaccccaacttcttcaataagatactcacagaaagcaacatcgttctccattccaaatggagtgtgatcagcaaccacaaagtaagtcccgctcgatgggaacactgtaaatccgacttccttcaaacccttaaccagagtctcctttttcacattgtaatctcttttcagctctttgaagtaagactctggtgccttgagagctgcaacggctgcccattgtgctggtgttgatgtggcgaatgtgaggtaagagtgtgcttgtcgaactccccaagtcagatgaggcggcgcaatcgcccagccgatcttccatccggttaaagagaaagtctttcccagggaattcatggtcacagttctttcatacataccgggaagagaagctatagaaatgtgatccatttcaaacgcaagcttatcgtatacttcatccgagaacacaagcacatcgttttcaatgcagagagatgcaatggtttcaagctcctccctagtgaacatcttcccggtcgggttgtgcggagtgttcataaggatggctcgagtcttgttagttaccgcagctttaagctcttccaaagggatggagaagtccggtggacgtaaagtgattccttttactttagcaccagccatagagagtgttgcttcataggaatcataaaacggtgcaaagagaatgacttcatcaccagggtttattaaacccaacatagctgcagctatggcttctgtgcaaccagatgtaacagtaacttctttctcaggatcaacaacaagacccgtatcttcacgaaaccgcgcagctatagcagagttgagctgaggaatgccgtatccacgagcatactggtttttaccatctttaatagcttggatcgcagcttctttaacaaaatcaggaccgtcgaaattgggaaagccttggcctaaattgatcgctccatgtttaactgccaatatgctcatttgagtgaaaatagtagtcttgaacttctctaatctcttcgccacctaagtaatcaagtttggaaatatttagaagaacagagagaaaaaactttactgctaatatctcaaataccaaatccaaaattttcaaagtacaaatcttttatgcattgagatcagtacgtatgccaatgatgaccctaaagtcacaaacgagaagaatcatttatcgggtttaaactctgcgatgcttaagcaaaacccattaattgggtcatcgagctaacgaagatgaaactgggattgattcgatagtgtaaactgttaaaaggtacagtgggaccaaacagcaagaacttaagtggaatccaaatcggacaaagttggaaatcattacgaacagaggtaaaaaacaaaacatcaaatagacagaacagcagcttccaatgttggaaaagcagtgcccaaacaaataggaggacccttcaagattagatctttcaagaacagtaacacgagaatcgaaacaatgcctttgttcatcatcatttgactatttaccatcaaagtaaagatcactaagaaacagagaagtttacctggacgggtttttgagtagactcgttctgagtcgaaactgtggtcatggtggctccgataggacgatggattttggcggagctttgtcggaaattagaagagaatgggagaagagaggctttgaagctaaactgtttgatcatcacaccatttatgtccaggtacattgactctgcattaccacaagaaaaattcggtaagctttttagggtttttgattcgttcgaaatttaggaatttttgccttttgtcgcaacaagttgcaacttttgacgtcaagtgggcttttacaacacaactcatgatgcttcatgggccataccatgccgccctgaagttgacgatgccaagttttagttttgttgttaaaccttttctttatcaattttctaataatataacaaaacatacggcaaaaagtaaaataaaaaaatacgaatttctaatttatcagccaagaaaatctcatttttgtttgattagtctaagtgtacctaattttagttaaatttaacatcaaggataaattgtggatttatttttctttccaaaatgtttactggtagaggataagcatatgttagccgagggtattataggctagtggcaaagcccaccaaagttggcttctgactacacttactctgtgtgggttaatgtaagccttttgtgtggccaagtttgaaaagtatagctttttttttttaatcatcgaaaagtatagcttttaagtgagtagctcgtgaaattggtaagtgttggaaattcgaattttgataaattattaaaattatgtactacagtaccacttgttacagctgaattgatgtattttataaccaaatgtgtaaatgatgagtttggacattttatataattgggcttctttatgctatatatattaatagcctatcaggcccaatccaactgcctgatcgtttcaaattctcgagttggatcagattccggtttacagattttgacgcgacctcatcgattcgaccatcaaagcaaagctctccttcttcaagctccagttactctccttctttagaagactgattttcaatgtctcaagttcgagtgtagactttgaagatcttgtttttaaaaagattattaaaaatgtaacacatttagcacggtaaagagagaaaactccctaatcgatatatatacagattctggccgaacccaaatctaaaacatcttgggcgagcaaaatcatgaaaacaaaggaaatagaaacacatttagcacaacttcgaatcaaaccaatggggtttctagaccgaaccaaaaacaacggcaagtccccacattatctatatcatcccaactacggagctgttctagtccgacatgattttcttttttcagcaactgtaatccaaaaaatatacaacagttgctataatctacctcttcagagatccctcttttgctccaatatctaatagtatgaactcatgtagagccttgctcctatatcgagcggaccatcatctccaccaacagcatgaagaaccacaggaatggtcgagaaaagttggatggtcaaaggaaaaaccgcaggggcaacctcatctattgacacggcctctggtgactcagtgtcatggacagacaatgcactgcattttgcaacgcacacttcacaaggactcaccaaatagacagcttccttcatgggcttgaaaaagcctcttccacctctcttggaatagagtttatcgacgattaacgttgatgttgcctctagccagtctgcacacaagccttcgatttggtcgtagtatattctccgttcaatctgtgacagcatcaataacaacaagtgtttagcagactgtaaacaggaatttagataaatttaattgtggtaaatgaatcagtagagacttacgccaagcttgctaatgtaaacagtcataaatcttgatcccaagttcattactctagcttcacacggaaaaatctgcagagaaagaaataaatgagtttccttaaccaacataaacacaagaagcatcagaatgatgcaagttatcaattcacttacctccttttgcttcagcacaaaccaagtgtaaagctt

SEQ ID NO: 1019 - DNA, 95771 bp, Arabidopsis thaliana
gaattcttcgtaatgtaaagaaaaaacaattattcaaatgaagctttttaatttcgggccgtaaaagttaatgggccatgtgcaattactcacaccatgtttttattcctttccctttttttctttttttcttctttttttccttttcaacgcgaagaatgtttttattttgatctcagttgatttgactgtaggcacagtttttgaattggaggcaaaagtggagcaagtgatcccgccggtgaaggttgaagacggcgaaagcacaactcatgaaacgcgacggatgcgttacggagaggagtttctttcttctcgactttgcaggcctccgatggtcactggcctggagaaatcactggacctctcttcttccttcctccattggtatgtttcttcttcgttttcctttcgattcttactttacgtctatcggcgaatactcttagggttagaattagagatttaggtttctattgcgcgagaaattataagaaattgaagggataatgaagaggaatcaatgaaacggagagaattttcctgcatgtattttttttctgtatatcacagattcataggacatctcgaggagatatttgatgctgagcatcgtgaagagattcttcgatatatctatcgtcaccttgtattcttgcagcagattttaaagaagaagcttgaccagagaagatcctcacatgagttctgtttttctcccttaatttgcagaacgatgatggtggatgggggttacatgttgaaggcaagagctttatgttctgcaccgcactgaattacatatgcttgcgtatactcagagaaggtcctgatgaaggacgagaatatgcgtgtaaactgacgagtaagatgccttggatcgtgacatttttgctcatctacaacaatgaaagttgtttcccatcaatctagttcttccaactaatcttgaacctcgtgccacttttttttgcttcattttctttgttttcgcttaaatcatctaaacattgcccccacacttatcaacacatgttgccccttcacctatctatgaaagagattaagagaagatgtcgaaatagtatttccagaggagtggtgcagcgtttcttaaagatgttgatggtgaatacaaacgaagcagcttgtttgttgacatcggtctagctcaaaccatacatatttgcaaagatgttttggtttgaactagaccgagtacaacaaacaaactcctccgtttgttttcacgatcaccatctgtaagagtaccatctacgtccaaagatgttgcctctagaaagcctattttggcatcttttcttgcaaagatatgtgaaagagaaacgtgtgtccataagtgtagcaatattttcaaatattcagatgattcaagcgaataaaaaaaaggaatcaaaataaatggcatgcggaaatctcaaccatcaatgtcacaatccggtgcattttactaatcagtctgagaaacatgatcgcgtctttaacctgggaaaagtaaatctcttccacaaatgaagtttcatcccaaggaagtaaaggtgttgaaaatccttcgacatttgcttctctagttctatcttttcgccaagtcagtagcagattcaaattaatatattagtgtctgctaaattatgattgggattttacagtaaagttatatggatttgtatactatacaagtcaagttaggattgtccttttttgagaagcataccaaattgtaatccaacaaattctatttaagatagatcataagttggtgtacctttatgtatgcaggtatttaatctaagtggcaagaggtcatatcttctagatcttttatccactacaatagttaacaaaaaaaaattcaatcttttaaatctatcagtttcaaaatctaccgttagacttaacggtatttcgcaagaaaatagtagattttatattttatgagcaaggtttgaaattattataagagcatatttttcttgttgttgtgaatttgtgatgtataaaaatctagaaattgcatttcaatcaacaaacaagataatttcaataaatatggatacgctatcttagggttttgtaatagatcatcatgttagttaaaatattatagatctattcgtgtaaattctttatccaaaaagcactaacagaaaatatgttgagataaacaaaactgaccttggccatagatctggtgacatgatgagtagtatctaacgaaaggctcctgggctttgcgatccttcaacaaatgaagtgtaatttagacaacgtgttaaaagatctagtcgtgtaatttatctaaaaagcactaagggaaaattgttgagataaacaaaactgaccttgtgggctttgtgattcatgcgatgagagatgagatttctcttttcaaatcattccatcgtttttgatagaatagaacacaaatcattacagtttctttcgtggacttaagatcttatatattctttagtgaagaagagagacacgaataaaaagaaaaatgaatataataacagcttttctgatttcagattctctacatgtaagagaatggatcgcttatatgttttctgttgataagtgactaggagacacaaaaaaaatgtgtggttgttgttgaaattaaaactctaattcataaaatttccttcttaattttcgtttgaacaatttaagtttattcttctctttcagtcaacaaatgaaggaaacattaatgctttcctttttattattatatttaccaaaccatattttattttttctaatttatatcattttattaatattgttttccttttgaagcatatctacttttaacaatgtgtcaatggctggttcacaaagaaaagaaaaaacaatgtgtagtggtaatgcttaaatatttttataaataaatcatctctaaattaataatgacgtgattatgatatttattaatttataaaaatgattcccttcatttatctatatactaattaacctaaagaactaatttgaaccaaataaatgttggtttatcgaggtattaagttatcgagtattaatttctaaagattatattcgtacatgcaaaatattaagttagtacgttaaataaatatttgaaagaaaatttttaaacaatgatgtggtgttcttcgtcactttcttagactaaaaataaatcctacgaactatactccaaaatgtgccagaacaacaaaagtaaagttacaaaatcaacaattatatatataaagatgtctataccttaggcatgactttgaggacaaactaaatcccagatattacaacatgaaacaaacaccgaaaacattaaatacttgaaagttgagaccatatataatcttcacacaaatgattaaaggctaacttcttagtccttacagatagattcaaaccaaatctcattagaagcattcgatactaagctcctcgttaccttttggaagttcctttagcttggcaactgccgcttctatctctttcttcttcttttcatcaaatgatgtcttaatcatcatcttcttcattactgtcttttgcatcacgaaacgcgacgctagtgcaaattgttctttatttgaacccttgaaattgtgcatccatatagtatccacacgaaagtcagcattgggaaacggttctgccttctcccataaattgttttgtgctccaccgtcagaagaattgccttcttccccaagaggattgttattctacattcacaacaaattaaagtattgtatcaaatctcaatcaatattataacaaaagtgattttaaagagatcaaagatcaaagcatccaattaaaatggaacatgaaatgaacatataccttaaatgatatttcaacttctatcattttttcagtccacacagctaagattttccttagcacttctacttctcgaggattcttcaaatctaaactcacagataaagatgcaggtgatgttgcatagttggtatcccacttcaccatcccgttgctttcttgcttctatatttaaatacacaattaacaaacatgtcaaactaaatataaatgtttatatccttaagtgtaatttcttgtacctgagggggacatgagatgttgatgctagtatgaggcaagagtcttcctgctacccaatagtttctaccaaactggagtctaggaatttcgagaacgacgttatcactctcacatgggatatattctatggagagaatatcaagacgagctgcacgcacttcaatgctatcaatttggttgcatgacatggacaagatccttaacgttttatgatcaatcttcaaatgaccactggggttgaagaaaatgatttgtaggataagaacctcgagggaggggcaagacgagatgacttcgttgaaaacatcaacctcagcaaagatttgaaacaggtcaaggtacttgagatttttacaattgttaaaagcttgtgcatcttgtaatatgtattgatatagcgagagtgttcttaggcttggatggttgaatgtctctgtggacagcttgagcacattgtcttcacctgttggtgcgaagcgaccattaaaatttgcaaggataagatttttggtgtgtttcatactagtcagtgattggatccaagaagcaagcatcccgtcttccaattggtatgaataatgggatattatgcaagtctctaaatggccattgtgcttgtttataacctgaaaaatgcaaaaatgattaagatttaaataaggacaaacaattatgaagagtctatgttttcaatttatacgtgtttctctttatatcgtatatatatgttgaattttatagaaaaattgttaatatgtaattttatgtatgtgtgtatttattaatctatgtagaaaaaggcatgagatcatacttctctagattattgatcataaatttgtttaacataagataacgtttcgggcgaaataccgttatttgttttaaatgtaacaatgtttcaaaaaaataccgttatttatttccctctaaataccgttaaataccgttatttgctatttattttattttttaaaaaaaacataaatttgatacatatacatgtctatgatttcacatttatatgtatgaaatttcttataagtcctcaaaggcaatataacaattttcatcttttaatccaaaattccttttatcaataactgatttaaacttgtaagattgaatattgagagaaaaatgaaaagaacctcggttataattgacaaaaaaaaaaaaaaaaaactcggttatctgattagcggcacgatctaataattgtggcaggacaatcccgttgatggtgatggtctttcgcatgtcaaagcaaagatttgacacttgtttccatgtatccccccattgtttggacaaaacacatgtctttatcgcttcttctgtggacaattctgataagattttggacaacatatcgtcaggaagttgattaacattatcgattgcatcgatactgattcttttgttcgatgatatagaggatgcattttgtaagagagacatgaatgaagaaaagagagtttgactcaaaaactaaggaaatggaagtatagcttatttgattttattgttgcaaagaggcacatcgtagagtatatatacacaaaaggcaattcaggttaattaattaccttcccgtttttcaattggagaattttgattattattttttgtctacatttcaaaatgagaaagaaaataatcatttaatacgtggaattatagtttagtaatacatggcatgaaaataattttatcaaattttatttcggcatcaaaatttgtgtgttttttttttttttttttgaaattaaacttattgttatgatgcatttattgagacattatttgatcgatagtagcaattttaggagagtgtctgttgtatatatatatgaactatgaagattgaaggctatttgatgtactgtatatatgtaatacttgggacatagctaaatatgcatattgtgtcaatttcttttacttatctagcgttttctgtcaaattcattttcagtttgtagattggtaaaagtgaactgagaaatacaaaatgtctttaatgaaattaggtgtttactatctagtttctaaacttttggtaattcagtagagcggcacaatttgcagtttcctacgaagagatgattatcttgacttttataattagcatcagatatccgatcgccaactaatccctacaagtaaatcagtccaaatagttaagtggtccgcacagaacaagtttgtttgcagtggaaactgaaacatcaaatatgtgcgagtttacatcctaacctaggttctttagtgaaattgatcctctcacaacttacaagtccaaacaaaatatcttcatcacttgagttgagtccatctatcgttactgttttcagacaaatccaatggtccccatatcagcggctgctctcatctccttcgacaagtccacattatatcttatatcgatctatgctattttattatacaaaattagaaacatttagtaagacatcgacacatcggtaattatgtttcatcttatcatatttatcgggaaaaaaaaatgattttctctattaaaaaaaaaaattatccttttttaccattatgtagttgaatttaggttgcttcttaattttttttaaaactgttcaatatttactcacacaattaatattgtgcctttttaaaaatggaagtcctaatttttgttaggctatcaattttgctgactaattaatatattatccataagaaattaacttttatttaggcaaatatctctgctaaacttggcaaacatttatcaaaatctacatttaatacctcaaaggatttcataattgtcttgccaactgaacccaattattagaggtcaaacttgtactactaactttaacaagtcaaagatattaataacttgtactctattcttatcatctcattgcccaaaaaaacaactataaatacttacacaaaacattaccaattcggatctacgattttcaattaactctcttcttttttttttttttttggtttttcatttaagtctattcaatcatggaaaccggtttaaacatcttaaagctatcgctatgcgtcagcctagtcgtggttggatcatatgctcaggctcccgcaccatggaatccatctaatgggtttcgtccggggacatgtgaccactacgagtgtcccacctataaattggtagaggccggatacggctttgagatccgcatgtacgacgctgccctatggatatctactagtcctatcccctccctatccatgactcaagccaccaaaaccggtttccgacggtaaatgaataaatcgaatatataagacttggtgttctttcggtttctttatattataaactgaagttgactacgtttttgggtttatagattaaataggtacatagaaggagataacaagagcaacgtgaagatgaacatgacagctccggtgatcgcacaagcaacgcctggaagatcagtctacacggtctcactctacctcccgaagaagaaccaacagaacccacctcaggccgatgatctccacgttcggtctacgaaaccaacttacgtagccgtgagacagatcggtggctacgtgtcgaacaatgtagccaaggacgaagctgcggctctgatggaaagcctccgggattctaactggattttgcccatcgagaagagcaaaggaaagttgccggcgtattttctcgctgtttataacccgccatctcataccacggctagggtgattaatgagatcatggttccgtttaacatgtagatcatgttaatgacgccctcacgatttgattgttacgtagcaattggattagaagaggtggtttagaaccgatcgatactgtaacagcagcttgcagcttctggtttaaccggtataaattgtatctctggttaagtggtgattaatattgttattttgtaaaggtggggaaaactgtaaccaaaaagtttgataaaagattaaataataactaagattattgaatcaaaattgaaaatcaaacctaaatatcatcgaatcaaaaaaaaactgtaaatgattttttcagtttcgctttttttttttttcagtttcgctttctagaacacttataaagctgtaaaagaaagcacctgatcaaaaccatgaaaaaaaagagtgaaaaataaatattaggaaaatataaattaaagcgataatttatgtaatttcgatatttttaatgcatattatttttgtcggccaacttgttatatttaatcatgtgtttacaatgcaatttaatcctatccgaagatgaaccacacacataaaaccttatctgttacaaaaaaaatgtttatgtttttcttcataaatgtataaaaccttgtatcagtttacgttgcatggccgcaacggaaaacaaatccgccaatggaagcggctctgagcatcttcaagctctcgttccttctcacccttctctccggcggttcagaccttatcgactcgttgccgccgaattgtaaccgagccgagtgtccgagttatgaggttgtccacgccgggaatggctacgagattcatcgctacaacaccaccgtttggatttctaccgaaccaattcaagatatctctctcaacgaagcttctggcaacggttggaaccagtattttattcattattcattcctaaattaactaaggtttttaatcgaaaacgtattcaaaatgcgttttgctaatttgtatgcagattgtctgattacatgaacgggaacaacgattatcaccagaggatagagatagcacttccttatatcacccaagtctctcagaacttgagcaccttcatagtctctttcttcgttcccaaggcattccaacctgatccacctccgggaaacaacctccacgtacagagatgggactcgaggtacgtggcggtgaagcaaattagtggatatgttgcggatcataaaattggaaaacaagtggctgagctgaaggcgagcctacaaggtaccgtatgggccaaggcaattgagaaaagcagagaaaccggcggtgtcggatcggcttgggcttacacggtggcgcaatttagctggccgttccagtggagtcagcgggtcaatgagatttggtttccgtttgaaatggaagatgaagaaactgttagtatcgttactcagtgaacaaaaaaatgaacacttttttatctttttatggtgtagtgacaaagcaaagccattgagataagcctatctcctaaaagttgttaaataactgtccattgtcttactctggtcagcacattccctaaagaaaagaaaatcaaaagagtacttttttctgataagtgataacccacctgaggctacatactcaatgcaactcacagcacctatgtaagaaatgagagctatctatataatcgaacaaaacttctaatcaatgaactcctgattacgcgtttgttccagaccaatagaaaactcaaatccacaaagaacctagcatattataagaccgcttaatagaaacacccctcaagaaaagacccgaattcttgaatcacctggtttatttacaacgatgaagacaacaaaagagcagaagaaaccctaattttctcaatcttttgatgttaacatgagcaggagagtaaaagaaagatttactgatttcaagagagacaaaatccccacagacttttcaaatgttctaagaatgacataatgcaaaaagttttgaaaatgacactccaataacacatatactgtatacatacactctaatagtgatcgtatttgcttttgaaaacgctactcaatcagatttaagaaaaaataagacttgaaatctgtgttatgtcaagcataatactgaaaactctgtctatatttcatttttattctatagatagtccctttttttgccagcatttatacgggtcataataggttaacatgacagttttatactagtactatttttcattattgaacttttatttggaagagggaaaattaggagtcagacagagaatcatatagggacgtggcatatagccactccccacgtggctcgaagccacttgatacaaaacatgtcataatgtgggtcattttttcgtaccattcttctcgaagatttgtaaaatatctctatctcaaccgttggatctagtatgatcaagatacttgaggatttcgaaaaattgtcgagaccttttaagaaggatttttacttctatcatgaagtagctccgaaaatatcggcatctttaaggcccaaaattggcccatcttcgttcttctatgctacgttcatgattcgtgcttctatccaaatcattggttgtagacttgtagtgtcttttttttttttttgttataggttcgttgtagtctctgtacaattatactaacagaaaaaaaaaatatatataagaacagaaagtacacaactgtaaaagaaaagcattaaatatcatatacttttaaaccaatgagggaactccagtgtcatttttggcccgacatcactcacataattgaaggaaccagacacccaaataagtcgaaacaacttgaaaccaccctttgatattatccttacatttttttgtcttcccccgaataaattattttgtgggatattttatcgattcaccacctgaatataaagattggattgtaatctcttcttatcaccaccttgacaaattataaagcaataatctactttggtctttataaaagaagaaagaattttggtaatcttataaccacattgtttcttagacaaagcaatataagtcactttggtaattggtattaatcgtatagtccttctttctaattaatcgtcaaatgtatatttctcgacataaactaacctacattatagtttttttgggctatattctgatatagtattacctactacaattatatggggtttaagttaaaccgtttaaccaaccaaaaaaaatatttatatgatttttttggcccgtacatgtcggttcttgtttctcaggctgtccctctatggctatccaatcgcttacgtccgtccaaagaagattttattcatatcgaataataaatgtttagttgttattatatataacattattattttgggtaaagaatctaacattatagttcacatcaatctttaaaaaggaacctacatgcgaaactattgtgttctttcaaatatatttctctcatcgaattgcctcctacgtggcttctcatgtaccaccacccctcaaggctcaacatatattataacaagaaactttattcgaggataatgtctgtgtatgttctaaatagtgaatatagttaagtattaataatgtatctcaattattatctatttatgaaaattgaaatgctgacaccactgtattagactgttattctgttagttaataaggctaaagttaattgacataatgtgtatgtttacctctctagatttacaaaaaaaaaaaaaaaaaaaaaatgtttacctctcaacagaactaatcagttatcgctactgtaaactaagaaaacgatttaattattatcaagattttaaaattttatcaaatattccttacaaattatttttttgttttgggatatcattttccttctcccatatttttgggacatctatttgataaattcttgaatacaaactgaaattaacacagttgtgttgtggtatagatacgaactgattttagtcggcaatattagttaagaatatttaaccagaacatgaaaagaaaaagaaatcatttaatcctttgaaaaatatttaatgcggtattcaggtgagtatcatatttatcaacaattatttttatagcatgaaagtatttccgaaaaaggagtaacgggcatataaccaacgtggaacaataacggtctcaagaatgcaaaacccacaaagatattattaattgctgattctttgacagtgacagctgcctccgcaactttcttagtgaacgtgtcgattttgttatatgaccccatatgttaataatatgaataagagtcaagtattttgcctataaaaaaaataagtgtcaagtatagaatctttaatttccacacaaaaaagagtatggtctaaagttgatgaacaatgaagtatcgatccatttttctgtaaaactatttgtagcagatttagcaattatattccactaaaaatgaatcttgatattgtttggaatcttaagtttttaaatgtgagagcaccccaacagtaaagaacataatccaaactgtatgtttggataactatatcatttatgatataatgcattgtatctttgatataatatttaagtaatctgtcttaagaaaactatatatggaccacaaatttatttttatgtggttattcataaacactttcttatatataaccgtgaaatatcgcatatttgttccatggtctgtccaaggttgagtctagtttttgataatggcacctaaaatttgaattcggatcaaaatatcatccttctaattaagtggtccgaatttaggtatttatataaacactttataaatcaacacatcggagatatatacaagtatagtatgtatgtggtaataaagagaaacactaggatcctttcgaaaagccataccatacccctttcgaaatttcaagttcattctgcgaacatttaaggacataaagaacgaattagattcatcggaccggttgacgaggtcatggttggtcgccgggtcatgactcatgagttgttataatcaccgaaagtaggtgatgaatacatagaggaggcaaatcagcaataataataaaaaaaaggatacttataaattatgagggaaaactagtacgcaactagtgattatgttgtcagccaacaaactcccataaaatatcaaattcctatcgctctcaaatattgtatgttttatctcgataattcttctttaaatttgacttctgtactttaaccccaaaaaccaaacattgacgtccatgataattaaaacaaaaacaaaaaactgttgacaaaccattttaaacgatttttttactatttagcaaataactaatcacaatggaggctttcgcaaatatcgtcccgatatattcaattttattgatatagatacataaaagagaaaaaaataagtgattagctttagttttgaacagttttgatcgtacgtcgttgtaagatctttatcatctcatctgctatatatacactcctccgagtacataacccaatgtctcagccttcaaagctatcaaaatcaaaaaaattctatcaaacaaggaaatatatcaatggcggtattgtctaaaccggtagcaataccaaaatccgggttctctctaatcccggttatagatatgtctgacccagaatccaaacatgccctcgtgaaagcatgcgaagacttcggcttcttcaaggtgatcaaccatggcgtttccgcagagctagtctctgttttagaacacgagaccgtcgatttcttctcgttgcccaagtcagagaaaacccaagtcgcaggttatcccttcggatacgggaacagtaagattggtcggaatggtgacgtgggttgggttgagtacttgttgatgaacgctaatcatgattccggttcgggtccactatttccaagtcttctcaaaagcccgggaactttcaggtttttaagtgctctgttttcgagttagtgctctgttttttgctctgtgtttgtttttatagttcatgttctatagctttttatgctttattctggattttttttgtggttacgtctcaagttttgttctttaatcttcagaaacgcattggaagagtacacaacatcagtgagaaaaatgacattcgatgttttggagaagatcacagatgggctagggatcaaaccgaggaacacacttagcaagcttgtgtctgaccaaaacacggactcgatattgagacttaatcactatccaccatgtcctcttagcaataagaaaaccaatggtggtaagaatgtgattggttttggtgaacacacagatcctcaaatcatctctgtcttaagatctaacaacacttctggtctccaaattaatctaaatgatggctcatggatctctgtccctcccgatcacacttccttcttcttcaacgttggtgactctctccaggtttgtcgcgttattctttaagttccttctccggttcctgtttcagaacagaagatctaagctttttttatttattaatattttgcaggtgatgacaaatgggaggttcaagagcgtgaggcatagggttttagctaactgtaaaaaatctagggtttctatgatttacttcgctggaccttcattgactcagagaatcgctccgttgacatgtttgatagacaatgaggacgagaggttgtacgaggagtttacttggtctgaatacaaaaactctacctacaactctagattgtctgataataggcttcaacaattcgaaaggaagactataaaaaatctcctaaattgattgatatatctatttaatctataagtgtgtgctacatacagacaatgcatctgtatattttgaagttaatgttatttgttaatccaataactgtaaaaacatgcaagagtgtgtttgtttgtttcgtaatatcaacatcgctcccatcttttatggataatatcaagttgtttaaacacactgttttgatgtaagctacattttactttatgtgtacatcttattgtgttatataaattatttcaaaataaatatgtcctacacggtgcgtggataaataccttgtacacatgatagtatattgttggatcaaatcttgtaacagttttttcttataactttataacaacattaaagatatcgacaaagacattacaaccgaaaatctcaatattacacgtcgaatgtggtccgagaatttcttttgggcaccaatatgtttagtgatatagacatatatttaaatgattcgtcatatacttagaaattccgccaatctttaaagggaaaacgacttgtcattgtatatatttgccatatgataccacatcatcccatggaccaacttgtatatgttcataacgttgatatataaaagtttataacgacaccaaaacttcatataattcttatttttgccgagtgtcgacaaatgtttttatattcttagaaagttttaaaatcttgaatttgtcgaagttcaaagaaaataatcttcatactagtcttacactcttgggagatatcgaaccggaagagtatggtaagtcccaagtcccaacttgttcagaatcctaaaccggttccaatggcaattacgttaacaatgacacctaattcaatcctcataaagaagatgtaactgatcaatgaaataaattacagacaagtgagcagattttgcagttgaataggaatttgataaattagcttctgtgaagcagcacacaatcattgtctaaatgtttcattactaagaatctatggaaatgatgagccatcatttcgtcgacacacacacttagatcatccgaagttaaagagcacactgctttcttgaaatacacgctactttttatttattatatcacttcatttctgccctttcttcttccataagtcaccgaacatcttcttcccagaacttttcctcttcccagacccgtcatccgaatcatcagccattcccggtgatccgacaaacctgcctgcaaaatgcttctccattgacccacactgctctgagaaccgaccattcatctcaacccctccagataaaaccgcagctgcagcatctgctgctttcctccactgctctgtttggaccttcagcttcttcatctcagcttctagagtctcttttgcttcttccacggattcgagcttcttctttagcttcgctgtggtctcattgctttcttccaattcttccccaatctgactcacctttgaagctatctcatcctctttcgcctttgcgcaggacatttccgtatccgtcttcttcaactgatccttcaaggtctcattctcctcgctaagtgataccctttctttctccaagtcatataatctagctttcaatacattgatttggtcttccttagaagccaattcatcattcttcgtcttctcactttcttttgctttctcatcaagaacctcgaacacatctgtctcttgatgtccatctccaggaatgtcatctctctccggagcaggagtgttcggtttcttggatttcttcctatgaagctcttcttgagcacgtttcttggcagcctcggctttagccaactgctgtttgagcaatctcaactcttcttgggcttgtcctagctgtgactccaagccagagatgcgacttccaagcttcttctgactcagcggatctgtatgaggcccaccactccttggagatctacggtcaaggccgagctttggactccggtctgtaatcggacggctgaggtgatgcggatcagaggaagtggacaacagtgatgtccttagcctaggagattgcctctgaggcaactctgaacctctaatactactcacagatcaaagaagacacatatcagatcatagagactaacaacaagaaaaatctaaatcacatttttcatcaagaattgaagtaaaaccctaaccttggttttggcattctgatttatgcaaagttgctgactctccaaaggttaatgatctgatgaaaacgaaaacattcctcagaataaagcagatatatgaactggtaagccacgcgccactaagtgagagtgagaaactcttaaacagattccactattggagtcaaaccagacacaagtgagatataacaacacattgcttttgcttttactcaaaaacgctttagaagatctaagataacaaacttcaatctttcaccaaacgctttagaagatctaagataacaaacttcaatctttcaccaagacttgaatcagatttctcttgaggaaaagtttcttatcttgcatacacacataagtaaatgggttggtctaattgtagaaactaaccttgaggataatgtagagtactttctggggtttcacctgtggaattgaatacgaagaatgattgcgatatagtcttaacaagtaatgcaagcagagaaataataaagaaggacaaagaggaaattgtttttgaatatgctgctggtgtgattaattttgttgatagaaacaagaacacgaagacaagaaaacccaaaatgtggagaaaagagaggtcgtagctttatgtccagagagagagactctcaattcaagaagcagagagatattgaaaaagtagacgttggaagatttgaaataaagctggtgaaagtgaatgacctttgggggaagataaaggacaaaagtgtaatttacatgtcttggagggtgatgtcccacatttacatgtaatcataatgttttgtttttaattatcttttactacattaagattccgtatctttgcatgatttgattataaaagttgccaaattgtaccaattccttcgttcattggaggtttttttaaaaaaaattctaacggatttctactgaatttcacaaaatgtagtacaaaatttggcgtaaacgacagccaaaaaatgggaaacaaggcaattacacaagaagttaagaaccctaaacctaacatacgagctaaatataaaattttgaatcaaatcatgttacttctatttataaagacaaaaaatggtttaagagataaataatttattacacgcatgtgtgggtacccttatcaatcggtctgacattgtttctttctttttgtcggtttcaacaaagttcaaactcttttcttttagtttctcttcttctttttatattccaatcgttctctttttattttttttactttataaaaccgtaaaccaatatattgatatatgttaagcttaatgtatgaatatacccatttttatatctattattttaggtttcaatgtttcattgtacttcaaatttgggattcctaatggtaaatatcataacactactatatgaaaatggatataatgtacaacattcaagctttatattaaagaaacccatacacaatgttgaaaaacaaaaccccgtaacaatctgtgttcaagatgaaatatcaatcactactaattatttttatttcacttttatgtgccaactatctatttatgttttttacataacattaatcactcactacatttttgtagtataaagtaaaagttgacaattgaaaatagtacagagcaaattgtaagtaaaattcagcgccactatgatttttgattgtaagtagcatctacctttaacttttggttctttttatgatgatgttgttgataattcaagtaactaataagagtactacatatcaatcagtacccaaaagaacaaaaaaaatcaagatactgagttttgggagttgtgaaattagaggtccattattctctttttcgaacataaattcatagaagaaagtaagaaaccccataagacacactaacacaaacattagctgctcaaatcaagatattaaatgttgaaaattagttagctgctagtcataaatcataatccattaattatcttttataatttccatcttataacgaacccatacaaagactctagaagacatatatgttgacaaaagccgactctagaaccctaaacccctaattactgctttggtcaacaatcaccaactttgaccttctcttctccatttagaaatttgcaatcaaagagacacaaaacaagtgatcttcaaattttttgtcaatgcagattgaaaaagaagaaccacaaagaattaaagaagctgtaacacaacccaacctttttctattaaaactggaaatcatttcgtttcttttctttcttcctataggaacagacatatatgaatgaagttataatcatcatcagattcagacccatgagtttccattattatcctatttattgccaggtaacttcagttggtgcacatgtcgtcgtggcatgaacctctgccatagacacagccatagccatcatcatctgttcctcaaaactctctggaacaatgaccagaggtggaggaggaggaaagttgtggaagccctcgcctgtcatgtaagaacttacatagctgttgctgcttcctgtttctcccatctcgtaatgatgacgatgatgatgatggttgtctatgccatctacctcttgttctatgtcgtagtaactgtcacaatttccgggaagcatactgtatgaagaaacgttgacattgtgattatgattgtgactggaggattcgccaaccatttggcgttcagcaagtgcggagattgcacaagaaagcccaccagatgatgaagacggtgttgctggttctacgattggagtcactcgtggtggtgaagaaacataactatgattatctgttacatactgcctagaagaggtaatttcccctgaagctgaatttctctgcgtccctgtttcctgttagaatcagtttaaaaagctatgagagaactgaaaaatttaatatcaaaagttatacaaacaaataattttacctgaacagagagccatattgcttccatgaccatcaattcctcaaggtcaacgtcaacctcatcctccctgaagagtttatagacaaatcaaatatatgaatcactcttcatttctaagtgaatctgtgttcatatcacttagctccaaaaaacaaaacaaaaaaagtctaatcacggtgtcattgtaattcagaaatttcatggttacaactactacattactccatatatgaagttgacaaaaaaaaaaaacagagcagccaatggaaagacagacctgtttcctcgcgggcgggaatgttgtctaacaacagatgcgttctgcgatggagcaatttccccgtcatccatgagggagttataagatatggctgcaaaccaagggacaaaaaggaagcctgtcaaaaccgcctttgtttgttcctgatggaagatttaacacgttcttgcagtaaaaataaaccgacctgaagttgaaccatattccatctcgccagtcattgcgcttgtgctagaggaacatgattcaagacgtttctgcattttctcttcatcatcctgcatttctttctgcctcatccttattttggcttctattacccgttgctcttcctgcaaaaagatacagtgacagaatataccacttgagtaaagcaccatttcatcaaagcttatctagaaaaaagttatgttgtgtggaaattttaagacttacaacttgttcaatgcccttttcctcctttgacttgactccacgatactcgacagcatagttgggagttttacaaaaagggcacctcataaatgtcaaggaggacacaaaagggaaaaaacccatcaaattaataagaaattttctcaaacattaagccaaatgttaaagaagcccctaaaagcttatgcaaaggatttaaaatgaaggatactgagtaggccgagctgaattaggattcttcatttgcaaaaaacactctgcaccaaatgaacaaagaatgccatgtcaaatgaaatggaaacatgaatagaacaaagaagctaaagtgttattgaatgtgttacctgtacaaatgcttttcatgcaacatcttgatctattgaggctaggatagtactagaaacacaagaagcaaatatcacaaagttagatcttacatgacaagaatgtagtagttacagagactgagagaaattcacaaaccagaaaacaaattggacattcttcaagatcatgacagctttcatcgtctccaggatagcaaggagcaagcttagactccacaatcagttttctgagctttttaacgtcgacatctttattcacatacaaaccttgaggctttgtatacctttcttccaccacttgcctcttccttcccaacttattacccatcacaaagttttaacctttcttctactaaaccctattctcctattaccttgttaaaagcagagattctgtttcctaatctcacattaacacctaaaattcaatttgtttctacaatgaaacccactggagaaacaaataagcctaatttctaacctaaaggtacatactttaaattggaaacaacctccaccacataacctgcgcaaatggtaaattcaatataagaacacaattggggcaaaaccctaatttgagagagaaaaaccctaactttggaactaattcaattcggggctggttacataaaacattatcaaaccctaattacgtaatttacgtatcgaagttgcaaaatattccacgaattgaaacagaagaaaccctacaagttctgataaaaaagtacggaaaaagaaggataaatcggagaagaaagaaacctgaaaacttcgagggcagaagaaaacaagagacgagagatcaaacaagggtttttgggtaaacgataagagacacgatcagaactttactctgtagagatagaaagagagagaagagagaagcaaagataatacagtgttgtgtgtctctttcgtattatataaaattcatagggaaaaaaaacagagagagattagaacaagttctgtatctgcaaatttctttttaatatttcgacggaaaaatctcagaagagagagagagagagagagagagagagagagatggtgatgatgtggagaagctaaaagggaacaggaaacgatggagtaagagacgagccaaagaatccaactctttgcttctttcttcctctccacgcgcttctttcttcgcgtgtgtttttcattttcgtgtaaaacgacgtcgttacgtttatttatgtttttttttgtttgttgaccaaaaaaggattagaatatacgaaatcttgtgaaggcggttttgtcttaagcaccgagttggatcagaataatgtcttttttaacattttattctttaattgtatctttgtttgtcgcatttgcataattgtatagtccaatattcgtaatttaccatcaaatttattaatggaaaaaaataaagaagttagtatctttggtgtgttacgagactcattatgtgttcaaagttttggtgatatttcataaactagattagtcggcgttaatgttatatttaattgaatttaaaaatggttcttgttgacgacaatatagcttagtaggttctacttctattagctaataatttttaatagacttgtattgtatgttgacgtataatgtttcggataatcgttgaatcaacccaactatataccagaaaaaaccctgaaaataactaccagaaagctagattaagaaagaacgttaaataaaacaagaattgtagatgagacgattaaaatcgtgagtgtgttttgggttgatgaaaggaaatggttcacccaacacaaaattggttaaggttggttagagaaggttaaccatgagttttgttgctatttgcctcagccatttacgcacttacacaaaaacctgttttatatataaacacaagaagattagttcatataatgcttcatttggttgttgtgaactgtatcgcatgttggattctaaaaattgtgaaatagtcacaagaattaaacagtttttagtgaaattactaattttagtgaaatcaaaattcttttagttaaaaacattattttgcaagaaaagaaaaacatgaaatataaatatataaaaaatatggaaaaaaaagtaatacctagttggacttgggtagcaaagacgccccatagagaaaagcccatagttgaggcctgacttcttaatctgctagtcgctttcaatgcctttgtcacacactcacacttcttgttttgataattggttctaaaacccaaatacacagaaaataagagaaccaagtattaatctcgcatatacttgggcttcatggtccttttaaacaacatatgaaagctataataagcccgtttaaaattcggagacatgggccgtactgaaaggtaactcataattactttccaaaacacaacattcgttattggacctaatctcaagagtgacgatccagttaagatgattaaatcaaatcaacaacaacattatctcattagataaaaaagaaaagattttggaagaaaacgaatgatttaaaaatcattgcacagaaattattaatgactcaatattctgaccatagtttatacaattcttccatgtgaggcatctctttgaataatctatcgaactccgtcgtcgtccccattcgtcctcctccgccgccaccgccgtggagctgtctggtatcttcaccgattttactaccgccatcgtaacaacggccgtcgaaagcagagggcgaatcaaaaggaccggcggcgacgatggcgttcttaccggtgagttcttgaacaacggtcttgaagctacgagcatctgtctcaacatactgtgtgttaatgaacacaaccttcatcggctccgatttcactttccctcttccagacattattactaaattaatcgattagagaaacaagaaaagaaaattttgtggtgttgatgattaggttgatcaaatgatcttagtacttagtatatatcagctttagctctcttcctgtgtctttgggtgttcagatgttttgtagatttatatgcatagttgcatacttaggtatttatagagagattaaagagagaaagatataatctctgtggggtactgaagtgactcattcaagtaaattttttcgtattctttttgaaacgattttataatcgtaatcttgtcctacatgaaaacatatgtgacgacctatttttttcttgttttttttcttcctgacgtcatgatacattttcgacgaccaacgttttttatcatattcgttgaattcctaataaatattttcctaattattatattggccgaaaatatttacggctctagtctagaaatgcttaccaatgaattttatgaatgaagaatttttttgactaattaaagactttttatacatctgttgatgaaacaattactgcattctgtatattctttagaatttaacagcaacggtaaacttaaaacaattttgaaactgcaagaaaataacttaatagtaattatttaaaatcaaagattaactacatataattatttttataacctattgttgagaatattaaacaaggtaactatttgttatacaaagcaacaatcattcaacatttactgagatcaatcgaaaagcacatggctttgtgcatagataggacctttgatcattaagacatgttgaccgttaataaaatctagcagccttgaaggaccaaacattaaaatttatatatcactatcaccatcaaaagtattaaaattaccaaaaatcatagtgtattttcattagattgggtcaaagcacgccttctttgatgaaatcctgttacatcacgtgaaacagcctaagaaaaaactactgaaaacttaccaagtatttacacgtgagtagaattttgcacgtccccccacactatttcgttatgacaaaatataatcgtctttgattatgcttctagaaaatagtaaggtgatgtcatttttttcttcaaaaggtgatgtcttttttttccatcgacaaagaaaacactaatggctttagtttattttttcaagataaaaatttctaatcaaaacatcccaaatggggcttttagttaataaccatgttttccctttttccacagccaacagcatatgaaaattttatacggtttaaaacataaaaaataggaggtaacatatactcacatcattgtaaggtaaattttaaatgtttgcatcttgaattatattgatatatagattttattttattttaaatattgatataaatgagtaatggatcatatttttgtagattttactatttaaaagagattagaaaaaaaaaaaaaaaaaagagattagaagttcagcatgatgcacaagaagtcactgatagttacatacgatgtttcatggggagtttcataaagggacccaatcattcattcaattccctgaatttttgttttgttgactcagactttcactaacaaaattcttctcagaaattgcaaattagttcattgtacggttgtacttttgcgatagccctaattattttcagttgttaccaaccacacaaaaattatattggctttaccaaaattttcatatgaagaataaaattatatatggatcagtttaagccttaaggtaaatacaaatcaatccgttatcatttatcactacactacaacttttagaagttgatacgtaattatgtatagtctattttttgtttgttgataaaatttggtgcagtacgttattgtacgtacagttttgatatcaatattaatagactgatgaacatacaaagggaaagtcaagtttggctataacggatcagagtaaggttttgactacaaatcttgactcaggaacctgactgttttttatttgatcgcctttgaaattaagtatatacaaagtttgaacagattagttattttatctcagcttttaccgccggtaatatatagttaactatttcgactggggtaagttatgtccatttgagtttcagcattttggaatttaactttgaatgaatataagtaagtaattaactattgttctgtttttatagcagataaaaattcaccgaagatcaatttcttttttttaaacaatccgtaatattttactttacaaaattaaattccaatcagattcgaaactatgagtttagcttgttacatcgtgtagagttgtgtcttgagattagcccagcccatgtagcacaagttattgggtttgttacaaaagtgaagcccatatttcccaaataaaatatgggtgtttggtggcgtgttctgttgggtgggtgttatgctacatgggctaatctaaaaagttattcagacccaaattgcccacataaattatccaagccctaacacaactatacacttataaacaactttttagtggttttaattcaaatatttaatacgggtgtgatattttccatgctatctatggtatgtacaacttgtttttggtaaccgatccaatttggttgttgtaattcgaaacctaaattactgcgaaaacactgatcgatccgtacagaagcaatttattgataattttgatccacaaattgttcgacaagattggaacagtttaccttatatactattattctgctcatatttaaggaatttttaaaatataccgttataatttagaatcatatcagcagtcagaaacaaatcaattggtactcttatagaaacacattaattcagaaataaatcaatctgtatgattgacgaaaccattaaatttcaacccaaaatttcagccactgatgtaggtttcttatagaagtgtctagagatcgcactggtatataatacgatggaacacaatacgatactatcattctctcaatcataactactttttttttgtacattgtcaattatcaaaaacaaagaaatggtgtccactatctccggttttagcttaattttgttcatagctgccgtcgctagtagcatttcagccgccccttcagccgctctcgtcggaagaaaagtcttcgatgttcgaagctatggtgctcgtggtgacggcaaaacagacaatactatggtagtgaaatttctagttttgtttttgatccaacttattcaacattaatgttctgaatttgttgattaattctaacacatgtttgacttattgtcttgatttggcgttttaggcatttacaaaggcgtggaaagacgcttgccaatggaaaggattacctagagtgtatataccatttggaaccttctacctcggtgctgtagccttcacgggaccatgtaaaagtcggattagtttcatcatcaaaggaactttgttagctccaaaagatcctaacgccatcaaacaagacagctggattatttttaggtacgttgactatctcacggtttcaggcggcggcatccttgacggacaaggaagctactcttggccactcaacaattgccgccaaacccataattgccgggctctaccgatgaacatggggttccagttcgtgagattctcgagactcacgcgcatcaaatcgatcaatagcaaaatgggccacctcaacttcttctcagtccaacactttgatatcacacgcgtcaacattaaggctcccggagatagccctaacactgatggaatcaagataggttcatcaaaccacatgaagatccaccacgttgacatagcaactggcgacgactgcatcgctatcttgtcgggaaccttcaatttggatatcaacaaagtcaactgtggaccgggccatggaatcagcgttggaagtcttgggaagtttaaaggtgagaagagcgttcagggattaattgttaggaattcaatctttaatggtacgagtaatggagtacgaatcaagacatggccttcgccgggtgaaccgaacttagtttcgaattttcttttcaagaatctccagatgattgatgtccaaagcccaatcaacatagatcaacgatactgtccaaatccaccgtgcagctttcaggtaacttccttaacaagaaacaaggttttagtctttttgacatgacctaatttgattttcttctttttattgtagtctttttcaaagattcagataagagacgtgaagttccaaaacatttggggaacgtcgacggccaaggaggcagtgaagttgcaatgtagcaagaatgttccttgcaaaaacgttcagctcttcaacattaacatagtgcaccgtgggagagacggtccagcaacctctgtgtgtgagaatgttggcggttggataggtggcaagatttctcctccgtcttgcatccggtgatccacattttgagtttttattatatgatcctgattagttttttcgtagcttttattatatttgtaattcctgatattctctgatcactcgtttagtttgttcatgtttgaacccttctaaagggaagtgaagatttgaaagagaacaataaatcttatcaatttctttgatagtaactgttataatttccagctatattctctcgagtagaagaagtttgggccaagtcataaaacataaacgtttcagcggattgtaaaagttgatatctccactcgccttttgttttaattttgctgaaaaacgacgaaatctctggacgagtccagccgttttgtattcgtgtcgttgacgcgctctaggtgcgcgtaggattattttacagttcgcgtctttaatttaagtggcacacggtagtcataattgtgaattagtattcattttgtggcctagtataagcccactatggcccaatataagtagcccattgcatctacaactaattgggtattttcctaactatattttggttcattcaaaattactcttcgcatatcttacgcattttgaatgaaccaaaatataatataagtagcccattaaatccttttcagcaaagaatataagctatttaattgatttattttctttttttgataaagaagttgtttaaccttttacacgactaattaccaactagctccgttatctttactttgctataacttaattaacgtgtaacgtgtacgtatcacgtaatgtatgaaccacatattcgatttccagtggtttcacccaccactttggcactttctatacattcttgcattttgattttcttgttctacatgtatttaaagtaatatgaggacaaaatgtatatctacgaaatacttacgtggatatgtaaacatacactcatctcacgttcagtccgaacaaactactaatgtggatatgtattttacagtaatacccttttgatatgtatggtgacattcgaaccaattctgatccagttcaatcatgaacttttgttctacataggctttttcaagattaacgaactttgggccgagcaactttattagatttggttaaaaaaattcgggaactctaaaatgtgaaaaattgtaagaaaaactagttttctttacatcaatattaaataacaattttttttgtaggaatgtgtttgagcgacacaaaactagtccgaaattttgaaatccaaatataatttttcaaagttgaaaaactgaacttcttttccggcgaccattttttagtttgaaatgtttaataattcgggcatataaatgtttatgtataaaatttgccaacaaaaataatgtatatgtataaaatatatcgtgccatattggggatatatgtgagtccatcagtccatgtgagtagtttcaaccacaaaatgatggacatgatcacctatgggccatcacacatgaggaagctttcacgttttaatttacactactaacaaatatctctacatagagactatagagtaatagaccaattattgcttgtctcatcaaatctcaattccatgctgatcatatgctaaaaacatgtatatgtgtgaatacatatatagactgtgaatggtgacataaaccgcactcaaaaccgtaccgcaacagtgcagtaacagtattaaaatttctacatatatatatgtatctatatattttcgttattatttgaaccgcaccgcacttctcccgcacagcaaaacgcagttaccattcggatccatagtatatgactatatcgtaagctattaattagtcattggacaaaagaccctttgaccaacatgttgttactttagttatgtaatcattgggtttttaatttatttagtttagtccttttcccaatcatcagctgattaatagagggcatatggaaccatttacgtataccatatgctttatatccaataaatgtgttagatagtgttgttcattaatcagaagatctgatacgcagccgacctttgatttaattatgttgctaattaaatcagttgttttcattattttatgaagcctgatatataattattgaataggacaaactattgttaactaaagtatcgcaagaacgcaggtttcagagaattttataatttaaatgaaagcaatttgcagccaaagatccattaggttaagagctttggcagttttttcaggtaaagtcggttggtcaaactctctcaaatgcgtcaacaagtctaggtgctatagcctatatagtgttacaataatatgttttcactatatttttataatttatattgctgcttttctacgtggtatgtatcacacgttcgacaaagaaatatcaaaatttataaactttttattttgttaaaggcttaatttataaactttttttggatgtcaatgttaagtaattttttttatataaacatacattatggcaatcaaagttcatatagtttagttattgctaaatatacaatattaaagcctcacataactatataattttgggtactacatattaagtgtttcataaaaaagatttatcaggtttaattaagtaaacaaataacaagcaacgaccatgttactcataataatggtcttgcgagccaatcatatagttttttgtttgataaccacgccaatcataaagtttgttagttaccagttggattaattaatgtagattgctggacagaccgaatcctacctttcaatggatttcagtaaatccaaagccactattcatctacaaaccaaaaattttaagttattatatttgtttcttatttatatatgttcatttttgccaatagacaataataggtatatatgaatcttggggaaaaggtgacttggttcaaccatgtgcttccatgtggtcacatgaactgaaccatattgcatatatatgtacttatcatattgtaactacatacgtttaatgcgcatatatgcatatattatatagttcaaacttcaaaacgtctgattagagaaaataatatatgattatctatgtatatttttcaaagtatagccataaagaacaataaaatttggtgctcgaggtagtcaaattacaattagtcgaatcacttttatgtagacgcatctctaaacagaagttaatttcaattcaaacatgaaatccattttttgtattattgtgcgtgtgtgttaaaagatccatactatttgttagcgatcgagcaggtcttcggtctcatacatttgatcataattttagttcatgtccaaaattgtataccaacgacgttgcgagaaattggtcaacaatatatacaactccaaggatgttaattaaacgatccacttagataattaaaccatataataatttttcttcctgaaaatcgcaaatccagtattttatatcaaacatttatatcgccaatgcccatggggagtttggtttacaaatctgaagctctgaaatggacacctgaagcctggatgttccgttaattaagaatatattaaaatgattaatgtaattagtggactgtgatgcatctacgattgcttcatttcaattttcaagtgggtgtttactcaacgataatggtcatcaccaaccaacttaagttaatcactcaacctaattttgtataaccgaatcttttttcttttcttcttcttaaccgaatggtccgaatctcttgttagaatatttcatgtatactataagactttattctgcataacccaatatacacaattttttaatcccaatttctctaaataacataatacaaaacttcattggaaaatttacgatagcaatttactgaccacgacagatttgtagtgatgtatgaataatagaagccgtagacacaaaactataacaaacatctcgaggacctaaaaaaaaagaagaagtgaaattactaagtactgtagcaagtgtatgttctaaagttccaatgagtaaaatggctcaaacaaccgattcataaaatatattttcaaaaatgaaacatttatatatacccatggtgtttaacaaattcgtaaaatgtcatacattttcggtacacaaataattttataatctcacttacgcgttgaaacaaataagcaagcgcgtaagacatacattacacttttttaaaatgactggaatgcatgacgtttgggcacattaattatgtaatttgttcggtgcttgtgttgtgtgtattcttcgtcagtgagaacgcaaaagttacgaaccaatttatggtttcaagtcaaagacaattgaaaagacagtttatggtttacgtacgtggtggttcgatgtaaaacgttttgatgtggaggccacaacgcgtcttaaccaaaaagccaattgtcacttccattaccagtggaatacaccaaacctggcctattcatatgtttatatgcatgcccatgttttttaatgtcaaatctctaaattctagttggatttaagtttcacgtacttacgtagaagcagacgaacttcggggcagtacttaaatactattatcagacttaattttgaaaaggaattttttttccggatcaacatcgaactaaaggtatatgattagaatctaaaccaactacatccaggttcagtcgtccgactaattttagtactgcatcaacccgagaaaaaaagtataggttatcgaattttcaactagtctcaggtaccaaactataaggatctggttcaacgtactttacaagaattagaccactcaataataccgacagtctcagtctctctaacacgcatgtaattttattatttaatgagatttgaatccaagtaaaataatttacacatttctcaaaatccaactattactacgaccacaagtaatttggactattaggtataaaaatcacttaaaaactaagactaataattgaataagttcccataacgaatgtctcacatcgttggtatcatctcaattgttaaatttgtttgttttatgttacgtgaaactactaataactgcactttccgaaagaagacaaaacagttgatctcaaatattttgttaccgtccaagaggtagttcttccatccttcaatgacattgtaagcacttctaaaacaaaatctgatcaaaactacttcaaacacttctaatacacaaaaattgatctcttaaactagaatgccggaaaaaaatatatctcttaaagtagaaaaatttctaagtgaaatgatcaaatttattacaacttattatccaaagataaattgtgggagataaacaagatgagccattttattgaaaatgataaagagggacgatgaaaatatgtaagtctcgtcagataattattaggacacgtgttaaaagatgagaaaatagtagcgtgaatgacgataataaccattatttctggtatgtatatatatagccttctgtcccaagatgctcatcactcacaatatggacaaaacacaaacttggtcttgaagaaaccaataccaaaaccccaaaccgcagcgtttaatcaagaatcgactatggcttctactaccttacttccttctacttcaacccaattcctcgaccgaactttctcaacttcatcttcctcttcgagacctaaacttcaatctctatctttttcctcaacacttagaaacaagaaactagtagtcccctgctatgtttcttcctccgtcaacaaaaaatcttccgtctcgtcttctctccaatctccgacattcaaaccaccgtcttggaagaaactatgtaacgatgtcaccaacttgatccccaaaacgacgaatcagaatccaaaattaaacccggtgcagagaaccgccgctatggttttagacgcggtggaaaacgccatgatctcacacgagcgccgccgtcatccccatcctaaaacggcggatcctgccgtccaaatagccgggaacttcttcccggtaccggagaaacctgtcgtgcataaccttccggtgactggaacagtaccagaatgcattcaaggagtttacgtcagaaacggagcaaatccacttcacaaaccagtctccggccaccatttgttcgacggagacggtatggtacacgctgtccggttcgataacggctcggttagctacgcttgtcggtttaccgaaacaaaccggttggttcaagaacgtgaatgtggtcgtccggttttccccaaagcaattggagagcttcacggacatttaggaatcgccaagcttatgctcttcaatacccgcgggctatttgggttagtcgacccgaccggaggactcggtgtcgctaacgccggtttagtttatttcaatggtcatctcttagccatgtccgaagacgatttaccgtaccatgtcaaagttactcaaaccggagatttagaaacttcgggtcggtacgatttcgacggtcagttaaaatcaacaatgatagcccacccgaaaatcgatcccgaaacccgagaactcttcgctttaagctacgacgtcgtttcaaagccttacttaaaatacttcagattcacatccgacggtgagaaatcaccagacgtcgagattccgcttgatcaaccaacgatgatccacgatttcgcgatcactgagaatttcgtagtgattccagaccaacaagtggtattccgattgccggagatgataagaggtggttctccggtggtttacgacgagaagaagaaatcaagattcgggattttgaataaaaacgcgaaagatgcttcgtcgattcaatggatcgaagtaccagattgtttttgtttccatctatggaactcttgggaagaaccagaaacagacgaggttgtcgtgattggatcatgcatgacgccacctgattcaattttcaacgaacacgacgaaacacttcagagtgttttgtcggagataaggctaaaccttaaaacaggggaatcaacacgtagaccggttatctcggaacaagttaatctcgaagctggtatggtcaaccggaatttattaggtagaaaaacccggtatgcttatctggctttaaccgaaccgtggcctaaagtgtccggtttcgctaaagtggacttatcgaccggagagattcgaaagtatatttacggagaggggaaatacggaggagagcctctgtttctaccttccggtgacggagaagaagacggaggttacataatggtgttcgttcacgacgaggagaaggtgaaatcggaactccaactcataaacgccgttaatatgaagcttgaagctaccgtaacgcttccgtcgagagtgccttacggtttccacggaacgttcatcagtaaggaagatttatcgaagcaagctttgtgttagttttagatttttgtaggatcttataaatgttaatatgagtgatagtgattagtgacataggattgttgcctgagggattgttatgcattagtccccggcaacgagtttcttgaattttagttatacgtatatactgtgattatgtattatgtatatactatgatcaagtgtccaatgatccaactgtgtacaaagttttgtagtaaagttttaatttacacacagaatttgttagcataaaaatttatagatttgatcaaaactgatttattaaagatggttattaaagtagattaaagtggagttattgttataaacgatgagaaaaatgcattacttataaaaatagctaaatatagtcgacacactaaacttgattatcttagaaggtttatgctgatatcttttctatattatgtaagcttccccaaatatctctgtgagctgcatgtgaatgaactgtgtagagctagagaagcttcttatagaaggaatttgaccttcgaaaatggaaacccgaaaatatctcatgtgatctctgttttgggaatgaggtctactttaatctttctgatcgttctttgtcttttttacaattatcaacaacttttatttatctgctcgtttttcgtctgttcgttttttgttcttcttgcaataattggtattacaaattacgaaattaccacaatacgaattattgtttttttattcttcttcttttaaagtaagaaatccatatccctatacttatatttcgaaattacataaaaaaactaaccttgtattttataaaatattacttaggaataccattagaaatagaatttaaaggtccaaactaattcagttcattaaaataaacaagtcaaaactttatttatgcaatttaattataaaccaaaaagatgcatttatgggtttaacttgttgacagcttattttattcatgaatttacgttgaggttgttgcgatttctactttaagcaaacgggaaacatctcacagttttgacttgtgatcttttatcctactcttattggttctaaagtgcatacacgtaagcgtatacataagcactcgcatttcacagtagccaatcgattgattctaatctttgaacatgtaatacacttcatggccactctttttttccgggaactatcttttttttttgacatggaaaaagaccattttttgatttataacgtgcatactgctgtgtcttttttctaaataaatagtttttatcaaatatgtaatcatactagggaaaatctcatcaagatcatacgtatttttgtacatgacttttaaatagtatattcgccgaaaaatacgttgatgtctcggaatttgacgcctcaaaaacattagaatatacaaaatcaagtaacgagtttgtaggttgaaactaaaatgccacgtaatacagtgcgtagggtccattcgatgtttctagatcaaagtctacacactatagagacttccagatacagatacacattcgaaatcatcaatgaaaaataacaatttaagtatcttcttatcctaatgtgtgtgtgcttttttttagtcaactattttgtgtatattgtaagatgtatcatgttatgacatgagtatgttgctacgtgtcgtgagatatcgaacccaacgcagatatgagtatgttgagctagtttcttcttatgaaacaatcatatatgtctataatgaatagatcacattatctgcctgaaaaaaatcccgtatattactcgacgaaatataaatacccaatgtagctgattttgctttctctggtgacatatccaatttggctaaatttgttaactagtctattataggtttataatagatctagctatgttaaagatactaaagcatcagttacataaatttttggcgcgagtttatatcttttggaattaaaaataagagaatttaaaaataagaagatcattttgtttggccacaggagttctgaaaggtcaggtatgatttttttcttgctcgctcttatgattttgtttttattaatgggttttcaaataagaaaaactgtttttcgaagcccggttcagatccattgttttttgtaaaatataggcccaattcaccataagtccatgaccaaaacaaaaataagatagaaccaatactgaaccaggatcttctctcgctttcgtgatcaatgtcgccaagcttctcgagatcatgtggtcacgtcaattgtataaatacaattattgacgtaacacaatctctacagttccatcgaaatatctcgaaaatttccagttaattctggtaacgtgaacgtatcttccacctcttcaacctacacagctttctagaaatttggctcgcttttctaagtcctctgtatttttttgcacgtttttcaactaagtttcaatatgaatcatttcttctataaataaatgatattttcatcaggtaatgatacattgtgccgaaataaaacgtcaatactcattagtcaaattaattgttcacataatttaaaactgtgttaatccatccagttattttcttacaacaaaataatcttttccatcaacttttaaaataattaaacgcagtgctaagaaatctaaaatcttgatttagaaatccattatggtttctggtcaactgaaatccataatttcctttaacatccaaaatccaaatttgctactatgataatagatttcagacgattttttttcttttttcaatcatagagtccacacgaatatttgcaagttactatataaaacactataatggtcaacagataaaaaaaaggcgaatgaagatatgttacgtaaaaagaaaatactgtaattataaattattactttaaaaagctttaaaatctggccacatgtttttaaagagtggtgtgacgtaacgactagagtcagcacaatccattattgtatcataaatattctcatctataaattacctaaacccttacaggtagtgtcccaaccaaacaaatcgagaaagacgaacacttacaaaaaaaaatctctttgtgagctttagcgatcgtaacaatggcgaacgaggtgattcttcttgatttctggccgagtatgttcgggatgaggacaaggatcgcattgagggagaaaggtgttgaatttgagtacagagaagaagatctaaggaacaagagtcctttgcttctccagatgaatccgattcacaagaagattcctgttctcatccacaatggtaaaccggttaacgaatctatcatccaggttcagtacattgacgaggtctggtctcacaagaaccctattcttccttctgatccttacctgagagctcaagctaggttctgggctgatttcattgacaagaaggtatcttatttcctttgtgcccttgattgaataatgttgaaattgaacttgggatttcataaaaattgaaactttagttgagtttgctagtgattggctcaaatttagggttttgcttgtagactcgtctttgagcttgtatgggtttgtctgatgttataatattacttgagtttgtagttgttagggttagagatctcacctccaaatttcagatttttcttgtggactcatctctgagctagtcagggtttgtcttcttagatagtttaatgttatgttacttgtgcaatttgaggtttttacatactagtttcgctagtagatatcatctttgagctttgtttgggttcatcttagatagtttgatgatatgtttcttttgcaatttgggggtctctaggactggttttgctttgtagacatcatctttgagctttgtttgggttcgactgagttctgacatagcttggtgttatgttactctgtgcaatgtttcagctgtatgatgctcagaggaaggtgtgggcgacaaagggtgaggaacaagaggcagggaagaaggatttcattgagatactcaagactcttgaatctgagcttggagacaaaccttactttagtggcgatgactttggctatgtagacattgcgttgattggattctacacatggtttccagcatacgagaagtttgctaacttcagtatcgaatctgaggttccgaaactgattgcttgggttaagaagtgtttgcagagggagagcgtggctaagtccttgcctgatcctgagaaggttactgaattcgtctctgagctcaggaagaaatttgtacctgagtaaatatgtttctcttgtcatatggttcggacttaagatgctctctgttttactttcgtgtgttgtctttcttaaataatgcagagcatctgtgaggtggtttgagtgtagagaatgtatgtctttgctgtagcagattcctgtgttttctggatttaatggcttgtcctagtttttatgcattgtaactatgagtttaattaatgatcgttaatctataatgattattaatttgttactttgatatgtaattacgccaatacgactcttctacctgaccaagcttatcacgccaatgttgctgtaaaagacaatagtgcagtttggcgattaaaacctccaacatcgagaatggtaagccggtctggatctaataagcccaaattggcatccataagcccaaattgaaattggcatccataactccatattgtagtcaattggaagttatgtggttgatgtgatcattagtgtcggtatgatcagattagccacgggtttagtgtttcttgccgaatttgaattcggtagatcaaataacattactatgatccgcacagttcatgggatttgaatttgatttacgattacaacaacgatattaacacagaactatcctgtaatttttgggatcgattagtaaattttaaaatattatttcaaaggctttatatatataaagaatttagagtataaacatagataaagcattatgtatttataaatcttatgctgatattgaaaaaataatggtgtatgtgatatatttaatagagtgcaatactctctcaataaattagtatagctgttatcactccttgtgtaaatgcgtatttcttgtacatgcatggtaagtagcttgtcctcgtatgtaccggattgtaatgtttgatatcaaatcaagggaatcacgtggtaaatgtacacccacctaactgagagataataatacaaacaactgtgagtaggtggccacgccaaaagtagagactgatgcagcaactaagcaaagtattacttcactcgatcaactttttattttgttaccttcttataaatcaagtcgatttctatattgtcaagtactaattccattctaatctcttacatatacgtttaaggtttgaatcagagcaaaagataatcacactcttttatattaagtgatgttttcactagttgcacacatatgacaattatttaacaaagttgcaaaatacattttaaatcgttacgggtaaaagcttactgtttaaaagatttatatatggaccataatatgctttgaaaaaagctgatgtgacgtaacgggaatcaaaatcctttccacatcattttcttcccctataaaacaaccgtcactcactccttctctactataacacacactcgcttgttcacgcacaacaaaaagcaagaatatataccactttgtgaacttcagagatcctatagcaatggcgaacctaccgattcttttggattactggccaagtatgttcgggatgagggctagagttgcgttgcgagagaaaggtgttgagtttgaatacagagaggaagatttctcgaacaagagccctttactcctccagagtaatcccattcacaagaaaatcccggttctggtccacaacggtaaaccggtatgtgaatctcttaacgttgtccagtacgtcgacgaggcttggcccgagaagaacccgttcttcccttccgatccttacgggagagctcaggctcgattctgggctgatttcgtggacaagaaggtaactaatcccttttgtgccctagatttcttaacttgagtctgaaacaatgtgatttagggttatctgaaaaaatgagtttggttccttctgacataattcgatgttctgtaatggattcagttcaccgacgcccaattcaaggtatgggggaagaaaggtgaggaacaagaagcaggcaagaaggaatttattgaggcagtgaagattcttgaatctgagctaggagataaaccttactttggtggagatagctttgggtatgtagacatttccttgattacattctcgagttggttccaagcctatgagaagtttggtaactttagcatcgagtcagagagtccgaaactgatcgcttgggcaaagcggtgcatggagaaagagagtgtgtctaagtctctccctgactctgagaagattgttgcatatgctgctgagtataggaagaacaatctctgatttgaataatcttgttgttctcttgttgctaagctgtgttctgtttttgtctttgtttttttttttcccctaataatgcgagagagccttagtgaatgtgtgttgtggtttttatgcatcctaagtatggaatttaaataaaatttgtttcgacttaaagagtccaagtatgaagtcacatccttttcaaaagaacaaacacaagaaaaagttggaattcttttttctttttctacttgtctagtaccgcgtatacgaaaatagtataacacccagcaattaataaagtagatggccacgttacaatcatgcaagtagtggctctgcaaacataagataaaaagaaattgggttctcagccacttttgggaggacatgcagactaaagcactctctaaactccgcttagagggaaaacaaaaagacacctctgatctattatcactattattagggtttttttgtttgtttttcttttctttgcttcttaagagataatacattgatcactaacataaaagctggtcagttcccttactttgaggctttgagtggagactccactacggtgtggctcacaccaacagtttttctctgattatccttttgtcatcaactcaccattcaccgaataatataatttatacgtgtgatctttgtttcgaagatcaatacaattctattgtaaaacatatggtttcggtcattcgattgctagaaaagaactagtcaaagcttcatatcgttattgcattactgtcatcaccattcataagttgtaagaagaatagcaaagaggaaaatttgtatttttcatcaccaaaagaaagatttgcatacctttgatttacactctgcaattgtttaaaaggggactactgatgatatttttaacaagctgaatttagtacaatatagtgatatatacaccattagcagcattataaagctactctcattaaactaagaatgaaggaaataataaacttaccaaaatttaaaattggtttaatatggttggccaaaaggttcagatgctctgtttcgagtaaaaatcaccgccaaagtaataaaacatccctttcactatcctgcttgtaattttttctctcggcagaagatgacatcattcatcaataacatattttataaccttgatttatcagactgctattttctcaaaaggtacttatcaaactactatggtaaaatatttatggtttctataaccaccactagcattattaaactactagtctacgagatatcataacgttaccataaaactaatgaaagaaatgataaaaattccacactttgatatttttttaaaaggtttaatatgattgaccaaaacgtttaataatttcgaatggacatgttacccttattaacagcctaacgatgctacacattttaataagatacgactcaatagaaaaagcttcacggatcgaaaccatggcagccgaagtgatccttctcggtttctggccgagcatgttcggaatgaggacgatgatcgcgttagaggagaaaggagtgaagtatgagtatagagaagaggatgtgatcaataacaagagtcccttgctactagagatgaatccgattcacaagacaatcccggttctcatccacaatggtaaaccggttcttgaatcccttatccaaatccaatatatagacgaggtttggtctgacaacaactcatttctcccttctgatccttaccatagagctcaagctttattttgggccgatttcatcgacaagaaggtaaacaacaagtgtcattaaatttcactgtccttgactgtaatttgtttttgagatccttaacaatatatggagtttgtgggagtttaagttacaaggagtttcaactacaaacctaacagtattagacgagttaaagaaaagatattggaattgaaagatttcagatgatagaactttagggttttgcttgtaactcatttgtgcgtatgttccctgtgccacaaggaacagttgtatgtttgtgggaggaagacttgggcaacgaaaggtgaggagctagaagcagccaataaagagtttattgaaatactcaagactcttcaatgtgagctcggagaaaaaccttactttggcggcgataaattcgggtttgtagacattgtcctgattggattctatagttggtttccagcataccagaagtttggtaacttcagcatcgaaccagagtgtttgaagctgattgcttggggaaaaagatgtatgcaaagagagagtgtggctaaagctttgcctgattctgagaaagttgttggatacgttttacagcttaagaagttatatggaattgagtaaggatctctctaaattgccgtttcctgttctgtttagctatttgttgtgttgtgatgtgtgtttctgataatgaaatgaagtctttgttcgaaattcggatgctttgttttgttgaaattcgatgtttggtctgaattcaatgcatatagatgtaaattttgtatcatcagtttttcttagatcttcatcgttgctaaccactacatcgacgtataaataacactttatcatgatttcccttgttgattgtcttgcatgatttcccttgttgatttatctctttggatttagatcatttcaaaagatacaactgtgtttgtttcgtatttctagcaaataacatctgacttttgagattgattaccaaattgtaaattagtaatattaacgacgattgcaattgcactaaaatttaacaatcacttagattatttgaacaaagtattttataaaatgaaaacattagttaacataaaaaacatattcataatcgaaatataattaaaaatatatgatccaaagataattaaaaaattagtttacataataaatatatttgtaacaaaaaccctttaaaaaaagtatttaagagttaaatttacttgcgtgaaaagcggttgaactaataacacctcttacagacccgtaggttgggacaggatgcttagtccgtccgctttgttttcaatgcattgaaattcaacacttagattttttgaaaaccaaaatattttataagaaaaactttagttaaaaaataagtttacataataaaataatttatacaaaaaaccataaaaaattaatctaaggatttaaatttacttgcatgaaaaacggttgaactaataacacctcttacggacccgtaggatgggacgggatgtttagcccagtttgtttcaatgcattgaaattcaacacttagattttttgaaaaccaaaatattttataagaaaaactttagttaaaaaataagtttacataataaaaatatttgtacaaaaaaccataaaaaattaatctaaggatttaagtttacttgcatgaaaaacggttgaactaataacacctcttacggacccgtaggatgggacgggatgcttagcccagtttgttttcaatgcattgaaattcaacacttagattttttgaaaaccaaaatattttatataaaaaaaactttaattaaaaaataagtttacataacaaaaatatttgtaataaaaacaataaaaaaaacatttaagagtttaatttacttgcgtgaaaagcggtttaactaaataacaccttttacggacccgtaggatgggacgggatgtttagtccgttttgttttcaatgcattgaaattcaacacttaaattttttaaaaattaaaaatattttacataataaaaactttagttaaaactaaaaaaatcataatcaaaaatataataaaataagtttacataataaaaatatttgtaacaaaaaccgcaaaaattaatctaaatattaaatttacttacgtgaaaggcggttggactaataacaccgcttacggacccataggatgggacgggatgctcaatccggttgttttcaatgcattgaaatttaacacttagatttttaaaaaccaaaatattttttataataaaatatccaattaaaataaaataaaaacttttgctaacaaaaaaagagaaaaacgaaaaaaattgaggtaaaaagttttaaaaatcaagaggctaaatcccttaattccaaaattctaaatccctaaattccaaacaagagtctaaatacctaaattccaaaagtccaaatccctaaattttaaaattccaaatccctaaattccaaacaagaggctaaattttttaaattccaaattgatgaacaataacataacattcgcctaaaagacatacagtgaacgaaacagtagacaagtatgttatgaatttgtttcggatagaaagttataccaatttatgatcgagattgtagcgttcgcgtgttagcaaacagtcaaagaaccctatacctgaagaacaaaagaagatgctaagtcccagcgaatcaaaatcaaatctcaaaatcaatttaaagtaacaaaaatctcttaccatagaataaaattaaaggatcctggagagtcttcgtccttacttgcttggacccgagaagagtcactacatgcgagttctgtgacacgcaaaaaaacagaaaaacagagtcacagaacaatgaaaagagaatcgatgaaccctagaagaagaccctaacatatacaattataaatcatcgatgacagaatgaaacagaaataaataataattgaaagagagagaaggactataactaagtaacctgatcgcagatagatggctctctcaggttgagattggtgatcctttagtcgatcggaatcacaagtgagatgagagaatgaagacgacgaacaacaagtgtatgctagacaatcttaatctgggggagaaactcttgtctccgtataaataacaggagcgttgaagaagaaaaggaaatcactaacggctagttatgaaaaaaatggaaattaagtaggggaaaaatgttatttaatacctcaacttacaaaaaatggccaaattaaccgtgaactcgtgaaatgaccgttttaactctcaacaaaaagttgacttctgttttaacttttaagtttgcgttgactcggcctaataaaccaccgttaaaaattcttctaacagcgtaattaacagccgttacagaacatccgttaaggtgatacgacgacgttttgtgctatcaacagacctcaaagtcgacgaaacctctgaaaaacccccaaatcaaaacccaaaccctaaaaattattctctctcaaatttttcgatcaaatctgcattatgagctgcaactcaaggaattcgagtggtgaaagtggaggctgcaattcaggaatgatttcaaatgttgaagctggaggtttcaagagtcgtgggtttcctgttaagtgtaaatgtgggctcgaagtcgtcatgtttacatcgagcacgactaagaaccctggaaggcctttctttcggtgcaaaagctgtaaagatgtaagtagatttgatatgagaatgtgatgttttttgtgtttggtcagtaaaagcttgagatggaattgcaggatcatttgttcaaatgggtggaggagtgtatgtatgaagaggttgtagatgctctacccaaaatctccagcattgataacgagataatcaatgcaaaagctgaggttgcagttgaaattgcaaacttaaaggagctaatgatagagttgaaagaagatggaatgtggagcaaaagagaaattcagagatggaaaaagatgacgaaagtgtgcttggtgtgcctttgttttagtgtgattgcaattgtaatatcaatgttctataagaaaaaaaaccaaaaatttgttcttggttattagtgtgtaatcgaatgggagcttagtttgaatgtgatgtctttgttgtttagtttgtgtttggttatgcttttactatgtaatgacatgtagctttggtaatggtaatgaatttcatttgaaagaaaaggtcaacttcttaaaactgagactaagctaatcatatagagagacaagtgcaaacaacaataagaaaccaagacttagattatgtcataaagacaagttcaaacaacaaaaacaaaccgagaatgtcataaagaaagaaagacatatgtcataaagacaagttcaaacaacaaaaacaaacatgagactagcatatcatgttccacgagaacattcaaaccatggtgcaagtccagcaagtccttgcggttgtgcttctccttgtggttgttcagacacttgtgatgttccacgacctcttcccctctgtctttgtgctccacgagttgttcccctttgtctttgtgttccacgacctcttcctctttggctttgtgtttgtgatacattgttctgcccttgtgagccattgttctgcccttgtgatccattgttctgcccttgtgagccattatcctgcccttgtgacacattattctgtccttgtaacatattttcctgcccttgtaacacattaccctgcccttgtgagccattatcatgtccatctgatccttctacatgcccttgtggttcctaatacaaacattacaatcagtttttgaaacagaatttttgaaaatagaaatgaaagatatacaaacctcatttatccttggtcgacctcttggtctctttggtggacttaaaacagtagcatttttgcatgatttcttgttgtgcccttcttgcaagcagttagagcatgtcatgatcctcttttcccttgacattttgttcggatttgaggaagaggcaacttcatttcttcctttccttcttgcataattgcttggccttccggtattgcctcttctccatggtggtggcaagacaggcagcctattcaatcgaccacacaaaggcatcccttggacaggcctaataccacggaaatatgtttctcgccacctatttcttgtgtagtagtcgttcacatagctttcaaccttctttttttccctattatcacacatgttgcatgaacacatgggatcccaaccatttgccatttcctgcagccgcatgtctttaagtccatatcaacaaagtagccaactccattgacatagatttcatgcaaattatccctggacatgtatctctgtgtattctggaccccagcaatcatcttctcaatctcagcatgagctcttggtgtgaactttgttttgcacctgtcagcaatgataaaccttttagctgtcctaaccatgcattgcctcctaatatcctctagaagatctaatagtggtttccgcctagcttgtctaatggttctattgaatgactcactcagattgttgagattgtcgttgcaacatgtaccggttctaaagaatgctctaaaccatgtaatcggactagtaagttggagagacgtgtaggcttggatattgtacctttttaagtctgcatggtaattattgaactcttatacggtgtagctgcgtgctatcttccaaaatagacgttgtagctcaatgtcgtggttgtcccttttccaattatccatgatgtgttttgaacattgtcgatgctcagcttgcggaagaatggtatggatagccttgactaaaccctgcaaaacaacaaaaaaaacacaagtttagtatgattgtctatctcaaattacagtagatatatgaagggaatcttatagaatagagactaacagattgtttatctgaaatgattgctagatcagtcatttcgcatagccccaagcttgtagagagctatctcaagaaccagtcccaattgtcatcattttctatctcgactacagaccaagcaatacggacaattcgattgtcaccatctcttccaactgtggctaatagatgtccttttatgtcccatttcagaaaagctccatctatccctattacaggtctgcaagtttgtttccatgactccctttgagcttgaaaacaaatatataaccggtaaaatctctgcttgcttccaatcactgctcctgcaactgtctctatgttgaactctgtccccggattccgcaataacacctctgcttgataatcccatatcctagcaaaatgagaatcatgactagcacgtctagctctcaaaacttttgtctttgccttagcacattggtctggagtcacttccaacttgtattctcttaagatctcagcaaccatctcatgtttagtgagttttggattcactctcaacctttcttcaaacaaaaacccaatagatgacacctttaacatcttcgaatgtcctgacctcacacaagtatgctcattgtaataagttcgtatttgcatcttatgttttctcttctcataagagcaacggactctgcacggacattcaacaccctcatcactaacatacacacacttagcagcaacaaccatagcttcagaattataaagtttaatgtcataccttgtctttagggaatacatcaaaagagcaagcttgaaatcttcaggagagttataagtcttctccaatgctagtaaaatctcaggatcaccaagatcatttcgagctgcctctactctatcatcatcttcatcatcagaggacaaaggatctggaatcttgtcttcatcccatatatcatctaccctgtcattgtcactagcttcttcttctccattagcctctggaaaatctctttccatgtctaagttaccatcttcttcgacacctaatccagcagtatcatcttcttctctattagtatctactgcatcatcaacctcatcgcagtcttcatctccttggactgcacagtcatcgtcttcatcaagagcaggaacttcagcctctaaatcctcctcttcttcatctctgattctccttcgtttacttcgtctaagtggagcacgaacttcgactgcatctgtcacatcaacgcctgattcttgagcttcatcgtgagcttcctcttctccgccacaagacgtttcacctaaagcttcctcttcctcttgtccaatttcacgacgagttgattcttcaactgcaacatcagcttcctcttccaatctattttgccttcgtttacttcgcctaagtggagaacaaactgcggttgcatctgccacatcaacggactgacctcgagcttcttctccaatttgatttgcttctccttccggcattggttcaactgcatcgtgagcttcttcttccaatctgatttgccttcgtttacttcgcctaagtggagaacgaacttcggccacatttgccacatcaacatttgatactacattcgcttgacctcgagctttttctccaattcgatctgcttctctttccggcgttggtttagctgcatcttgtgctccgtcttctccgccacaagactcagataccacattcgtttcacccccaacttcttctccaatttcatctctttctcctcgcggtggtgcttcaactccatctcccaccaaattctctgattcgtgaagcattggagatccaatcctcataacgacgccattctttctaactaatggcatttcagaaaacgaattgaagcaattagggtttcgattttgattttgggggcaggattaggtttcgatttgggtttagggtaattgattttgttttgagaatttctattctcgattttgatttctctttagcacgaaaacgaggtcgtaagactataataacagatgcttaacggattaaaacggctgtcaattacgctgttagaaggagttttaacggtggttaattagaccgagtcaacgcaaacttgaaagtttaaaacagaagtcaactttttgttgagagttaaaacggccatttctcgagttcacggttactttggccattttttgtaaattgaagtattaaataacattttttctaattaaacttaataaactacttaagaaaaatgggaaaataataattggaaccgactttaatttcacaatgactcttttgcccttccatcgttgacgacattgtttctccttctctcttccacccatttaaaaacgcaaacttggaaaatggagaactgtttaactacgccaacgggctgttttaatgacaaatgttagactgggctcagtaacggatgttgtttcttgtcactaaagaatacgattcatagatttaaaagtaatccatttactttgcttttactttttcatgtgaagagaaacaaaaaaaagttttgttggtgatcaagtttgtagtgtactagtaaaatagtaccatagtatgtgtgtgtgtgatgtggaaacaaaagaatatatagaaaattttatgttttgggtttcatgtattttcttttaacataaaaacaagaacagataagcataatgacgtaagcagtggcctaagcatctcttaaaactccatttaaaaaaacatatcgaattgaataacattgagttgacttgtttaacattcacaccttgcttgctacggtatcttagcttccaagattcaattaatttttcattttttatgttcacagtcaatagtaataagacatcagcatcgcatacaaatttcttatataactcgactagtttactctataaagaatcagcgattggagtatagaaaaggtttaagcaaaatccatcaaagaagagttccttttcacaataatggcggatgaagtgatacttttggatttttggccgagtccattcggagtaagagcgagaatcgcgctgagagagaaaggagttgagtttgagtacagagaagagaatctgagagacaagagccctttgcttctccagatgaatccggttcacaagaagattccggttctcatccacaatggtaaaccggtttgtgaatccatgaacgttgttcagtacatcgacgaggtttggtccgacaaaaacccaatccttccttctgatccttaccagagagctcaagccagattttgggttgatttcgtggacaccaaggtacccaatccaaaatctctgtttaggtttttttttttttttttgtagactgataattgaaaatatttttgggcttgatctgtgaaatggtgcagctgtttgagccagcggataagatttggcaaacgaaaggagaggaacaagagacagccaagaaagagtatatagaagcactcaagattcttgaaactgagcttggagacaaaccttactttggtggagataccttcgggttcgtagacattgccatgactggatattacagctggttcgaagcatcagagaaactagctaacttcagcatcgaaccagagtgtcccacactgatggcttcggctaagaggtgtttgcagagagaaagcgtggttcagtcccttcatgattctgagaaaatccttgcgtttgcctataagattaggaagatatactgtgtctaaaagtcttattgattctttgaacgaaaaaaaaagtcttagaatttcatctcacgttacgtttctatgttcactgatttctatatgattttgttgtacctttctttctattttcaccaaataatatttgtttcttgtcactcaagaatatttgttcacaagctaaatgtttttaatcgctaacgactaatgctagatccaaaatttagttaatttcatatccaatcaattaaaaaatttaaaaaacaaacataagaaaaagaaattttttaaagaaatccaaaaaagaaacaaaatcaaaattttaaaaactatttttaaaaatcggaataaaaaacttgaatccgagtccttgggctcttgaactgaattcaactacagtggaatggatggtacctacataataataggaaaaacaagttgaatgtttggaatcgctaacgactaatgctggatccaaaatccggttagatttcataccattatgtaaatttagtattcaaaaaaaaaacataagaaaaagcttttaaaaatccgaaaaggaaaataatcaaagttttaaaaactatttttgaaaatcctaattaaaaacttgaatgctaaatctacataatagtagaaaaaacaagttgaatatttggaatcgctaacgactaatgctggatccaaaatccggttagatttcataccattatgtaaatttagtaaccaaaaaaataaaaataaaaatcaaaaatatatattttaaaagctattaaaaatttaagaagggatagaaattgacctgtttcttaatgggtaggtgaatgggctttttgttgggctgaatatgagaatccaatccaatctcctccaccaccgtgtctgtcaccgaatgcttccgttgatccatatctcctgaacaagagcattgaagatccgacgccctttgatgtcaaacaaaacctccgacgacgaaggagagtgagagaagatatcgacagacgaagggaggataagaatcagaagcttcttcttcatccacagcgccacgaaattcgaagatgaaatagaagcaggaatcagaagcttcttcttcttccacagcgatcgtgacctctctcgatatggcgttcggcgatgtatatggatcatcaatttcacggtcacgagagatcagcgtttctctttgtaaaccagtcgaatttttatttagaagagagatcagcgattcgatttgtaaaaccgtcggagaggaaagggaagaattttttagggtttagaagaaggaattatgatttctgaaggaaggaaacaagagacttataggaaacaaaaaaaaagaagggaattgatcacgattacgcttcgtttacaacggtcttatttttctaactgcaattacggtcacgtgttgaaattttattaaggtttcaggtggtttagattaaaaatttaaatcatagcaaaacctctgtcacagaggctctgtgtcaacaaataagaaagtcaacggaggatcagtaacaagatcagaagcaatctctgtttcaacaaataagaaacctcacgcataaagagacaaatatgaccgttgttagcaaatttccttttcctcttaacctaaaaggaaacagcctttgcttataataaatagtcatatcatcttcttccttgtcaaatcaaaattctccataacgaaaacaaaagaaaccttctttcatctttttcttttttctcttcatagatgaaatccgaagcaattctctggagaattcgtttccgatcaccgtggtggaggagtgcttcgccgagacattagggtttgttctggaaactcaactcttggatatattttatggcgttatgatgcatgacaaaggtattcagagttctattcacctatgatctccaggtaaaacattccatctgatactgtaaaaagacatgatctttgttcttttcttatgtatctcaatgatcctgcttgtctgtcgtatagttctgctattttacatctcaaggtaattctttacttgaatttttagagacagaacatcatgaagaaacattgattgttctacagggttatcatgcgttgcaaggacatagggttgctcataagctgtggaatgaagggccgaaactattagctcttgcattgcaaagccgaataagcgaggtagttttggcgatcattcattgtcatttttcagctcaatgtctgatcttgctgtggttttcctcagtttttggaatcgacatatatccaggtagagtatgagctctcatctgtttgaacattctcagtttcccttctctggtgtaatagttgatcaggtttaccggtgaatagattgctgcttatacatattgcttgaattctctttctgcatagcggcaagaattggggagggaatattgttggatcatggaactggaatggtcattggtgagacctctgtgataggcaacagtgtctcgatattacatgtaagcgtctcttctccaaaccatttcctggaaattcaatacagagaccatatgattatttttcagtttttcaaagctatttgagttttcactgtcacagggtgtaacgttaggaggaaccggaaacgaaactggtgatcgtcaaccaaaaataggtgaaggtgcattgcttggagcttgtttgactatacttggcaacataagcattggtgctcattaccggactaagggtgcaattctcttcaaagcccaacaatatcaaaacaggtcaattctcagccttttaatattttcatttttaattcaagtaaaaacaaatagggtttttattcacggatttgttaaaaactattacaacttttttactcgagtttttgtttcaattttgaaattatatattttaatatttaaaaaaaaaatttcaattttttaaaaaatattttagatatactatttttttaagtgttgaatcttttaattttgtgtgaactagttggatacaacatccaaacccctaataggtgttctaggttcaacatggtttatacataatataaattttaacacttgatatttttactaactttttttttaattctatagttttatactactattaaataatattttggataaattatatttttaagtgttaaatgtttaatttttgtgtgaactagttggatacaacatccaaagccctaagcggtgttctaggttcaatatggaggtttacacataatataaattcttaacacttggttttttatattaaaaatatttttatatttatatttttatattacaatttttaaaaatatatttaaaagaataatatctgggaaaaactattttgttttaagtgttacgtttttaatttttgtgtgaactagttggatacaacatccaaaccattaagcggtgttctaggttcaacatggaggtttacacataatataaattcttaacacttggttttttatattaaaaatatttttaaatttatatttttatataacaatttaaaaaaaatatttaaaaaaataatatctgggaaaaactatttttgttttaagtgttaaattttttatttttatgtgaactagttggatagaacatctaaacccctaagagctgttttaggttcaacatggtttatacataatataaatttttaacacttgtttttttaattaaaaactgtttttaaatttatatttttatattgctatttaaactttaaggtttttgtatttttcaaataatattttggataaactattttatattttgaaaataatattttgaataaactgttattttttaagtgttaagtttttaatttttgtgtgaactaattggatataacatccaaatccgtaagcggtattctaggttcaacataatttacgcatgatttaattttttacacttggtttttttattaaaaatgttttaaaatttatattttatattgctatttaaactttaaagtttttgtattttttaaagaatattttggataaaatttatttttgaagtgtttcaattttatattttgtgtaaactacttgaatacaacattcaaactcctaagctgtgttctaagtttaacatagtttacaaataatataatttttaacacttatttttttactcaaaaaaaatatattttttttaaaaaatagtattttggatttaaaaaatataatttactacatctcacgtttctatgttcatttatttcgatatgaaatttcttggttgtaccttttttctattttcaccaaataatatttgtttcttgtcactcaagaatattgttcctctctctttaagacttacaatgttgtatctaggctcatagaggcacaagtcaattttaaaaaaagtctggtgcttgttagaaaactgaaaaagtcataatattgtctccaaacgtataaagtattcatattatgcatttctcaaacaaaaatcccaaacacattatatcaattcaatcataagcctaaatttgatcaaaatttttgtccaataattgttcgttttattgtggctataggcaatttgcctttttccaaagcatgtccacttattctaatcttttgtaaaaaaagataatgaaaatggagaattagattcgaaactcttctttattttggctctatatagtgagtagttaccactctctcttctttcacaccgacagctaaaaatggaggaagagattatcctattggattattgggcgagtatgtacgggatgaggacaaggattgctttggaggagaaaaaagtgaaatatgagtatagagaagaagatctgagtaacaaaagccctttacttcttcagatgaaccctattcacaagaagattccggttttaattcatgaaggtaaaccgatctgcgaatcgataatccaagttcagtatatcgacgagctttggcctgacacaaacccgattcttccttcagatccttaccagagagctcaagctagattttgggcagattacatcgacaagaaggttacattttttcttttacgttattgagttctttgcactatataattccctaactatataagcaaaaaacgaatgatgtattgctaattgttttttttggacaaactgtgatcagacatacgtgccatgcaaggcattatggtcagaatcaggggagaaacaagaggcagcgaagatagagtttatagaagtactcaagacacttgattcagagcttggagacaaatattattttggaggaaacgaatttggactcgttgacattgcctttatcggattctatagttggtttcgtacgtacgaggaggtagcgaatctcagcatcgtgttagagtttcctaagctaatggcgtgggcacagaggtgtttgaagagagagagtgtggctaaggccttgcctgactctgataaggttcttaagtcagtctctgatcatcggaagattattttaggaatcgattaagttcacttacccctgttctgtttttcatgttttttctcattttaaaatgtggcgtgtatttcaagtttgtcaataagtatggtatagaccaaggtatgtttgtggtgggatttgagtgaagctatgatctatttttatttggaatccaacttagcaagcatcgaatttgatcaacagagcctattgtttgagttgaaaccaaaccaatcaaaaacaaaaattcaaaccactcttcgtcggaaaaaagaatgacgaattttatttttatttttttgtcgccaacgttaaatgtcgttgaaagcaaaatttgaaaacaaatgtcaaatagagagtaccaaaacaaaacaagagccacgcaacaagagagtacgtttacatggggacttgtactatgattctttaattatactaatgagccccacattatgtgttacctttatccaataacctttttttttttttggttctacagagtacaagctatccaggttgaaaaataatgcacagaagcattttttttttctttttcaaaagcataaattttcatcacagagaacaaccaaaacgttaaatttcttcattgtaggacgcaaacaataaattagaatccattagcaggaaaaacggatttaacaaaaccaaatggactgtagaaattgtttttgataagaatcaaatggatagtaaaattgcaatgtatggatcaaataatttattacccgttttacctttagaataaatatcgtaagcatatataagacttttttgccgtcaattgttgggtaaaatgaaacaaccaaactttatcttttgtttaaatccataaattctacaaaacctgacaagtttattccaaagtaaggtgtaaccgaaacttataaaagaaaatgatcgacgtgattgatacatataaagatattataatctatgtatcattctttctatcattgaatcttgtaaaactcatggaataataaattatacatttctaataaaacaaaactgcaaaagatgaatatgcatggagttgtatcaaatcctcggaaatataacaactccgcatagtaattactcgaataggtattggtcacagaaacttagaaaattcactgttacgaaataacgttcccaattaaaatacgtttaaaccaatttattgaatgatacgtttcagtgtaataagcttattactaaaggcttttaccaatgcaagaatatttcaaacattattccctttattttattgtaacaaaagagaatatttcaaacattcctattctcaaaaattggacatttggccaaccatcttcacatcatgctaatcagatatagagaccagattcatctcaattactacatgattaatcacttctacaaatcagacattaacagtgtaactaatactccattttgaaggaaacaaaaaaaaagggtcgaaagtccatgtgatagctgtctgtctcgtgctaatctcacagccgttggataagtcgtttgctgacttgaatcggagatttcggtggagtacgaagtacaggataactacccattagtttaaaagactgtacgaatgtcgttttcggtaatacttttggggcttttgaccaaaatgggcgttgaataacccgacccgttaacccaacttatttgtattgttttatatattatttcattgttgagcttattatttgtaattttgtatagcattaaacagaatttttttaatgtggtagttgtttttcatgagataacagaaattttcagatttttgtaatctatattattggcttgatttagcaattttggtttgaattgacacaccatatacttaaatgcatgatttactagataaactgaaaattaagtcattctgacaaaaaagtttatacgaacaatatcatttgtgaagcatggttttgttttagcgagctatttatcagaatttttaatatttgtatcatcattcccaatttcccatagatgaaatcatgaaaatacattttactaattctgtttttttttatataattaaaatcattatgaacaataaacactatcagaatctcaatatattctcctctcaaaacttcagtttttttttccatttgctttagttagaaacaaaaataaagaaacaaatcttaaaaagaagagatgatatatttccatgtatatacaactacaagtatagcataaattacaactcacaacatctaaatttctttcttaaaaaacagttacaacgaaactaaatgcagtaaccaattaagggattaaacaatatacaaattggtcaggaatagaatatataaaggtacatgttcatacatataaacacgcattaattatttaattaatcagagcattatatggaagagaatccatagataaacatacagacaaattatttccttttcatcttattctagaaaaatccaattaaagctacttattatagtcgtatagcctatagtttatataaaaccaaaattgtttttaacttataaaatatctttaaaataaaataaaaagagaaaaaaaaagccattttcattttttcatcatcttcgtcttctccattatctctctacccaaatctggcagagaaaaacaaaagaagaagaagaagaaaaactttcgatatggataagagctgtaactcctccggcgattcctccgccgtatccgcctctgcaacgagtagtaccggtaacaatacaacgaacagagatcattacctgagacaactcaataagctgtctcataagatatcaaaaccgacgaactcttcctcctccgtctccgtcgcgaatcgtgaaattgatcttccacctcctccaccgctgcaaatcaatcaagggaatctccatcaacatcaacctcctgtttacaatatcaacaagaacgatttcagagatgttgttcagaaactaaccggttcacctgcacatgaacggatctctgctccgccgcaacaaccgattcatcaccctaaacctcaacagagttcgcgtctacataggatccgtcctcctcctttggttcacgttatcaatcgtcctcctggtttgctaaatgacgcacttatccctcaaggttctcatcacatgaatcaaaactggactggcgttggatttaaccttcgaccaacggcgccgctttctcctctcccgccgttaccaccggttcacgcggcggcggaatcaccggtctcttcgtacatgcggtatctccagaactcgatgttcgcaatcgattcgaatcggaaagagttctctggattatctccgttagctcctttggtctcacctcgttggtaccaacaacaggaaaacgctccaccatcgcagcataacagttttccaccaccacatcctcctcctccttcctctgctgtttcgcagacggtgccgacatcgattccggcgcctccactgtttggatgttcaagttcgcctaaatctccgtacggattactctcaccgagcatacttttatcgccatcgtcaggtcaattagggttccctgtatctccgacgacggtgccgcttcctagccctaaatacaaaggtcattgatcagaaaatcggaaacccttgtcggtcaaagtgagaaaacgtcgtcgttttgaccgtcgcgacaaaattccctttgttctttttgtacatcattagtggagagtggtgggatcatttgtttttttttttgttaattaactcaaagattacttaaatccgtttttttttttactttcttttgttttcatggtttgttcatgttagaaacaaagaagactaggaaaaagaaaggaatacacttttgcaactctattcaatttttataagtttgccattatgatttcatctctttgtaaatcagattgcatacaagagttttttcttcatcgtctattcgatggggtattaaatttttgattggttgattagctataccaaacacttcactgttcctttggttgaattttatgctctgatgctttcattttaagttgaaacttcaaactctgacgagatcattaatttaaacctgtaaagtgtcaaatgactaacgagtgtctattgcttaaatagttcttttgaaatgtatttttatttttatataatcaaattgatgattgatttcagaccaggtaaagtaattggctttacgcagtccaataaactagtccgcttttaaaattaaaaattgataaacaatcaatctacgcaacaagataagagacaagagactttatgatcttcaaattgatgagaaaagaaagcaagtttcgattacacagacattgaaatcgataacaacaaagaaataagaaaagagaaaataaattaaaaagagataaaaagatgattgatggttcagacttgccacaaatatgatgaatgaataagcttttgaagatgagcgaaatggcaagagcgacctcttagatggattaagaaaaacatatggacgagaaagagaagaaattccaaaccctagaagaaaactagcagtttcactcaaaagatcactgctgttcctcggtcggttttggcgctgctgcttccttgatctcatccgcagcatcatcctaatataatccccaccgttacagaatttagtcaatggaatgcgaatcatccataacagaaacaaagaaagaacaaaggtgcggggattatatgaacaaacctgcatatcagatgtccagagagtgagattgtcacgaagaagctgcatgatcaaggtactgtctttgtatgactcttcaccaagagtgtccaactctgcaatcgcctcatcaaaggccttgacgatacataacaacaacaaaaccagtcaaatttatgtccaatgaggtcaagtgttaaaccaagtccaatcacattatcataattgaaagatgagtagattgaaatacctgtttggcgaggttacaggcacgatcaggagaattgaggatctcgtaatagaacacagagaagttcaatgcaagaccaagacgaattgggtgtgttggagcaagctctgcattagcaatatcctgcacagataattacacatagagactataagctcaaaacctagacaatctcaagatcttattcgagaatacacaaatccctaatttaagtctcattatactggaaatctaacaaaccaccatccacggatcacacactagactcaaataaactagatctgagattcggaatcaaacctgagcagatttgtaagcggcgagtgtatgttcggcggcgtctttcctctcttgaccagtcttaaactcagccaagtacctgtgataatctcccttcatcttaaggtaaaagaccttggaatcaccagaagcagcggcagggatgagtctagagtcaagcaacttaaggattccgtcgcagattccggagagttccgtctcgatcttagacctatattcacggatcgccgtgacgtggtcatcgttaccacggctctcttccttctgctcgatcgatgaaatgatacgccacgaggcacggcgagcaccaatcacattcttataagcgacggagagaagatttcgctcttctacggtgagttcatcgccatcaacggcggcggagactttctccataaactctaccatctcttcgtacctctccgcttgctccgcgagcttagccatgtatacgaactcttcacgcccagacgccattgttgtttctagagagaatcgatctaaggaagaagaatcaaagagggaaagatctgagatctgatcaaaaagagagaaacggtttcgattagagaatcgggtgttgtaggtcaagcgagagaggacgatgaatgagtttttgtgtttaatgagggaaagtgataaatgcgttttagaggaaaagagtgaaatttggaaccaagatctaatctgggccgttggatttgtggccggtcctgctttttaaagggggattttttttcacctcaaattaagaacaacataaatacacttttagaaaaattggtaatgtgattattggataaaatttggtcaattaacaaaataattggtaatgtgattttgctactattagtataggcaccttaaggaattataaaattttgggtctagtggttaaaataggggctagttttttgtagatttgttaatatagttatttactaattgtgaaaagaaattggagttgtgagattgatacaataatggaagcaagttgggttaacaaaaatggagacagctcagagggacacatgtgtgttgtgagcatgtcaggggatccaatggaccctttcttctccaactcagctttcacatttttgtgattgctcaaacggttttttttttcttctttcaaaatttaaatacttcggaggttgtctattcttcaaatcttcaaacattcaactaagtacgtaggcgattcttacgagctttttaaaatcattatgttcttaattatgtggttgtatttgtactgaagtaatttattaaaatactacaatatttgtttttcctttttccgttttgcttaatccaatgcttatccagttatcctaatccatgattatgttttttcctatcttactcctttttgttaatttgttttatttgcattagttttcttgatgattatgttttacattcaatgaaataataagattactctatacttttctagcataaatattaactatacaataacatgtattcattgaacgtatagtcatgatatatctaaagatcatacgttagaaaaaaccgtcatataaaaaaggcgaaaattcggatatgttcgaaaaagatttgtggttaatctagctatatagcgtacgcaagtagatcaaaagtttttgataagtattgagataactcctaattataattagtcatttagataatgatgatccttatctaattagctttcttatctctatgactatttatatacgattctctacttgtatagagaccaatcttcatgaaagtgttaatacaccagatgatttgctccgacgtgttgggtgtgggggagatagggacgagagcatgaatcgatgcgaaacgtaaggtttgaaccatatcgaagtgttcattccctaattgccatcccccttaaattttgggacattcaagaaatattaacagagataacattatctgagttcataacatggatttacgagtggtcgggtttgatcatacctagcagagatatggacgattgacaattgtgtgtttttgacggatgagacgtgacattaataacttatacgatgacacttatattaatgcatgttggtgcatgctcaagtcaacataaaataagaggtttggaagcccaacaattgagcatatgtgggatatctccgaggctcccctgccaataattttaattatcttcccttctttttcattcttaacttaaaaaaacttccgtctcgatgtgatctatgactatgatgagtctatcttgtaaatcatatgattcatattgataacttacggtataagttatgataataacaacaaacgcattatcttatttgtcgtcgactgtcgacaacaaaagatcttacaattttattataagtttctgacaattaactttaggataatattttatttatttttgttgaagtctttaggattatacataaaatacttctcaaataccaacgatcaagttactttaaacttcttccaacgaaacaatcattagttcattctcttatggaagccaatcaaatccctctaaagaataaaaccatgaactttgttactactaaaatgttttctgtacttagtttcgtttagtccttaagttgataaattttttttaccaatctttactatttggagtaatgcgattaaataaggtcgaatttcgatagatgaaccgttaacgatttgacgaagacacttttcctcagtgttatcttcgttcgttgacattagacaataatccagttttatcctattatttcagaagataacgaaaatatttcctttgtcactaagattccgaattctttaaatttaccataagtattaaaaacaatttatacgaggtcgaaatcaaccacatatgtagtagaagaaaccccacaacacgacattcgttaaatgtctctcatacttttccctttatataattgttttgcaataagtttttgatgtaatatgtttaaaaattcccaccacatatcaaatactgcagcgatagctcctctcacaaacacacaaacagagtcaaaagcagtgactctgttccaaaagcaaagcagcttcccaagaagatcaaatccgaaaatgtgcgatccaccttaatccctttttattattattattattgttattacatcacttcctataattccggtaaaagttttatttcccataaacttccaaaaatagttggttcctttttattgaagttatctcttcaaataattttattggttcttctgtcttatgaacaagaacagaggagctctgtcttgtttcctcttatttacgtactaccaatcctcatacacacacatgtgtctttggtttcatctccgaaaagtgataatctgttttatttgatttgacttttgagagaacagagcatatataaagaaacagagcagctctgttttttttttttgtgttgcagtttgtagaatcatggagaggtacgaaatagtgaaggatattgggtctggtaacttcggagtagcaaagcttgttcgtgacaaattttccaaagagcttttcgctgttaagttcatcgagcgaggccaaaaggtctctaactctcttgcacctaattcaagaaatttttgtttctatcacttttgtctgattttgtttatttgttgatgtttatgaagattgatgaacatgtacaaagagaaatcatgaaccataggtcgctgatccatcccaatataataagattcaaggaggtataatacaacaatgtcttctcttttgatgttactttatctatcaaattgataattgtgtgaaaacataggttttattgacggcaacacatttggcgttagtaatggaatacgccgccggaggagaactgttcggaagaatctgcagcgccggaagattcagtgaagacgaggtttaattttatcaattctgtcattattatctaaataaacatttgttttaaaaagagaaagaacctaaaagtcttgtaagaaacatttttcaggcaaggtttttctttcagcagcttatatcaggagttaattactgtcacagtcttgtaagaaacataacattctaacttaatcaaaaacgttttttttttcttttcttgtaaacaaaagaattaagagtgtttgtttttttttatgttggaaaatgaagcaaatatgccatagagatttaaagctagagaacacgttacttgatggaagcgaagcgccacgtgtaaagatttgcgactttggatattcaaaatcaggagttcttcattcgcaaccaaagacaacagtaggaacacctgcttacattgcacctgaagtgctctccacgaaagagtatgacggcaaaatcgctgatgtttggtcttgtggagtcactttgtatgttatgcttgttggtgcttatccttttgaagatccttctgatcctaaagattttcggaagacgatcggtcggattctcaaagctcagtatgctattcctgattatgttcgagtttcggatgaatgcagacatcttctctctcggatattcgttgccaaccctgaaaaggtaaacaatgttctctttcgatttcgacttttagatttttattctaattaagatttgattgtaacagagaataacaatagaggagataaagaatcattcttggtttctcaagaacttgccggtagagatgtatgaaggatcattgatgatgaatggtccatcgactcagacagtagaagagatagtgtggatcattgaagaagctcggaaacctatcaccgtagctactggactcgcaggtgctggtggctctggtggaagcagtaatggtgccattggaagtagcagtatggatctcgatgacttggacacagatttcgacgacatcgataccgctgatctcctttcccctttgtgaacaattgtatcaaaaaccaaagatttcatgtttctgaagcctgctgatactactacacattgatgatacacagacgtgaatataattgttcactaaaatgtataattagagtgtgaaaacatttgtctttgattacaaaaatgttctgttagacatttttatacatatgcatggaagatgtatatataaacagaaacataatatctagtcacgttatataacttctgaatgaatgatagttctgtgtgtcaaggtgaaacataattatttttctgcaatttgctagatacaacaacaacacaaataaagaaacattttaaacggaaaaaaaacataaattagtaggtgttaagtagactccaaacagtttgctcaacttgttcccatgattcagcagtccgaagttcgtcccaaatactgaatattgaacccaacacattttcttcatgtaatatacagtaacacctgaaaccaacaatcacagttacttaaacaacataaaaaaggctttaaggctattcttaaccatgtttacgacagtttactacttacattgtacggtaggatggagacaatactttcttcctcgtactgtctgctgtttttgttgttccgttctctgaagatctacttctgattaatggaagtccataattttctagaagcttcttaagaagatcagcgtctcctctaaagacgtccaagtatattggtatcaagtcgcagatgggatctcctgcaatttcctcaactctttcagaaatttcggcatttggattatgaatttgggagatatctcgtagataagacttacctatggttaaatcgctgaagtcaagaatatgactgggacgccatgagttgtgttgaccatcaactgaatcatctgcgtatggttccatgtgaatgttgtcatccattacgtctgagtgtatccaggtgcagggcttgatttcatctccaccatttgtctcctgtgataccagaaatagattatgttaattcgaatggtttctggaaaaaaagaagaagagaaagataagagaagcaaccttgaagacgtggagtaaatctacaaaaaagtcatcgggaatgtattcgtctatcttggtcatcagagcccgaggtatcggatttcccctgagaggttcaaacaaaacaattaccgtgagtaagcttttatcaagagcaaagcaaatggaaacaaagtcatatttcagaaatttcaaacttaccagttttccagacgactagtgacgtccttcttcttttggcacagagcatcgacaaaaactttccattctgctggaatgttcaactcctcatgaacagcattcacattcaacaactccggacgtgtgaccggtggatatggaagtagatgaaggttgcgtagttgttgtccgagaaagaaagccaggttctgagcgtcgttccaggttagatcatctcttctgcaacaacagtttcaaattagagatcatacatctggctttaaagatgagtcatgctaaataaaaaaagaggaaaagaaaactcacagttgggcaaaaatcttccctttgcatcttttggttataatatatggccaaacatgtgaactcaatgaaccaaaagaatcgggtgctggcttcccctggtttttatgttcacgtagcgttttattccaaataccaaatgggaattcgctgtttaacatggatgcatcaaaatcgaaactggagctagagataatatctgggattctcttgccatcccaagggacaactttgtaagatcctttttcgaagaaaagaatcccgcttgctagaacttcaggaatatgtgttttcaaaggagaatcagcccggccaagaatgtcataaaactcaagctgcagaaaagaagacatagagttacaatcataatgattgcacatattgctaaattattatataaagaaaacttgcctcagtaccaagaccgtacatagattgttctagccctccttcaacaaacagtttgatcgcatagtcagacaacagataaaccttacagcaaaaataagcgaagtcagagcaaatagatgaagtaattaggaatagtgaagaacttttctgcgacggtattctaaaagagacaataaactcacagggttgctgccagttccaactggaagcttttcatcttcggtaaccaacggcaagttgtggaaagtacatacttcctctaggcatcgcaaccatttctcagcatttaaagcaatgcatgctccctaacatggaaaccaaagcgaaagttctaagaattgatgattttgagagatacttataaagctataaacaaaagagtacagattcaaatagtaggattcaccttccatattagttctctcatctcaggcttcagaacccaaagcttggatagccaggctctcatttctcgttggcctacagagttccccattgaccatgggaaattgtaatgatctctttctttatcaagaaatgaagcgaggaaatcgatatcatatgaaaatccattcttccacatattatatctcttcgatactccattcacatcctcttcgcggttttcagtctctccacctccattcatccgtgtcctcttctctttcctggtaaggtctgaatagctcaaagtattatcttcttcatcgtgtgtttcttcttccaaatcttcagaattttcatcatcaagagcaagaagcccagcacggcaaactcctttgtgatggtaaccaggcgccatatccaagcacacgaacccaaagttttctttgttcacaaaattctgggtaacagccactgttggttcaagattaaggatacagtgccaccaaccacttggaacataaatcgtttcgccaggtagtagtgtgcactcaatcggtttgtcttcgtccgcaagaaggggataatagtctagccaccactgtacagggattgaaaacattaagagggatacagtaaagacgaatcaaaatggcagtgcttaaacagtttagcaatatacctgcagagatgagggtgtatcaatgctgacatcaccctcatcttcattgacatggactgtaacacctagaggcacttttccagggggatacaatgcccacctatttaaaacattatgacatcatcatcagaatgagaataatattgcaggaaaggaagaaaaattatttgtatttttgtccataaaggtgtctaccttttccgaccgcaaagcagggtgttccaggcgctggtaagagctgggtcaacatgccaagatgcaccagacctctccggaccaactataagccatctgtatggaggacgactttccttgtctaagatctcaaaccaatcttcttgaaacaaatggggcacactatagtctttcaataattctggagcagcttctccaaactacatgaaatgttgaatccttcaaatattctcaccacaaagtttcggtactactacaactctatcactgacgtgaatgaagtctaatataaatgacaaaactgtttctcgtaccttgtcatcgaaaacgtatagaggatcttcatcccgctgagttttcatatatgcgatgtaatccttgaacttcatggaaattttgttggggctcctctgagatattctaaacgggacttcaccatatttctctgagagttggtcgatagtccacgtattactggctggccaagaatcagcaaggccagaaagcaaaacctaaatcatagacaggaacaacatcacatatctgaaaatgttttaacagatcaaaatctcatgtactagcaaagattggaactttacaggtttcttggcgtcgtattccttagaaaactcatccaaggagatatttctcctacgttccacattcccattatcaaaagagaacccgtcaagagatgtattacacctatagaatcgtttatacaagtacaacgacatgaatcctgtaaaagcgcagagtaagtgagcaaaaaaaaaaaacgatcatatcataagagtatggaataaaccaagtatctaccatcaaaatgaaaacattttctgtatgcgtcattttcttgagtaactccttctctgtatatcagaaaaccaatcagtcattacaatttaaagataagcaaagcaaaagtcacatatctaaagacaatttgtatgtatcattgaacatggtaatttcaaagtacttacagatgcaatgttgtttttttccaagaacctttgtattcaagaggaccttttgctcttctgagacacaaactcatccacaatggttcttcattacatagaatatacatcacactgtacatcaaacatatacacataacagattaatcacaaacaatgcctcaacaaaatcctcatctgttcataataagaccaaaatcctgacttgctaagaattcgaattgatctagttagactctagttttgatcaattctttgatgttaattcgatcaataagttaatcttaggaagagaattatagaaaacctgctgacacaagcgaggtgagcaatatctcggggagcaaggtattcgagaagaacacagatggtctcatctggtagaacactgagactaccgagagcatctggtcggcgatctctttgtcctaacgtcgtcattggctataagcttcaatggaatttcgatttctctctctgcgatctgattgcttttttactacctggaattttgaaaactcaagctttttctccacgcggtggcgcgtgatgatccgagtcctcgtttcgtcaccgagtgcgcgtaaatgctttggcgcacgttgtacgcgttaacgatatcgaattaagttacggcgtcgtttcaacgatagaatctgataagaacctcgcgtttagcttacgcaaatcgtttctaaaaggataaaaagaggaaacgcaaaactcgggaacctcaataaataaaacgacgacgttctaaattatgggccttacgacgcagataactaaaacgacacgtagtctttcaattatgggccttaaggcggcaattttttttttttttttttgaaacgagccttatggcggctattatataatcacaaaccgacaagtattcttcctcctcatccaaaactataccaagaggttccaaagtatcactctctcttcttccactatcaattatgggacgatacactcaagttgagtgactcaacgttgcggaatccatcatcatcatcatcgtcatcgtcaaaaggatggaacaacatggcggttctagctcacagaaacctcacgcaatgtgcataccttatccagcacaaggccacatcaacccaatgctgaaactagccaagctcctccacgctagaggcttccacgtcactttcgtcaacaccgactacaaccaccgccgtatcctccaatcacgtggccctcacgctctcaacggtctcccctcgtttcgcttcgagactatccccgacggtcttccttggacagacgtcgacgctaagcaagacatgctcaagcttattgactccacaataaacaactgtttagctccattcaaagacctcatcctccggttaaactccggttctgatataccaccggttagctgtatcatctccgacgcttcaatgagcttcacaattgacgcagcggaggagcttaaaattccggtagttctcctctggaccaacagtgctactgctttaatcttgtatctccattaccaaaaactcatcgagaaagagataattcccctcaaaggtacgaatcgattgaagatcatcaactgaaaaattctcaattaacaatttcgaattccatcagattcgagtgacttgaagaagcatttagagacggagattgattggataccgtcgatgaagaagattaagcttaaggattttccagatttcgtcaccacgacgaatcctcaagatccgatgattagtttcatccttcatgtaaccggaagaatcaaaagagcttctgcgatcttcatcaacactttcgaaaaactcgagcataacgttctcttatctctgcgatctcttctccctcagatctactccgttggaccgttccagattctggagaatcgcgaaatcgataagaacagcgaaatcagaaagctaggattgaatctctgggaagaagagacggagtctttggattggctagatactaaagctgagaaagctgtgatttacgtcaacttcgggagtctaacggttttgactagtgagcagatcttagagttcgcttggggtttagcgaggagcgggaaagagtttctctgggtggtgagatctggtatggtcgacggagatgattcgattcttccggcggagtttttatcggagacgaagaatcgaggaatgttaattaaaggatggtgttctcaggagaaggtactttcgcatccggcgattggaggatttttgactcactgtggatggaattcgacgttggagagtttgtacgccggtgttccgatgatctgttggccattttttgctgatcagttgacgaatcgaaagttctgttgcgaggattgggggattgggatggagatcggcgaggaggtgaagagggagagagtggagacggtggttaaagagctcatggacggagagaagggaaagaggttaagagagaaggtggtggagtggcggcgcttggcggaagaagcttcggcgccaccgttgggatcatcgtacgtgaattttgaaacggtggttaataaagtccttacatgtcacacgattagatcgacctaattgggctttccgtatccaaataggcccattagaaaaggcctgtttgtttccactatcatttgggctggctttaatgacaattttaaaagatgtacttacaagttgcaataatctatagtgttcttctcacttggatcttataaattatgagtacatatccatattgaaactcccaagaaaaaaagtggatataaaggagaaaaaagatatatgaaaaagcttgaatacgaatcatgtagcaaaaaattgaaattattagaaataaaataaatgagtaaaaaagaatatgaatagctcaaatttttatatatattccgtcagaaaaagagcaaaatatgacaagagatttatcttgagccgtctttttaagtttgacagtgttgagtctgtcttcttggggctcaagtcattgctctggttgagaaataaatgaattagctgttttctttttttcagagagagagaggtaaaaatgtgaagattgtacaaattgggaaatgagagagagatcaagaagaaataggttctttggtgttgcttgttgtgatttcaggagcagtcgttgttgcttcgccttctgcagctggtacttgttgtggtactgcttcagattctggaggaaacaaaacaaaaaacatataaaatcagacaatatatagtgtattcctactaatgttgcaaattattctgatttaagtagatgaataatttatgcaatgatcaatatatgatcaatagtgtccaaaacgaatatgcaaatatagacacataaatatatcgttttgggtagaagttgtcagtgtatggtggcttcactggcatgacgattggcgaccaaattgacagatgatagaagagacacatataccaatgtaattgaaacagacagctcactccacatgctatcctttattcactgttctctccaatcattcactctccttttcttttccatttcaatcccttctttttttttttgcttagagtgcatcaaatatatgtttctttttcgagtttaagacagcaaaacggatagatcacgtgcatgaatgatcaatgcaatcacacgtggtgatgaacggtgtcgtttgaataagagggacaacaaatattatagagataaaacactgaactatgtaagttgttaggaattttaactcaaaactatttatattaagagatttgatgatttctgtctattgcattagattacattttattttagatgtgagatttctaaaaaacgtattttcgataaggtggttcttctagtcatcatgagatgatactttttggatcaagaacacactctatttggattaacaatctagggttatgatatcgtgatcaatgaatgcacttttttaaaaaatatatagaggttttgatatcatgttaagttatatgggtttctaaattaaaactaattagtatgagtagacaactagaaatatatccaaagaaatatgaaaaaaaaaaaggaatttattaagtacgtaccggtggaagaagatagtactccttggagaggaggggcaaaagaggaattggatgggtaaacgaggaaagaaggagaagaaaaccgttgatgatgatgttgttgaggattatatggttgaggaagatgatgatggtgttggtatggtactctaggagcttgaagagaatagccataatagtatggagaaggcatgatggttgctcctgatgatgatggtgatgttgctcctcctccataaagctgttgctgctgctgatagtattgtgcttgttgcaactgtgtgttgtacaatgcctgtggcaagtatatgatcatcatcatcatcatcatagtcgatgtctatgtttgcaacaaacatgcatgtgctagtgtttttcatgcattatgtaagtggtcgacatgtgcaagatatgttgtacgtaaaatctattattaatttcacatcttgcactcatgattaaatacgattttgctttatgttcatctttcgtatatgtgtatgtcagtgagagaaaaagggacttacttggtggtacccaaattgatcagggttataggtgtacctgaaaaaacgaaaaattgaatgattctctatcaagaaaaaaagtgtataattttacaaattccggttctacttattaaaatttaaaacatgttattaaaaaagaatagaaataagaacttccatctagtattacattcttgcacgttaatggtttctcaacttccgtatcggactataatgcattgcatgattttttatctacatgactacatattaatgttatcatatttacagcctgacagcaagtggctcaattgacgcattaaattgtctcctaccatatctatcgcaatggaccatctccttatgagaaaaatgcatttataaggattttagatttttagaaattttctaaaaatcgatatataagattttacccgtacgacggatacatgagctggggagctgcagccggtggcagtggtgcagccatcccggtataggttgatggtcctccactttggtactgactcggacttcctgtttgtcctcgacctatatagtaaacaaaaggattgaaaaagatagtacattgctaaacaaaacaaaacaaaattgtcgccgagtacattgctcatttaggtctcaaaaactagtaattcaacgatattaagaaaaatgtttgtattcctttgacccaaaaaaaaaaatgttcatattctcaaaattggatttgattggttatatttatgttgtacactacgcacataattaacaatgtacttattttaatcccaacgagtacaactaatctcgtttatgttatacacgatcaagtatctttagaaaagaaaaagacaattcttgataacgtaccaaaccattaatatatcgtgatcatatagaaactcatcaaataaactaatcctcccgacataaagaaagattttacggaattactcaagtataataaataaacctcgaggcggcgatggtcgaggccgtccaaaagatgcaatattacaattggcttttcttccgtcgatcaccggatttggatcagcgacggctctcgtggctgagtccgactcccgaaacgtcacctaaattaacgatcggagtaacccttaagcataccaaaagagataaaaacattgtgtgaattaagaaaatataacttacgaatccgtagcctttagacttgccggtgtttttatcggtgatgatgacggcttcaagaatctctccgaactgttcgaagtaacgacgcatttcgtcggtaggagtttcccacgctaatcctccgacgaacactttggtgtaagtcgtgtctccgaacggtgatcggtagtagcttgtttgagacattagttaaattaatatcacgattaacaaatatggcagtctccaatgatgatgatatatgtaacccaaaaacagataaaaattgaataaataaataattatggaaaattgtgtttgtctaaaacattagggaaacaaaaaaaaaagagagaattgggatggacaaagttggctgatctttatatcatcaaaggttgtttttggttgggcaaagagaagagagaccaatcaaaaggttgcaaattgcaacccttgaaacggtgtcgttcttgtcttcgaccctacacatatgaagagaagagagaagagggaagagagaagatagagaataagatagttttgggacattttagaattgagattggagggttttgtaacaaggaaacggagagagagagagagagtgtgacaaggcagcacttgagtatgtcttcgctgtctaatttgccaggttttaacattatagctcctccacaactttttattcagaaatcttctttttaattataacgacgttcttctgatgtatatatatttaatatttttatgtaatatgcagatttaattctttcttaactatatatcttaaatactaaaggtacataatttaccagatgtcacgtagtttttgttatttttgaattagtataaccaacggtagattttgaaaatactcatttttggatgttattagaaacaaacttataatgttaatactgattcttacattcttcaatcaaagattggagaataatgtatgctataatgtgtcattattagaaagttattgaatattttgatgtttctaattgtgtagaatttttaggggtgatttaaggaaaaatatcttaaatccttgtagtaagtagtatttaataatatgcagattttgtcaaaactacagttgtttgataagttctatattttgttttatcatttcccatgttcacttttgagttggtctcttgttctcttcctcctgcttgtctctgtaggtttcgtgtgatacatatagaccaataatagttatatttcttttcacatgaaattaatatatacttttctatattagtttagaagcatatgtatatttttttgtattgaataatggaacttattccctattctcacatgctaacatgtacttaaccttcctttaatcattagcttactggaaagctagctatgaacggacgaaaaaagaacagtctggattttagaattacattcttttagttatctctattttcaatacagttataattctaaatttaaatatttattttagaataattattggcataatttcgtgatcccataatctgatttgggtatattatcataaagaaggacatgtatagctaactgacaacccgatcttcatattataaaaaataattaatatatatatgcactcaatcatattgttaaaacgatgtaaagtgtgtgtgtgtcaaatatcaaatatttatttaatgattaagccaaacagattttgtgatgagttttcatgattagtggaagtccattattcttcctaccaaaccatataggaaaataaatcaaaataatattgagtattgacgaagaggctcttgactttcggatagatccctttaaagatttctcatccttcatattttacaactctgaaacgataattatagtgatcatgtagtcatgttgaatcagccataatatttagtgtctagtgcaatattattaaatacatggtccttactccttacttattaataaaatgttttatatgtatggtttcaagccacgatagttggtgtataatccaaatttaacattcttagattataggagacgactctatctaaattaatattctctctacatgcaccctatataaactctcttaacattattaatttaaaatttaaaagtacaaatgtgaaatgtttgaccattgagttatctattttgtttgttttagtgatctaaaccttgtcgttaccatgttcgtcacacaatgaaattgctaaaagaatcatcatctgtccacgaattatttatctagaaattaacgatttcgattaacatattgacttatctaactattttgtactccaaagtagtaccattatgtacatatatatatatatatatatatatatatatatatattaatgtgtccttgccgtgcatatgtatgtgtgtctagttgcatattaagatgaaaggaatatatatacatgtaacatgttgtaaaagattacatgagatgagcttattgcaaagcagctttcatagacgcacgaccatccttattcctcatcattattttaaatccccttttccacttttctttttctcactatgcccaaccctgtataagttgtattttatgcataaagattacacaaactcaatatttataagtgtaattgtttcttatttacaaacaaaaagacattaaaaagagaaactgtagaaagaaaggcttgaaaaggctttataaactatttatgaaaaacaagctagtaatatattgtttaaatgttttaacaaatatatatatatatatatatatatgtaccaacaattatccatgcctgcttattcaaatatcgtccaagaagacaaataatttttttttggcatttgaagtccaagatatatatttgatatatccatttaaaactttgttttaaacccaaagaaaactgtttcttagctatacttaaacaaataagcccaaacaaccaacaatgcttaatcaaatagacttttgaaagtctttgaatattttttcaaaatgcaaattaaatattgttgttttgagatagtttttagtttgattaagaaaacgaaatatggagacaagtaaagcaaagtaggggccaggaaacgtggcaaagagaagagacagttggaagcaagtttagagaggagaaagagagagagagctgtaactgtaagaagaaaattgggaaatccgaaattccaatgaactgtctcaacttcttccacgtggacttcctgtgatgcttagctgctttcaaatattttgttgtctcaatacaataacgtcatcgatgaattaaactttttattacgacaataattgctttcgaccttttaggcaaattgagaattccaactggtcttaatcggcttataaaccacaaaactgcaacgttttgacatattttcagttttctttgattgaacattttccatttcaaaaccaaattcgcaaacaatcaagattcaaaactaaaaaaagaaaaaaaacactttgaaggatatataaaaaataaggttcgaattatggtatctggggtggtggcgcagttggctagcgcgtaggtctcatagctactgagtgatcctgaggtcgagagttcgagcctctctcaccccatttcgttttgtgtgttgaaacaaaaatgtttaccttcttattggagggagcccgtatctacacaatgggcccaaattattgactttttcttcgttaattgaagccaatttattaatttttcgaaattgggccactaagaagcccaccaggtccgaaggctttttttcttcataaatgaggaaatggctcatccggtcatgtcatggtcatcaatgcgtcacaacgcaattatgcaattattcgagagagataacaattaatgatcaaaaaagattaaagcatgaggatattggcacccatctatatcacttgtaaactcgacatatacatatcactcaacgatatgtctcattagtcattatctctttcttcaatactctcacatgttccctaagttttcattcgtataaatttgtccctacaaacaactacacatttaaagaaacaaccgtcacacccaaatcggttaaaaattcattcgccgatatatctatctatccaaaaacaaactattttttattcaatacaatcgttttaattaaaatctttcaattcgactcactcaaaaatttcatcttgagtgttaaagaagaaccattaatgatcggatagtgtagttagaaaggggtttgtaagttataagagatccacatgaggaacttaagagcgggtgatatattgtgatatatgacaatgccttttataatattttgacgtgaaataaagagagaagaggagccccaccaatgttaaaagaagtcacatggaatttctacgttaactaattaaatttactattcatttcataattattcctttgagaattttgcaaaagcccctttttctttgatatagtatggtccatcacattctctccaattgatcatttatgatttgtgcctttccatcgttttcctacgataatacttttctcaaagttaattctatgacttatggcagatcatattactttgtcgtctaaagcagtttctattttcgttttacaaacatgttttggaatttgtttaacttttgaaaactttatcatagtactttatgaaactaatgtcgatgtaattaccaaattagtggaatgacggaaaaactagtgttcgggtttattattattacgatttcaatcatagctacgcaggtcatctttggcgttttgagtgacaagagtcaagacacaagtctagtcttaaaatggatttatatttttaatttcaatgcaatgcggttctatatatctagtttgacaaaaaaaaaataaaaaaaaaataaaaaaaataaattcaacatgaggggacaaaagatggatagctatcaacttctggaaaacgaaatgtcgacttggaattacaaaacttggattcgagtggataataatgaagcctttgttctggccgctgtagattctaatcttattctatacatcgaatagttttactaatgataagtctgatcttgtcgccactaataaaataaataaaaaaattcttttccaatgaaatatctcgacggtaatgtgtttatttaatttgctgcgttttttacatatttgatttttgtgtgaaattctctcatgaatgaaacatgtacagtattgatggtaagtgcggaattccacttatttaacatatcgtaacagaaattttgatgtataacccccctatatatagtataatatagagagtggtggatttggtagctcttaagaccaagttagttgaggaaattaggtgcaaggttctatcaaagatgtttacatatattaagaaatgcgaaattccttttgttccatgcaattgggagtttttttttttgtttgctgatatccaatattcatatgtatatttttttggatttacagaacatagattgaagtacccgaaccttatcaatcttaatatatcatattaaaaatataaaaagaatccctcactgtctttgagtaaacattttcatttttttcacttcacatttttttttttttttttttttttttttacacttcactttgttaatatgtctgggcttggactacgcgtgatggactcatgagtttggaagtgcgttgtcatgcaatgatttctataatcatattgatacagtgtgggtttgtgttgataacaaaaacggattttcttgctgtaaattaagaaaaataaaagaccgagggggctttcatatgaacatcagaacatgtatctttttacgaggtattgtcacgtaataataaacctgggacatgcatgtaattgtcataactcggaaaagtgatggaagccaagacaaaatgacccataccatattgtcgtctagatctaccgtcacacacaagacgaatatctatgtaattatgtatattatatagtacacaagaactagttcgtataaatatctcgtactgcaaaaaggtaaaagcagttactaagagacgtatgtctctagtcatgtacgatatcttcttgtaatgatttttgtttttggcttataaacaaaatgtcattaatcagtttaagtatatatcattggtacagtaaaatttataagataaacaaaaacgcgttaaaagcaccatttttatgcttacgtttgtgatttagtccattgacgagtaaagaaaagttcatctgaaaaatgccgacagatattatataataatggaggaaaaaccaaaataaacaagagtataatataacgacaaaattcgaaaactttttgaaaaaaaaatacacaaaataagaaaaagtttcgtataatttattcggacagcttatatgaattggcaatatacataacgtagtgaaatcgtttgacttttgtcccagctacggttttagacttctagttacgaattatgatcgccttttgttggtacttcaatatcaaaagcatacaaatattgaaccaggtccacttgtgctataataaaacaaaattacttggtgttaaaatgtaggaaatacagtgctgctaatatcgagtaagaaagagcgtagtgaggttaggaaatagggcactgacattaatggaaagacaacgactccacattatttacctataaataagttctagatccactgtatatcgaattacaactaattaattataaattgtttcaagtcaaatgttgggttgagatccacgacacatggttatgtaatgtggaacaatttgacttatcgtttgtcattggtcttaataagagcagataatcaactaccaaattgcttagtgtgaaacagaactatctatattcttaattgttccatccgtattttatcatttatcttgtggtaatttttagtggtaattcatttatttatgtaattactaaaaaaagtcaacgaaatttggaggggatgcacacgagtagagagtagttgtaaattattattaactgtgattagtattattactcacaaatcacaattaataatactatattctaatcacagttaataataatttaaatatatatatatacttattatatatatatatatatattttttttttaaagaagtaaattttaattaagaaaaaactatattctatatatactcttttacgcaaaaccgtacaaaattagaatattgcgggtaaagggcaattatattctccgttaaaatccaaaaatgtataactaactaatcgagtaacatctttgaccaaaaaaaacttacacagtaaaatctggaccagaaaaagtctttttcgttactactattattttaaactcaatatatgattttcattcaattgcaaattattaggcttatgaacctcaacagtggactgtagaaaagtcgatgtaacgtaagagatgatggaatggaaggttgtgaaaaagtaactttatatgcttatcttttgtacataacttttgtatttgtaacgttcggaccgttttgtctctaatatatatatatttgttttattctctgagttgtcatctgtacatctcttcatctaattacatcttcataaaacttcacaaaattattctgcaaattagtaacaaagatattttttaatacacactatatctaaaaactatgaaagaggttttccttcatgtaatacacctttttaaaaaaaaattggtttattatgcatatatagtagacaacggtttactaaaacttcaaactatgtcggtgtctgtcctcataaattttctaagcacagaaaaataagtcgcatgtgacgacttgaatcaaaaataatctttaatttcttcctttgttagaaaggaatagacttcatagaaaataagattcagtaacaattatcttgccggtggaccggtggttaaatgtagctctaaatcaatcagcaccacacatttttttcctaattttgatagctatgattttcattgttgggtttgttcagtctcactctttttcctcaacaatgaatcacctttttacgacccattgtctatttttgattgctgttttacaatatcaaacgtcggcataatgatatatatatgtaacgttatctatacagtcagcttagattaatcacctatccaacgtccctgttccattctttgacctatggacaaaagtgtacatgtagattccaaaattaaattttctatcacacgatcatcacgtgttttagaaccagaaatccaaatcccaaatgtgtgtctgtataccatacactcaaaacaaaattccgattagaataaagaaaacctaaaagatactttgagaataaaaactgcaaatcattttcatgtatcgcacgtcgaatgaaaatcatatagtcatataagtaaatgcattttaactaccattttgattttttttttttttgtgtgcataaatataaattgaatgttatgatttttttgaaaatgtgaaatagtaaaaagcacatgtgatccaaaaattaacacgatccgtgaagttttctttgtcacggtccgccacacacaagaactcgaataccgtgcacttaacttacttatccacgttttactattatccttttacccaaacatcctccgtttcgatgtaagaaagtaacggtctatcggatgtacgagtgtagacagtcagacaccgtcacatatgccacgtcagaactatggagccaccgacatgtaaccgcgtttcaaaatgggacccactttccccgttttatcttaccttttttccttcaaagtatgttgttatttatatggagctgatccaataaattctattcagacattagaatgcaaaaacgaattgttattttggaatcttgaaataatcaccaatcatattttaaggacatatacctgtatctgtatgtgtgtgtttacaaataaatacgtacacactacgatggcataggatgcggctatgagagccgacgattgtgtaattaattaacttctgatttttttggctgattaattaagaaacctacttgtttattttgcatttatttagctaaaagtggttatatatatcggtgtaacccgtttgaataaactaccagttcagttttgaatgatgacatatatgacattttacgcaaaaataccacggtattattagttttgtttaagtttgaagttttataggttaactgtatgtttcgttatctcttcgtttgtttgttttgtgattaatcatacatttcccaaaacacaatatattataaatgctgaatggtaccttgtgtctgtttgcatattggaaatttctggagcaacctgatcccttctctatcaaagaatttaattgataattaatcgttggcgatagcacttttacaaacattttccctttacttgtcaaaaataattatcaagcagaaaaaaaggaaataatgaatcaatttcgagaatcattgaaacagatagtaacaatgttttggagttgttttgtttttaatttctcttcaaagtgaaggctaaggacaaacgctatgcggaatagttttctattgcgtatatatagtcgataataacaatataacatggctaattttgtgttacatcaatcatccaatcttcatatattgtggcttattctatattacattattacaataacatatattttacgtggcttttatgttcgtacgttgtttttatgtgatgatgctatgtcaaatcatccgtagtatcttttttatttgatgagtacaaacatataaaacaaaattgcaaatatttcaccaccctcttacactttatatatttaggtacatgcagatttataaatccactaaataaatatgcatgagctgtgaaacaaaacaactcagtgactcactcgacttatatcatacggaatataagaaaaaatcaaatgaaatttaccaaatttaccataaaatacagattttgaagatcaaataaaagtagaaaatcttatcgtgagtgggatatttaaaagtacaaaatttgcctcgtattgacacaattttaaccttatcgtggttggcgtgtacaagtgggcaactggtctcctaataatgcgtttggtaataaatgatcgtgattcttagaaatatctttttcgcaaaaacattagtctatggataagaagataaattaaccaaatcgatgagtgtaaaaaaaacaaaaccaaatcgaggacatttgtgaagaaactcgtcttattccaattaggggacgatcactcgttttcttgcgagaggaacttggcctaaaccgaccatttttttctcatggaatttgatcatgtgttttttgtcctcctttaaacagttcaaaatttgatgaataaactacaaagtcaacatttttacacattcagatctgcatccaaaacacccatattgtaccttctatattcatgattcttttggtcataatcatgatgttttgtttccactaaactttatgatgtttatataaattccattgacgctataaaacaagctcgatacatctaccttaaaaaagatcattaacttttctacataaaaaaaaaacagtccccgtaaaaaaaaatcatttactatcgacaaaataacctttaggaaatctcatgtttgacctaacacattttttcaaccggttcattaattctataaatgtcaaaatactattattgaacatcttctaatatttttggtcaactactactataaagcatcttctaatttttcagtcgaccaattagtgaacttaattaaaagaaataaatgtttgtttttatgcaccgccaagatttcatatatttttttatgggaagaagaaagagacagaaagagaggtaaaaaacattaaaaagtagaaagaaaacagagcgtgaagttaatacgattatagtactagtaattagcagtagatagtactaattagacatgtacccatgggaagcttctcttcgttctccccccttaaatacgcttaggcatctcaactaatttactctctttcttttgtttatataccaaagccaacggaagtgtttcttaattcattttttgtttgttttggtttaaataattcagtgtctcacgagctgtgtcgagattggatccatacaaaatctgcacgacgcctgcttcttcactctctcccactgttccagcttcaactctcttgatatacagagagagatagagataaagagagagagagtgagagtgatagctctcggagaaattgaagaagacacaatctgattagtattctccaatattccatcaactttttgctgagggaaatctccagatttataatcgtttgtatatatatatatacagagcagcgtagaaaagtacgatttttgcttcttttcctcactcttattcatcttcttgattttgattcgatttggtgtttattcgcttgattaatttaagggttgttggggttttttgtccaatttttctgggttttcgttcgatttcgatttccacgagtttaccaatttcgtctctcctcagaatttgtggatctgcttatgtaaaaattgagtctttttacttgttttgttcgaatttgtttacaaacgcgtgatctcgagtttcagagatctcaaagcttaaatttttataatctgatggacttgttttttatttacagggatcttagatttatagcagcaacaaaaaaatgtcaatgccactacaacgtggcatctctggagtacgagtttctgatagcagtgatgatttgagagactctcaaatgaaagacaaaactgaaagagctcgttctactgagaacaacaacttaaccttaaggtttccttttggtttcctctttagtaatcaatcttcttccaaacacggtggtggtggcgaaaacggtttttctgctgatccatatagtgcaagaagcaggcatagattgatgttgttgtttctcaagatcagtttggttcttattgtggttattgctcttgctggttctttctggtggactatttccatttcgacttcttccagaggtcatgtatatcacaattataggaggttacaggagcagcttgtttcagacttatgggatattggggagatttctcttggtcctaataggtggaaggagcttgaatattgtaatatagaatctgagaattttgtcccttgctttaatgtttctgagaatcttgctctgggttactccaatggtgatgaaaatgatcggttttgtgggcctggatcaaagcaagaatgtttagagttgccaccggtgaaatatcgagtccctcttaggtggccgactggtaaagatataatctggcattctaatgttaagattactgctcaagaagttgtgtcttctggtagcataaccaagaggtgatgaatcgttgcttctctcttgctaaagttgactggttccattgctaatgatgcatttttttccaggatgatgatgatggaagatgatcagatatctttcaggtcagcatctcctatgtctgatgaggttgaagactattcccatcagatcgctgaaatgatcgggattaagaaggataacttcatagaagctggtgtaagtcacacacacattcgaaagagtcaatctttatctatctcattagttcagtttcttatttgctattttccttttaatactgtttcaggtgagaactatcttggatattggatgtggttatggtagctttggggcacatctattgtccaaacagattttaactatgtgcatagcaaactacgaagcttcgggtagccaagttcagctaacactcgaaaggggtcttcctgcaatgattggctcttttatatcaaagcaattgccatatccttctctttcctttgatatgttgcattgcttaagatgtggcattgattgggaccagaaaggtaacagtttaatgacaccccagaatgatttttttcatgtccttaacccgatggaagatccaactttactgtttcaatctgctgtgtagatgggcttctccttgtagaaattgacagggttctcaagcccggtggttactttgtatggacatctccgctcacaaaccctcgtaacaaggatcatcttaaaagatggaactttgttcatgattttgctgaaagcatctgttggactcttttaaatcagcaagatgagacagttgtctggaaaaagactatcaacaccaaatgttatagttcccggtcagtgattcacacacaccactgttgtattacagaatctgcatatggatacatttatggttatttatcaagtcctctaaaaatggatgctttgcctataaacaggaaacctggagtgggcccttctgtgtgtaccaaagggcacgatgttgagtctccttattacaggccgcttcagatgtgtataggtggaacacgtagccggaggtggattcccattgaaggcaggacaagatggcctagccggtctaacatgaacaagactgaactttcattatatggttagtctccgtagtaacaaattgcttctgaatccatatgtctgcagtttttgttatctcattttgattcctggggttggtttaggtcttcaccccgaggtgcttggagaggatgctgagaactggaagataacagtgagagaatactggtctctcttgtctcctctgatattctctgatcatccaaaaagacccggcgatgaagatccatcaccgccttataacatgctcagaaacgtactggatatgaatgctcaattcggtggtctcaattccgccttgttggaagcaagaaaatcagtctgggtcatgaatgtggtccctacagctggacctaaccacctccccatgatacttgaccgtggctttgtcggagttttgcacaactggtcagttcaaaagccttattggattttcattttagccatagaagtgtttctgaacatctctttttcttcaggtgtgaaccattcccgacttacccgagaacatatgacctggtacatgcagacaatctcttgtcgcttcagacaagtcagccccgaaaaacatgtctacttattgatatattcacagagattgaccgattgcttcgtccagaggtacacatttgtttactttgtaaagaacattattgtttcttgtattctggtagctataataaacaaaactttgtacagggatgggtgataatccgtgacacggcacagctggtggaaaaggcgagagagacgataacgcagttgaagtgggaagctcgagtaatagaggttgaaagcagcagtgaacaaagacttctcatctgccaaaaaccattcaccaagcgacaatcaatctgaagaagaagaagaacatagacacaggtttttctccacttttttaatttttttgttccaatgcctcacattttggaatcaaatcatccaacttgtgttggcgatacggggaagaaaggaggaagagatgaaatatatatcccgccggggacgtaagaccgccggtgaaatttctttatctggttccgtgagttcccattttacagaatctagattttttttttctttacaactttggttctataacaactcttattatacagcgaaaaaagaatatgattcaatatttgtgaagatgtttatgaaataagttcaaagctttttagtaaattttcactgagtttctctgtttgttcaccgaatccgagatacttacccaacattgtaccgtaccggaattaacccgagattagttacgattctttttgaaattgattatatgaaaaatctccaaaattgagttaaaccggaaagtgttattcggttttacatgtttccgagaaccggatcaactaaaaagtaaaaagacagtaaaccagaattgaaaccgaaccggaaacataagcgttagaaaagatgctgaattataaaatcaaagaatggagatggctttgcaatttgcattggccaattcatgagattcaaacaaaaagaacaattcaatgtgatggcgtccctgcagctgaagtttttcttagttgacgttggcttctgtttttggatccacgtccttttgcaatgtggcctcggtggtgaacgctaggggaggctgatccaacaacactcttggtggatgttcttttgcgcctgtggtgcaaagaatctccaccaccaaacgcagctctcgctacactatctttgagaacttccctggctcgttgtggcttaatgagctgcttgttatggtaaactagcttagggagaaggctggaaacggtcttgcgtagctggtcctcgcctacattgttctggatcgggtttccgaggatgttcaaagcaacgagagagttgtagttggctacaagctggcctattgctttggtggtggcgatcttgttgaaactaagatcaagaacaataagtttcagcaatctgtgtaagccttctacattgctgatcttgttcccagctaggtatagttctttgatcagtgtacagtttgataaacctgataaatagcttttgattaagacagggaaacaaacaagcattgtatgttttctacttaatgactgcaatcttaccttgtccaatgcgagaaattcggttgtaacttagatcgagtactcttaggcgtgtcaaatctcttagtccttcgataacactgatcttgttcttggaaaggttcaacgcgtggaggcccttaggaagcgatgcaggagtaatttgaactgcagtaaacagaacaatgtccagtaagcaacacacactttagaaaacagaacaatgtgtagtatccaagagtgtgtacctatgaagttgtttgatagatcaatcgacttgaggctggtaaaatgtgagatgctcgggatagctttcaagccgatgctcgagatgtgagccacgctcgatgatttgctcagcgattgaataaggctatttgcgtgcactatagcctctgagacgtttccggactgaaccacatttcctaagggtgatctctcagtattaggagaggttgggaagatggccaagacatccttatcctcgttcactggaaccacggtttcgacatccagtcctcttacccactcgtccactcgcttcattgacgaggactcggcagagaacgcgacccactgattatgatgaggccacaagtttgatgactggttggtgaaatcagcgcaatagtttgtagattcttcttcatggctggattggttgtgctcagcaaagtcagaggtgtatccagactgctggttcttgtttaaaggctgtgactttagcgagacacggtgtttgtgaaggttcctatggctccataggaacaacttccaccagagccgccggctcccagagggaagtatctgcatcgacgaatgtttcttgagcatcactctatctgcacttctatgagacctcactgattcattactaactggaacggtctctttcaggtcatggagatcagaaccatggaaccggccattaaacttgctgagagtggagcaagatcgtttaagcttaggagacgtcacccaagccgtagttttgcctaatccaggatcactgacgtgacctccttcatcctcgtcattgtcatcgccgttttcagaagtatctgtgacttcctccttgcttttcacagattcaacggctcgttcgtgaacgtggaatttagaaaactcacggttcgttgaatccttatcgtcacgttcatcttcgccgtcatatgactcgtgcttgataggactgtccttgttgttaggctcatcattctccaaaggcttcactggctcttcaagtctgatctgaagtattctctgcgttttctgaggtttttgtattcg

SEQ ID NO: 1020 - DNA, 90149 bp, Arabidopsis thaliana
gaattcctcacctgtttgtatggagaagttatgcaccgccttaacatctgaaccattagaattgggaggtcgcatattagcactcgcgctccctgtttgatcaggcataaatggttgaggaacagtctcgtttctataaccaggttccatggaatgctgaaaaagctgttgatgtctagctttatccatcacaaaacaaaacagcccttcaaattactctaattcaaacacatgtatgacgaatctaaccaaaactagtactccttcaagatgctggtgatgccgttaaacattaagctgcaatgaaaagtataaggatattagttttaagtcccatggcaagaacaaaagatgacaacgcagcgaaacgcagacatcgaaaggaaaagggaaaatttcacatgcttcgatttcttcagatagcggaatctcttatgtgaatgatcgtgagcataaaattctcagcgagaattggattcaaactaacccaaccatttttcaactaatccaaaaataccaaatacactcaattaaaagctaccaacagcacaaaaaacccaaaaccctaaataagcagccgatacaacgattccgtcattttagaatgtaaaatcaaaatcaatgatcttaaagcttcaggaaattctaacgactcaaaataagatacaacagtgaaacattcttcccaaacctttagcgagtaagcttacgaagaattgatcgaaccactggaagatatcgtctcttagctgatggttgatcagtacacagccaaggaagaacagattaccaaaaaataaaaccctaaatctttttttttgccctcaattttctctcgttttccaggcctgcctttctgagagcttactaaaattttggaaaatctttcaatcacaattaaataataataataaaatgcaattttgtcggctagctaaagaacaaaaaaaaaaaaaactcaagaagcgtataaatatatatagtttaattaacaaaaggagaaaatccaaatctggtcaaaatgattgaaatttcgaaaagtagcctcaaaagtttcagaaattactcttttgttcatattgttgaccttagccaagatgcctagattcgttatgcggtgatcagctcagtgtttcagtcacatgttacgcagtgagaacgacatcaaccgttgattttgagagaatggcctaataggtgagacttgaacggtcgagatagattcttatatttgtgaaaaaaagattgagtgggcatgtgaatagagatatgatatatatatatatctcccaattcaccggatcttaatgaatattaacagaaccggtgttaataatgaataagaaagaacatgtcgatgatttcaaaatcgttatcataagaggttgactttttgataccttaaaacacaataacaaaagtaacatattcagatatatatcctgcttaactctttttttttttttttcgttcagaggtaaatttctcaagtggcttcttaatgtattaaaagaaaacagtgctttgttttttaactcttgagggaactaatcacgtacctgatacagttagctaggaggggaaaacaaaacagttgattaagaaatgattggcaactagctagtctagaattcttggagtagatgactttgatgagtttgttgactgactaaaattaatgaagataatgtatcttatgatatactagcaaatctaaatctttcacataaacagattgtttatgtagttgtaaaaaatagtagatgtttacatatataatataaagaaaaacatattcgttcataatcgaagatcgttcaatttttatgtttttgtcaatcaaacaatttaaaacctccaaaaaatgcatctgctggaagtaaacatagttcttggtcaagaaaaaacgaaggtgttaataaactctagatgactagatggtggtatgttgtttgttttgtggtcaaggctgcaacttcaaaagccccaacgccaatggggcggcaatgattggccccacaatatgtaaaacaaactatggtcggtacttttggatatcgaaaaagtttatatacagaagaagtctttcgttgaatatacaaatgtttgtttccccgacctcaagccaggatgacattgacataccacgatttattgtacatgaactcgattgtaatggaattttcaagaaaatataactattacaagtgttttgaagtttatggattggtataagagtaataaataagtatagcaagcaagataacttccattgttatataatttgatcttgctttctttccaagtgaactgtttggaccagctaaatacggtatagactatacaaacgtgaaacgtacatgctcaccgtcaataaatttataatcgcttgttttgtcaacgcaaaccgtcaggacatttatatacacaatttaaatgtcaaaaatattttccattttttctcttttgctgttccttatctttgacatcacatctccttatatatagttgtatatattgatgataatttgacagggaaataatattgatgaaaacaaaacgacgtcgttcatttggaagaattataatggtttagcgaagacgttaatttttttggaaacggtcgagagaaggaaattggcgctcttttcttctatctccttatgagtcccaccaaaacatcgccaccatgttatttctgtagcatggtttcgaggttaacctcaaacttctcttctcattcaatcattaagtacgtaaatgtgtgtgggatgattttaatctatacatggacatcaatctatatttcgagtttggatcaacgatgctttccacgccgaccaatcgatgctttccgctccgatatcaatctaactcttacggatcatgttgcagagatgatcatcatcggcttttcacgtcttcaatgtctactaattggatcatcatcgaattagagagttttggttttatttcactcaaagaagaaagaattagaagaagctgcgtgagagcgttttttttttttaatctagaaagcaaaagtgttaattaggtctaatcccaatcgatggatccatgttgtatagagagattacaataaagccgttggagtcggttatatttctttattttaagacaaaaagattcaatagaaaaaacgaaatttcattttctttcaattgggctttaattatgaaaccaaagttatactagttgcttcttcttctactttaaagtgtgtgattcttcttctatctttttaatcaaaagtatttctttttctatcgtccaccacattattctatggcatcttctaggcatgaatatttattttcacttattcgaaatccagattaattatgttcgcttcagatcggtttatctgaattgaacactagtttgtgagattttgctgaacaaaaattatattctgaagtgcaaaatgatggtggaaacgaaattgaaccttcaagcacctttgtgatgatgaggtattagtcttcggagaaacagaacagaatatcgtaaatgtaagacagaattataaaaaacaaaaaaacaaacagattcctcgaactgtgagttggttgctgtgtcaagttcgcacagctaaaaaagagagagaataaaatcgaaaaacatgagattcaacaaatccgattgatctactttgggaacttgagaagattagcgtcgtttcccaagtagtgaaacggaaacctttgattaactggagatgaagaagaaccaccattgttgttacccaaatgatcagcctgatcgttattatcgttgttactcaagtcaccaaaacattttgcttgatggttctgcacttgctgctgctgttgctgattcatgttgcctgtagtgagaagcttgtccagaaacgaccagtctccaccatagttgttgttagaagtcaacctcagtagattctgtgaacattcaatgtccgtagtgttgattggcgacacaaatggttgggctgatgctgctgcggcagccgccgctgcagctgagtcagggctaaagagctgaggtagatgcattgagccatggctcagagtgtttgcaaactcatgtaatggcatgtggatttgtcgtccaatgtgatgatggtggtgatgatgatccagaggatgtaggatcaaaggagaatgattgtttgaattggagtcaatgtgatgatggtgatcatgatcattgttggtgcttatgtattggtgatgatgatgatgatcttgctcttgttcttggtgaaatcctctgaaatgattcttcttcttgaacactctgcatacaacccacccatcttcctgcaaattacacattaatgataaatccactttaagcattatgattagagatttcgagagttaaacattaattgtgatatgttgtacctgaatttcgttttcgctatcgtccaagcgatattcgtgcatgatccattcggttttttggccatgaggagcacgaccagtgtagaagacaagagtcttacgaagtccaatcttcttggagctgttgagatgtatggatttgtctctaccagtagctttccagaacccggctgctgtcgcccggttcgttcgggtcccagtcggatatttcttgtccttgtggctaaagaaataccactcgttttgaggacccgacccgattctgcatttctctacatacacacaacaacaaaatttgttataaatataattgaaaaaatacaattgttaattatagtcttaagtatatatatatatatatttaaacacacatttcaaataaatatatttacggcttacggcgatgggttgttatatgtcttcattgtgaaaaaccattgacttattttgagggtagtacaaaataatattacaaaatatacattcgtagtcatatactacaagacattacactttggtcttctgtacataagtgaatagacaacttgtctctttcttggtgtataacgcgcacacacacgtataaggtttcatgtttccataaaaactggaaaataatttatcagcatatatgagaagaactgttcaaacttaaaaagacacaagtagatgcatgtttccatagagatcacagacaaactccctagacaatattaccacaatctatgtatataattgtcctttgacatctaacttgtaatcttgtgcaggccaacgacataattccccagattttatctaatcttacagcactcgctctatatataattaaaatctatatgacgttgattgtgatagtctatatactaatatactgatcaagaaataattaatagtcattcattaaatgtgtggattaggtgatggtaattatagttaaagaagagttaactataaggggattataaattttacctttaagttcccaaggttccagcttgttgagatcaacttctctaattacatctaaatcaattggttcataagaaaccttcttcttgaggtaatagtaaagaagctcctcctccgttggatgaaaccggaatcccggaggcaccgaaagctgtcctccgccagccaccgtggatgacgaccctatctccattatccttactcttctttaagcaaactttgacgctttcttttcgacctttgccctaatgaaatattaattaaccccaaagaaagaaacacacattatattgaaggttttaagttttaacaaattgagaaatgaatgggtttgaccatgcaagtatgtatccaataatctcaaggtgttaattggggtttgggttatattagatctaaaaatcaaaaccctaggtttaccaaatgcatgcatatagtcacgaagaacaaaggctccaacttattaacctttaattttaaaacaaaagatgaatcttctattacatatacccacataagtaaaacctgaatgtccaagagaaacatgaaggtgctgcaaactgaacgatctttgtctgcttcttaaacaagagaggtttaatgatagagacttagtcatgttcttaagtaatcaaagaaaagaaatgaaaatagagagatgtttaagacgaaaagtacacatgatatatatgaggaagtgtgagggagtgcgtgtgtgtatatatatgtagatgcagatgatgatgacgacaatgaaagatataagatggatgaggaaagaaacgaaccttggaggccggaaagtattgcttctgttagaggcaagaggtagaagacaatgaaagagagagagcgcaatgaagtaagcaaaatgaatttctacaaagctgaagatatcttagcttcaagggcacgatgtttagggtttctatctctctctctctctctttcttcttctttgagatagaaagaaagtgtggaaagagaaagatagagaagcttggcttctatggatcagtgccactattattttgtattaaatttaataaaccaaagctggtcacagaaatatatgagaaatactttaatatgtataggcagtttccattaaataatttttcttgccacatatataaacctattcatattggtataaacatcagctaagatgatcagatcattcctatctagactatatatatgtatctctcttacatggtgatctgcaaataattttgaagattcaccgttccatgtccaatgttgtgcctagctagggcttagaaggtctatagcgaatgaagattgtgcatgatgttgtgccgaaaataatctttttcttcgacactatgtttcgttttttgtttctaattaatatcaagttcttcgatttacatatttgtacaaatcatcgagtataaatacctagatatacatctaaagaattgtgtatactatctttgacaaaaaaaaagaagaagagaattgtgtatatattacgtattagatagctacaatattattattttctactgtgacgtaagtatgattatgaggattaactatactaatcagtaatcactatggattacagctgttatatagtaaggctgactaatttgctttgaaaacaagtaggaatcgattaatgagaatgaacttcgaatactatatagtacatggtaaatataatataatacaagatctggtttatgtatcccaaggacaaaacaaaacaggaattgaagcttctatgccctcaaaattgcagtcaaatgttgggaagaaaaatgatgtatcgtaccttgaattatgctcccacttacttttttaatgcatcaatttcagtgcagtttcgttggaaatttagaaataagattttctacaaatgatcttaatccttaaagttccatatttgctccttacttaccatattagttatatgaataacgttagagtgttcatcaaaaaaaaaaaaaacgttagagaaactatgggatttaaatgaacagctaattatactatatgattgaacgtgcaagtaatattggcgcatttccactagcgtttttttttcttaacattttgtaagacaattttcatgtaattttcttctgctaatttttttttagtttaaactttaaagttgaaatattaatacataataacgtacgttcagttcacagacgttcttaaggttctgcaaatagcaggattactattaatgtttccctataatgtgtatacacatgatttatctgcagttgcgtcaaacaatcataactgaatttgtatatataaaaaggcatgggggatcgatcttcaaaactgtggatatgatttcctgaaatataactcttacaagtttatgaaataatccatttgatataaataaaaaagttcactaaacgaacaaatagatatagagactttagagcctttgacaaaaagaataagaagaagaattggaatgcaaagaagaaaaaagcaataatggaaaccggtacgtaggaggaggagtgtggcacgtgcggtagaagaagcaaaatcctgaaaggccgtggaggagagcacgtgatggtccaacaccaaatccacaattcaaggtccctcgtttgacttcactctctcttcttgagattcgcctcaaaatttatcttcttctcacttttttccccaaacgaattacataaaactattaaagataaaaacgaatatgatatgaatggtaacttttaatttcctaaattccatgtaagatacacgaaacacataaaaacattggattctcacggtaaataatctcttcgtaaaacaatttatgaaacttacaagtttctgttggcccaatattatcttattgagatgtgccgttgccttcacgaagacgtcatgcattaaaccccttattaatgagcgtttaatcatatagagataccaacatgttctgaaacttataatcttattttagaatccccattatggctaattaagtgtacgtataaaattcaaagtgatacgcaattacctttagtatacaatatatatatatgtgttgtacaccgtttggttcaggtgaattactgaatcacctggctattttataacaaggagggaaattaaatactaccatttttcgggtatttattatataaaacattttatgaaaatttatattagccaaacaatctaagagatttcatttaaattaattacaagtgttcattgttgatggataaattgcatattgaggatgaataccaaaaaggtaggtagatgccaactagaccaatcttgtgcacggcgtcgtttcatgagtatattaaatgggccttaaaagtattaccctttttatgacgacccatttaatttaggaagcccaaagatgaataaacctattattattgtttatgtgtttatacttttgaacccataatttatttctgttatgtcatctcaaccctaactttatataatcagtattaaatccaggcatcttcaacgagccgtcaacaaagataggaaaacgtagtcgtttgatacagctggtataaaatctgaattcattcttcaaataaattaaaatcttcgttggcgttgttgttggttgcgttacagattttggactaatcattattttcgtgcctgcaaagtcagcacgacgatcgcgtttcgatcttcaaagtagaagaagacccgccacaatcacaaatcgcggtgcatatagtctaaagggtaagcttttcgattcctttcaccatgtaaatttaggtcaattccgtcgcttctttgatttggggtgtttttcctggcgcgaaatctttccgattttccctgattatgaatttataaataatgggtatcgcagattttgggtctcagtggctgattcttttcgactctagtttctgcttccgccgtctcatttttttttctacgcaacagtaaagtttttatttttccacctgaattttcggatgatggccgaagattttgtgtctatgctgatacctaatttttccatctgaaattgattttattcactgctattttcattttgttttcatatcattgtgactcgctactaaaagcttctaaatttgttgcctttttgtgaaaagctctttacacggtctatggtaattgtgttaagattcttgttcatcatgtacgagattttcattgggtcacaagagtttcgttgttgaagctactagtttttttcatgatcaaatacttctttgagctacttgtgattctctttacatgatctttatgtagaagataagtattgctgtgttttaattagttaggtacttgttttcaggtcaatggcctcttcttcggatccatggatgagagagtacaatgaggctttgaaactctctgaggatattaatggcatgatgtctgaaaggaatgcctccgggttaaccgggcctgatgctcaacgtcgtgcctctgcaattcgaagaaagatcaccattttggggactcgattagacagtctgcaatcccttcttgtcaaggttcctggcaagcagcatgtgtaagccattctgattctggttgcctgttcaaactcctcatgttagacaacgctaagtttcatgttggtcttgaactatgtaattatggtttatgtgtatgcaatttgctgataaacagttcggagaaagagatgaatcgtcgcaaggatatggttgggaatttgagatcaaaaacaaatcaggtggcctctgctttgaatatgtcaaactttgcaaacagagacagcttgtttggaacagatttaaagccggatgatgcgataaatagagtctctggcatggacaaccaaggaattgttgtatttcaacggcaagttatgagaggtaagatgtggtatgtaacactgttctaggaccatagtaatgatcttggcgtctgtattaatttctctttgattgtattttatttccatgagtagaacaagacgagggacttgagaagttggaggaaacagtcatgagtaccaaacacattgctctcgctgttaacgaggagctcaccctgcagacaaggcttattgtatgtctccgctgttgttcattgcttttcttgttgattttgatttcttattctaacgaaatgggactttcttccatgcaggatgacttagattacgatgtggatatcactgactctcgcttacgggtaagtatatgcttcgaacaaattagtctcattagtcactagcttaagctggtccattgataagctaaagaacaataggaaggcaagcaagtgattttaacaatatactggtctattatgtctaagaatctctcggtcgttgctttttttttttatcataaaaagcaataattttttagtttaatgtgattcacatctcgtcttggatttgatgtagcctgtttgtgtttcttgatgattgcagcgtgttcaaaagagccttgccttgatgaacaagagcatgaaaagtggttgctcatgcatgtctatgctcttgtctgtgcttggaatcgttggtcttgctcttgtaatttggctgctggttaagtacctgtaatgccaatgtggtggcaacttgtgaaagctcatccttttctctcagcctatcctctgtgcttaatggttgttttctattccttctatcgattgattcgtgtctgtgaggcaaagaagaataccactgcgtgtaagaaaccctcagaagtacataatctgtattaccttcgtatcaaccacgaattgtaaactaagttgacatttgtctatatatggtatggctcctacttggttcaataaagagaactagtggcttggacaatgcagagacataatggtcaagatggcaatcatttttttataaagtgaccatcaatttttttattgtgtggaaaaattgatctcagtcacattctgtaaggttagccacttggccttttagctctgtaggcgctgcttatgatggggagcattggcaatcacctcctttggggtgatttcattgtttgattccggattagaatatgaattaaacatctctaattgtttcaaaatcaatttaactagaaattttttcttaacaaaagtaatagaaacttttttgctttgttgtatttcacaactcgaaattgttataaccaaataaatagattcatattttcttaaaaagacctataggtttgggtcgaagttaaagattaaataaagttttctggtaacattatttcaatactgtcaaataaaaagttgtaaacaaaagtcgcgcgtcatgattctcaatatattggttcatttgatgtttataaatttttaatgtttttgtatacggaaaaataacgtattgtgacaaaaatagcgtatacgaaataaccaggttaattgtttatgggcttgttattttatcataaaaatttaaccacagataaaacagacatgggctccataaaataggcccgaaagacttaacttctttttcttcaaagtgaaaatacccatcacgcgccccagtttatttattttagcgaaaacagcaattttcgtatagtccagggatttcggggaggtggcgtcgacgcgctcattgtgagagtgggtaaaaaacttagatttcacagctgcacaacaacgcgcgtcacatctgggcagactttatactgcccattgggctagaagaagcttagttttcagatacttataggcccacaaaatgtccaacagcataaataagccttcgatggcatgctgatcataaatttatcaattttaattcttattcattggctgctatctcctctgattttgttgtgctcgatgtcattgtaactgaagatgcggtgtagaagcagtttttcgtattatctggataaatgtaaatttgtatgcatttgctttttcattgttttcctaatggagtaatcatgttgattctggattatgtcttcaagtgaaagtaggttctctagcatgaaggttttaagagagaactaggagctcaacaagttgcgttgtttttgcttctcttgatgaacaataaaagggacaagctcgagctcgaagcagcgaatcagaaacgagaaacttacatagagcccttccctccagcattaaaaaggatgagcacttgagtttttggactgtacattgctcaactgtgtatcaaactgttaaatcccacaattttgcaaattaaatgcctattttttggaggtatttctcattggttatactttggtcctttttcactagtacaatacaaagagaaagaatgatactatattactgtaacatgaaacaattctgtggtttgcgagtgtctcgccttaatatacaatttaccatttcactgagaagaaaagaggacctatggggatggtgcagaagatggtgttgtggctcgaagaagttgttgcagaaaccgagctgcaagacgttggcctacaccgcctgcaacacgtcctccaagtcttcgtgcctctggttgttgtaacacctgattttaaaaatataagagtttagctcatcaatcaattttatgttatgtaccagtctcagtgcacaagatcaatgaagtcacctgtagtattggttgcaaaatagcaggatcaaagctttctgaagattgaagaaggccccagattctggagacctgatcccgaagctcaagcgtactttgaagttccgcggtactcattgtaagagggccattcccatttccattgaagacaagagatctcagaaactcaggaagggaattgtatgtatcaacaacagtgcccagcgcaattgcttcactgactcgtacagcttctttaattactaacaatcgaagttcttcgccatttggatccagcaaaagcttcaaaactggttgtagagcatcctttgctgagaagtctctatctttacttccctgttgtagaaggttctcgagtctattccacctaaattttccgtctttgaatagtagctcgataagggcatctcttagatacgggtttggatcagtgagaagccttttggcaaaatatgggtatgaagcagctagtactttgaaattaggatctgcgtagagtgccaaaccttcaagcacagtaagcgacctcaaaatcaaagcatagtagggcgggacattaaatggatactggtagaagacagcacctagaccatcaaccaaagttttgaaattgagctcgctcacggtataattaagtgcatcgtcaaagaagtctctgagagctggtatgataggagtaacatccacatcaggggacaagaacttcagagcatagtaatctcgtgccatggcttcataatctcggttcactaaatggacaacatggcctatgatagcaaatctagcttcctctggtgtctcactcatcatgccaaagtctagaaaggcaagttttccatcaggtgttgccaagagattaccaggatgagggtcagcatggaaaaagccatactccaagagttgccttaggctacactggattcctgtattcacgagatccagaaccttcaatccctgactctcaatggcaagttgctcattcagtttagttccctcaacccattccattgttagcaccttgcggctcgtgtaatcccagaatatatcaggcacaagaacatctgctttatctgcatacaattttttaaaccttctggcattttgggcctcctggacatagtttagctcctgataaactctgcaggcgaactcatcgataagggtaaggacatcggtagtgatgaagtctacatacttgttaatgagtttcccaactcctctaataaggtaaaaatcaaggccaatggcttcttcgatcccagggcgttgaactttgacagcaacaacctgacctgaatacctcagctgagctttgtaaacctggccaagactagctgctgcgattggctcaggagatacagacgagaaaatggtctctagcgacaaatccaactctctctcaatgcaagcaaatgcctctgcatcagggaaggttggcaaagcatcctacttagacactcaagcacataatatagagaaagttagagatgttctctttacctattttcaaacagaagattcttaattacatatacgtaaagcagagagaggaaagaggagaacctgaagctctgcaagttcttcaaggtaatcgggtggacagaggtcgggtcgggtggacaaaccttgacccaatttaacaaaagtaggtccgagacgagtgaagatccgccggagctcgattgctctcttcttcatgttcttctctaagttgccctgcttctggtcaatccccaatttcaaagcgaaaccacccaaagctcccaatatctccaaacttctccgcaaagcctaagtcccaaattgagctgcatctctcagtaacttacaaaacttgaaactccaaaaagtgaccaagtagctaaccttgaaaggctgagagccatgtttcctggcgatgagctccggagagtaaatagaagcatcaatagcacgacccaaagctcgtgcctcggcttgaagatcatccgcgagatcagctcgtcggtactgcacaactgacgccggtctcgacgatggggaaggacttgccgccgctccgtcttccttaggcctagcttgtaccagggccgcacgcgccaatctcctccgatttaccgagaaaaactttgattttccgacatttattttggaattgcgtaacgaaagaccatcaccgactagagttaaacccagagactgaccaaccaccagactcatcgtgtaacaacaagagcccccaaaactcggcgaaaatcagagagacaaggaggaagaaagaattcagattgtgattgcccagccagtaacagccatgaaagaagatgaagaagaagaaagagagagcgagagagagcgagagagagagagatatttgttgtaaacgaaagattagaagcgtttttggttacttacttccggcgaataaacaaggtccacacttttggcgtgccgtgacgttctctattttttttttaattcaaaccaaacacgactacaagacaaaaaaggcattatagcattttccctaagagtttaaaactaacaaaattcgtggttcagtataaaccagccatggccttcttcaagtttttttctttctttgtgtgaatgtaattagtttcaacctaacaatatccattcaggtttacaccaacaacacagtaccatattatagagaaacctagcttagaacaaatcctttgtcactacctcctcccatacatccagtttgttttatgtacatatatatgccgctgaaaaaacactattagatttctcatctcggaaacttagccgcggttatttagatttcctcttctagtaaatgggattcgttcttctgcaataaccccaattgtaaatttcatggttttgggtgcggaataacaacaaaaataatagtgaaacaagagatcagagaattatgttgttaccatggtgttgctccatgttaccctcatcatcataatctccgttgttacttgtgaagaacggtgttaggtaattcctatctagttctgtgaatgatgccgcactgcatacaaacaaaacaataaacaaatgggattcttgtgtttattaaaagagacttgaatgcatctgtttgaatgccgacaaaatgttgagaggcatgagttaatgcgtcatttacctcttatggaactctcttagttttgtcctgaatccacttcctggcggtgtatcttcatcatcataactagtcatataacgactgttcaccacctcaaatccctgacaaaaacatatcaatcatttcgttttccacaccaagaaaccgagattcacgttataataggagggatcatctaggacatgaagtctacgtaaatggccatttatattcagttgacttacatcacctaaggatgtatcgtggctatcacctacaacctctagggcttctagcattgtaccagtcgatcctccaatcagcaacacctgcaatcatttccagtagcgtcaaggatcacattgcaagcaatatagtttggctcagctatcagcaacataaacctttgatcggaacactcagtttaaagcaaattctagttcctaaagaaggatggattaccgtcagaacaacaatggctgtagttgcagtgaatatagtttgaccatgtccttctggaagatcgtgaacagattgcagagcaagagcaaatgccatagcacctcgaagtcctatgcaaaatccacatatctttgtatttattactgatgaatagaaacaataactactcaagggaacacagagcagtatcttaccactgtaccaaagtgctttttgatgtgtcattggtattttcctatgagcaggtcgtgccagattgaccaaatatccacaaccaaacacattagctgccctgagtaagacaaatatgccaaagagtaaacactatcagacagcataaaacaaaattctattcggaaatgaatatatgtacttatacaggtcatgaaagtgaaacaaaaagcataccttgcaattacgataaataactgaggttcgtcaccaaggatgaaaagaaagttaaggaacaacatataaactaaggaaataattcaactccaatccagtaaaacttgagtaagaggatacaatagaaaaaaatatgaatcccaagtgtgaccaactatgcttttccatggcaatatcaaaacccatgtagatgaacctgcaaatttgatcatttgaaattagaaggtcacgtcattgacgcatattacagaaaccaactattaatatgcatgagaaaataagaatcaaatacatacacaaatgtctctgccagtgaagatatcagatggaaaaatgcagacacaaatcgctgagaatttgcagacaagtttgagtaggtataatgtttcatgacctggaaggcacaggcagtttccattatactactttactttcggctgaaaatcattgcacatagaactcatgtaattgaatgacaactcacaatccctgtaaatagaatcgatacgatgccagatagactgagaccttcagcaagcatgtaactggcacaaagaaaaaaagttaacaaactgcacaatttctatgagagtgaaatatattgacacatagctagtatagaagagaagagttttattacgagaaatatggaaaaagtacgaagagacagcactccaagttctgtagactgaaagaaggagagagtacatcagaataaaatatttcattgctgaccattagaacccgaaataaagaaattcaaacacagactacagtcactcacttgtcaacatccagtcctgcatacttgaataggtgctttacattaaggctaacaactcgtctatgtgtatggaatgaagtgaaatgtttcagaagaatctaaaagcacaaaaaggatatgagagcagaggtgaatccaactccaacgcctgcagatgcacattttttttttaataatgcacagagcacaaatctaagaatacataatgacataagaaaatcttgcgaagcttgaaaagtcaaatttagttaaacttgttcataagaatcataacgtcgaattttatcagcagcattctcaaactcaaatactaccatgccatttcaagttgaaagagccaaactatgcatgaaatattaggaacaaataaaaagtaaggcagatgattaaagcaaacctgcagacattgaaccgacaaacgtttcgagaaacctgactatcaccataaagaaattctgtccagaggaatgacttctcaccaaggacattgtcctgcatcccagtttatagccttgttaaaataccttaccatctgactatcgtgtttcaaaccctattttgaattactaacagacctgtacagagatatcgccatctgccaaaagcaacataggaaagagaaagacctgataagtaatgtgacaatttcatcctaatatatacatataaggaaccagaattcacttagcaaaaactacttacagcatcatttaaaactgattctccaaacaccagggcatacaaatttacatctgaaccaagttcctgtaaaaaaacacagtagtaagaagcggttgaaaactactactattcaaaaatagtggatatccccgtaaagcagtgaaagaaagtacctgaaatatcgacaatacagtgacaggatcagtggctgagataagagagccaaacatgagacactcgacgaatggaagtctgtacatgagaaacatcacaccgccaaggtaccttcagaagaaaaaagaaattatgaataatggaaaggcaaccttttccgtcaacaaacattagccattcacagtaaagagatacttacacaagcaatccagtaaccatggaagctacaaaagttccaagcactgaaaaagtgacaatggctccaaagtttgagaagaaaggtttctgcataaaacccaacaacaacgtaagcatcatcaagaacttaaaagcgaggatgcgatctttgatggtaaaacaagaaaagcaataaagacatgagggtctctgcacttacaggttgtaaactgaagcctgactgggtgcaaacaagtacgtcaaggaaaacaacatattttgttgcctagttgagattcattgaaaagattatgttacacagaggcgtaagtaaaactaaaggcagatacaaactcgattttaaggatataatatgatgggaggcagcagaaacagaaagaagaactcatcgtggaaattgaaccatgtcctgcagaagaaacaaaatagattagcattgaagaacacttacacacatataaacatgtattcgtgtatgtaatcagtgagtaatttacaatcgtttgagtttccaggtcaatggaggaaaggacataaaaatagtaataaataattgagaaaatactaaaaaaactgatgagaaaaagttcaacgaaccttatgctagtctccgtgttcgagatgttcgctaaaccaccaacgatcagccctacaattccacaaatttcacaaggaatcaaacaaaacaatcgatggaaaacgaaaaggacgatcgcaatgcaaaggaggagtaagaagaagacaaaccaattagaagagaagcactagcttcaggtagataatagaacttatgacggcgaaggacatgaccgagtacaaaagagaggacaagcatcatgatctgaagcaaaatcccgactccggcggcttgctgctgcttctcttgaccttgcgggtcgtgaatcgccggcgaaatctgcagctccgacgacattacgcctcgacggatttaaaaaaaaaactagggtttctatcagtgttacttcgtcttcttcgtctttgttcacacagagagagagaaattcacgaaacgggaactcgtgagatagacttcttcttcttcttcctttccgaggacgcattttgctttttataggaatctgcgtccccactgcttctcaggtggctttccgttttgggcttttatgggcctaataatatcaactactctgatttacttgagcccaattactaataaacacgattactaaaaacatgggctaaatgtgtatatgtccagtggcagtggtggctcatgttaatacgctaccgtttttgggctgaaaaggcaaatgacgtctatacatggacagtttacagttctaatttatttggcccaactactaagattttcttttagtaatcacgatttactaatgggcctagcctcacagtgtttcaggtcaacaatactcgcacaagttttcatcaatatgacttttccattcattcatacaaaaagtaacgacaaataatctcacaagagatgttgatatttacttgggctcaattttggtcggaacagagtagccaccactataatcaaacgctccgcctccatctccgtctcttgcttctttcttcttcaaagtacctccgtacaaaagcttctcaccaaaatctgtagcggatgacgacgcagatgcagaggagctactactcgccccactattctggatgataatctcaatctccttgaccacttcactcatcgttggcctctcatctgccgtctcatctacgcatttcagggctagttccatataccggccgagctctggcagagttccgacgtctcttaacgaacgatccatcttatctctcagtccgtagaagtcatcgtcgctcttgttcattacaagcttgatctctctaacaatgtacttgcctttctctatcggctgtttcgctgtgatcagctccatcattacaacaccgaagctgtacacatcactcttctctgtaagtttctgtgttgtgtagtactctgggtccaaatatccctgccattgaatcatcagaaacaaaagttcctaaaaattgaaagcaatatgactcgttgatttatctaaaacttaccaatgttcctttaacttgtgttgaaacatggcctttggtgcagtctgaaaccagcttggacaaaccaaaatcagcaaccttggctgtcagattctcatccaaaagaatgttagttgatttcacgtccctgtggatgatcggaggatccgccagttcatggaggtatgcgagtcctcttgccgatcctagagccactctcagccttcttttccaatccagcgtaattccggatcgccctaaaaacaatacgtaatggtcaagttttgtgtttgtgatttattgagcacctaaaggccagatttttcagtaccggttaagctatcttttagtgatccgttggacatgtattcgtagactagaatctgctcgccttgctcgaagcagaacccgacaagcccaactaggttcttgtgatgaactcgagaaagcaactcaatctctgttttgaactcgagccctccttgtgttgatccttgttgtgctcttttgatcgccaccatgtgcccatcttgaagcattcctttatacacctgcggagattacagagagaaacagaggagcgttacttgtcaaaccctgaaagtgaagccctagatagtttcaagatcgatctttcaaaaacccacctttccataacctccataacccagctcactgctcacagagaaattgttcgtgatcttcttgagttcttcgtaggagaaccatcgtgcccctttcagctgcggtgcgccaccgctgtcttttccacttgatgcccatgaaactgagtgaatcaaaatatcattgtcagtcttctacttaacagtaaatctatcatgtaagttaatgtagagtttcttttttttcaggtgaacctcagagaatctaaaatggtagtgtttctaagataacttcacctgttagaacatcggacttaccaaatggtctactcaaaccgatagcttgctctgcacgtctcttctgccacattgcgtatattcctaacgcaacaaggcacaggaccaaagcactgcaaccagttattatcccagtgaccatccgagagctcaaggaatgtccgttaccatcagctgccaaaaattattcgattgttagacgatgtgtttaactccaaaaaggtgtataagcttcgtatgtaatgttacctgggaatgtgtagggagatgcaatgaagtagtaaggtccaaacaaaggaggaggtttatatgtttggttactcaagtcaaatccaattctctgaacttcagttctgttaaaatacttgcccataggtgggaaaagtgccaactgtatctgaagataatcatcattgttgaagaaagggttttgtagagagaccgagcctggagtgagtcctaatttcacccacaagctcatctccaaagaatggtatgtgttcacattggacaggtctctgaacataggccctcggaagtagagtgtgccttcataagggtaggcgcattcacagctctgagggctgaccttttggtctaatggacaagactttcctccacagttagcaagactggtcgagtatattcgtttgacttgttgctgctgaatctgacagtagtttgtgttggagagagctgttgtgcatacaggatttccttcgagtctgcaacaagagagagcttctttaataggttgatatagacagtttgattgaacatttaagaagaaagaagctatgtacattaatgtattggtatatccagagcttagtgttacagaggatatgtcgttgtcttgtagatcaacaagttggagctctggacctactgtgtctcccaagctcagtgttccattgaatgcgttcttcttcagtctcctgtgcaaatccaattcagcaattagatgatgtctaaagctgtaaccaaatttcagtggagactaaaagctgaaacttacacttgttgaagctgtgggaacccaaagagcttattaggtagtggtccttgaagagatccatattccatcacactaaatacaagaaaatagtaacatatttagagagctcccatatgtgaatgttctgatttgtaaactgtagcagagcagcacttacagtgtggtcagtgaaggtaaggttgagaaccagagaggagactctgatggatcaaatgagttattgctgagatctctgtaacagacatcacatttaatcagagaacacaaacgcataaatgtagataaagacgttctctgttggtgagaaatttacacgtagttcatggacttcatgtctgacaaatctggtaatgatccaacgagcttgttgtgagctaagttcctgagagacagaaaaaaagatgtatacattcataagtgatgtctaatatgatctatatagtaatatcataactctggcaacacttacagttcaatgatgtttgtgagattactgagattctctggaacttttccggtcaaagtgtttctgtcaagccgactgttgcaaatacaagagttatatctttttgaagatagggaagatacatgaaactaaggacatagtgatgatatgttactcacagaacctctagtgtctgaatgagtcctaaagtggaaggtatgcttcctgtgaatcgatttccatcgaataatctaatattgaaataaatctgttgcgatgagttaccgtaagcttgacaaatatgtaatattattagaagtgtatttgacttacacatggatcagtatcatctcagagctgaaaagttttggtggaatggtcccagagagctgattcttgttgaaatgactgcagtttttataacatttgcatcagaagaaaggtacttgaagctgaagaagatgtctgcagagaaaataaaattactcacaagtgtttggctttcaaaagaagatcaagaccaggacttgagcctgatgaaattggaatgggtcctgtcaactgattatccgcaagatccagccaataaaccttagtgagatttcctagagacgccgggattttacccgtgaagttgttcgagttcaaggccctgagaaaacatggtggaaccaaagtggcaagtctcatcaaacatgagttggtttgaggacaatatcaaacactgcaaaatgctattttcttacaagaaagatagatctttgagatagccaagctcatttgggatggtaccagtgaagccacaaccagcaagaatactgaaaagaccaatacaactgtttagatatgtacacaaggaagagaaagaacaagaactacgagatcacttttagcttgtttgcgcgggagagattcttacaggatatttagcttttgcaggtctcctaaccgagaagtaagtgaacctgttagtcctcgattaaaggaaagatccctgaaacaacacaaagtcgccaattcaggtcagaaaaaaaagaagatgtttttctcttgtattcatcgatgattcatctaaagagactgacaatgatcttagttcagctagttctccaatatctccactaagtcttcctttgagacccattgttgacaaacccctgaacacaaaagacttgcttgctcagtacgttaccaaaattagtaagagaagtgctctaattttttgttctttttcacacatgtgtacagaaacacgagtgaatgattaaggaacactcacaaagcagtgattctggagttattgcaagatacaccttcccaaggagttccacaaggatcatcagaacctccccaactaggcggcgtattgtcccattgatccatcaaagaacgcagagccgccgctaataaaaggcaacaaaacaagtaaattacaatcatttccacgaacgtattcaacgcaaggaaaaaacataagtcatcacataccatcacgaggatcagtcactgatgaaatcattgagaagacagtgaatgagtaagcaaaacagatcaagagcaaccgcgatgtagcggttacggtgttggaacccaccatattgttcctcaagagacatgagttcttgaagtttgatatttaagtgaaatcatagagaaagaagaaacagattaaagtagcttccttatgagacaagattcataattgtctcatcaaaaaaaatgtgtactgagaattgtgccaataggaacacgagtgacaccaagaaaagttggtttcaatcaattttccttctcttcgaagtcaatttaacggttcatgtgtctttttttcaaagcactttagttattaaagcacttgagtgttacatctccaaataaggagaaaataatttctttcaaatagccactacaaaattaatgatgtaaacttaggttaccgttaagctctgttttgtaatcaaagcaaccttctttgatcattatgctgagaatagacagagaatatagtggaacccataaaaaaaaaagttcccaaaaacccaaccatctccaaaaacaaaaataaataattaaaacgtaaaagccacttccttcaatttccaagtgtctaacatgtagtaataagagttaattaaatataaagacagagagtatccaagaaaagatccaattcactatgatctttatctacagctaacatgaccaatctctcacatgtctgaaagactaatttaaacaagaaagattatatatctgcaaatcacttccaagagaagaagaaaaaaagttggaacatcgtgatatgaagtgtttttgtcggcattaacttagaatcacttaagtcaaaaaaaagtcacaaccattttctccaactagttgatctgagctcaccagataaaaaccttggaatgctcaagagactgttaaccctcgtcaatccttccaaagcagaccactcttcatcatcttgtgcaaccgagatacattccgcaagtgtcattgtcatcattttcgactcaatcccgcaactctcagggattttctcgtctttaacggggacaatctcatcctcctccttgcttgtgctgttagtgacactctctatagactcttctttgggtgaatccttctttacattggttgagacttccatggctactgatgaatcttgtagaaagagacagactactgtacagtcatcgttcttggaagttgggtacttgattctccatgatcgtaccgctgtgtccactagagctcgagccgctgtgcttctactaggagctgaggcaacgatatcaacagcttctttgttcgacaacacatcccatacctttaatacaattcagaaaacacaacatttttcagctctaaagatttggaaaatgtttgcaatttagtggctagtaactgaagatttaatttaccccgtcgctagcaagaataatgaattggtctcgttccgttaggcggcgatagttgatatctggaacagagattaatccgtaatctttgagacaaaagtctccaaaagctcgagccattgctaaaccaggtgaatcactgtttggtaaccatacacgagctacctcaggctcgtcttgcaatgcaaagactcttcctttacatttctggattctcgctgattcacctgacagtacacatagaaagcgaaagttgagaaacttttgcctctggcttctctcagagtttaatatcatggtttgtaataaagtacctggcaaatccggttttaagtctatagttaattgtacagcgagcaaagcattgtcttcgtctcttgtggcaagaacggctctcgagtcaccaatatttccaaccaccaaatcctcaccctaaaagaaatcattatgaacaattacagcaattaatatacaatcgatgatggtcttttggttacaagcagatctaagctgagaacctgcttgatcaaagtgactgaagttgttccgctgcagaagcaatcaatagttggatgcattttcagctctttatctatctgctgacaagacttgagcatcgcatgtttaagaggcagatacatctccggaagttcatcgttgttcacatttggatttaactcacaccattgctcatccatagtagtaacagactcagttttctgcacttgttcagactcagttgtctgcacttcttcttcctctgtacatttgatctgaaaaccattggcaccaactaagctgctttgatctgactctgaggtcattttcaactgggttaagagtgtgaagggcaatgtatctcggactttcttggcaaccatatgaccaaatggtccatgtccatcgaatacaccacaaaacactgtatcgtctctcgaacaaaagttctggaaagtgaagtagttttcataagttagaaacttgtcttgatatgtgaatgtaacacaaaaggaagtaagcagaaatagaatctaagtgtcaagtaactagtggtccctgtagaaacaggtcaaagactcaagacagcacaagaacaacacaaatggcaaaacaaagccacctcaatcttcaaagcactaagctttgtaatggtcccagaaaagtgatgaatcattccaagtttctctctctcttactaagcactagcaacaaaagattaatgcaatcatgttctgaagatccatttgatctgtaacaaaacacatccaaacaaatcaagtagcttcctcatacattgaacaacatttctccaccaaaataccctgaaattgtcctcttgagtattgataaaatccaaatgggttgcaaaaaagatgaatttttggaaagataaaagaaacgaacctcaaagacgagcatggcgtcttggttagtccctttcttgccttgctgtgtgtaaagacatgcaatcttacttgaaccattcgaaaccaaacgacccaaaacctgtggaatcccttcgatatcgccgccaccctttaaatctctcggccgccgccatcttccggagcctgatctctcctccacagtctccgccgtagtggcggtggagcttgcttctccaggttccttcccagtagtcctatctactgaataacacagacccattttgaaaataatccgaagaaaaaagagctcaaagcttttaaagaaaaagttcaaattttttaaatcgccgattgaagaaatctacgatttttctgggggttgtcggcaatgattacttgctcggcgaagaatagagcgaaacgagaaaaacgaaatccagaaaagagcttaaaaggctcaaaaaacgaaacttggcatctagaaaatccacactactttagcttttagttttagctttagctttagggacctctggtttattttctcgggaaaactgctattttctcgggtaaaaagactcatacttttgcatattgcgagaattaaaaggaaaaaagagaaagaaaacagaacatcacaatctgttcaaatcagattcttgtgaactgatttaggattacttggaaacagcgacgctaatactttcagacccacaacaaagaccaacgtttactactaactccacttctggatagagagaattaccaaaaaaagttcatagaacaattgagagagagagagaaacgcaatggtcagacaaaggtcatagtttggttccgcacgtgagatctttcatttgagtgttttttcttttcttttctgaacaataataattgtgggaaaatttggttcttggctgcatcgtatcatccatttcacccgaaaataacccaattacgttttgccacgtgtcaaagttgtcgtctgtctgtgtgtaatggttcgaatttgattgttaattaatggttagttaagtattcacaattgatcagccacaagtccttttctgcctttattaaacctaaattctgatttctgaagccagccaagttttggaaaaaaatataataactccgttttgtctttcttccaaaaaatgatataattgaagtatccacttgtgttaacctttaacaaattttaaaatcaaataaatgttgataatatctaatgtgttgtttacttgatttggccttttgggaagtacataattactaaccaattggggttttcaattttggtatgaattaaatcgttttaatttatacagattgaacaacctatgttaatcacatcttcatatatatggtataagcatctaatctataacacaaaatataaataaagatgtacacatatgagcagcattaaaagagaagcaattatgactgtaatagaattcacggattgtgtgctggccaatgcgacacgacgacaagttttagttgtcccactgacttgttgagagagagagatgcattcattcacacgcatccaaaaacacatacaccccattagtttatcaagatgctatgtttttaatcaccatctcacgaaaatgtttctcaataacgctttttgtatcatcaatattacacaaatccttatgtaaccatggttataaatagctaccatggtacataatacatattccttaaacaaacctaaaaaactaaaaaaaaaaaaaaaaaagataacacagaatgatagtagggactagggagtgatgtattttatgaatcaaatgacaaaacatctgaaagcaaatcttaccttcattagatgtattatcttattaaaaatacttattgttgatgatgaaatcaaacttctttacttaagcacatatcttctcaggcttcttaggaaatcaaacctggaattttaacaggcaagtgatgagttttactgatctttgacatatagtggaattgaaaagattgcatataagaacgattgtgtttagttactcatacttacttgggcgtgttcggttttgtatttctgaagctcttcttctgcacaaatgagcctatgaacacacacaaaaacaagtgagaatgatggattttaatctaaactatacaaggagatggtttcgatagttacctccattgcaggtcggttatgtcatggagcagttctttctctctttcgtgtgctgcttcaagctatgattcaacagaagaacagttccattaagctcaaaagtctgaaggaatgtgattcaatacatttttttcttgcaaacaattgcataccatggatttctcagttgggggcacagtaggttgttgtatacttccttgttcaactgcacgtccatctacatcaaagaaataaaggaaatttcaatccagtggcaaggaaaaatgtaatcaaaagggaaaattgagatggaaaaggagtgaagttgcacgaaataaacctgtcaactctctgttggtgagtactttcatcatatgcaaaatgttatcctgtttaagggacaatttcaattatgcaatgaactttcatattgttatgagatatataaagaaaggaagtagcgtctaagaagcaaaagccataccctttccaaaatattagtttgcagaactggatacaccagcgggtaaacatatgagctggttaggtttggcaatgtgacatcagagtgaggtagagaagcagaggaatgttggcagagcacctacataaccgcaagtaaaaatattatttgttttcattaagaaaacttgagatgaatagttgtggtaaaacacatttgattgttcgtctgcagctgatcaagttgaactcaaaacaattacaaacctgcatgctgtgactcttttgcagtattggcgaaggcgccaccacctgataaagagatagcgaatacaaaggaaaacctcacaaacgtgattgatacaagaaagctcttttttcctcttaaaaccaaaaaaaaaaaaaaaaaagttaccttctcgatgtcgagattttcagaagttactttaaaacgccctctttgctgcacaactggcggctttgatttgtcatcagattcatctaggcttgctgataccgggacaaatttatttaatcagaaatgcattgatccacatggatgtttagaatggatttcaagtataaagaaatttctgtaaatgcttacatgctgctttgggtggtttaacagccatctccgttggtacgtcatctcctcccactgtaggatgtgtcccattgcagtttgacccgttttgaagctgttcttgagttttatcactgggaaatccacaggttgatttaaaattcaatgtcgcatgtagagtatatgtatagtcagtgaatacgagctttgaagtcaattttgagtctagagttctttttttacttcaagtttttaaagacttcaagaggcaggtattggttaaataataatactggaaatctgaaccaaaaaaaggctcttaaaataaccgtgcttaaaggactaacctctctcctttattgggagcaccatttccatctgccaaaacagagctccctgctataatctctgttggttgattggttgggattgatgtggcatccgttggtttcccattgtttgcatgcgtactaccaacatgtgtattgtttaaagataaatcctcatgacggggggaggaatatacgtagctatcataactggggctggcaagacttgaatcatcatcagatttatccctgaccaaccaaaatattagttgctcagtttattcatctgtagcagttccagataagtacataacgatatgaaaattccaaatagacaatcacagagtttaaaattaggagatcaacctcgcgatacttagacttcggtgaatcagaggttggagatacttattagttatttgaccagtatcctcctgcagagatggttacaaagaatttaaacctcgactaaataacaaacgaagatgaaaacaaggaagcatttctgatactggaaatttccagaacatctagaaacatgttctctagaagttgagaaagattctacaagaggacacctgaatctccgattgtgtatcctgtgaatctagagcctgcaacgaagttgcacttcccgataaactgtccgaaaagccacagtccatgtcctggatctgatggaaataagagcatcataatatgaagcactgtgagctttacagttgactaccttttatgggtcagaagagacaaaacataccaatgaagcctgggctttcatatcatcaagattgaaattccacccgctgatacctctcttatattcattctgcatggtactatgacaagcgtttaaaggctaaatactttgcagaacaagttaaactaaaaaccaaaagctagagactcaaaacaaagataaataaagctaaaagtggaaactggaaacacaaacctgggacaattcttccttttctccatctgccattttctcttgtgcaagcatatcttcttcctttctctgcatgcagaaagaatattcccatcagatttccccatgagatgctgattgataatattcaacattatagctactggctatctacttagatctacatatctaacctttattgcctgaacacgattaacaagatctggtaacccatccagaagttttcgtgcaatgtaatcgcttgatcttgcttgcttgaaaaaggagtgctttaacaacttttttgcagacgggcgtttggaagggtctttaactagacaactggcgatcatctgcttgaaagactgaaaataccaggaagaaaggcaaaattgagatgacaatagccaaacattctgaccataatatatagttttaaaaccgagaatataccctggaaaacttcttatctctttcgtaatccagccctggtggtgcattttgcaacgtcataagcagaacctgaaaacatatttggtttagatagaagcaaaacttttggagatgaaatccaggtatcacaggctatgaaccttcattggtggatatttagagaaaggagcgtgaccatgagcaagctctagcccagttataccaaacgaccaaatatcagccctgaaggagatgctccaaataagatatactatatattcatccaataagcgaataaatagaatgatataactttgtataaggctaaactaacttgaagtcataaccatgtagctgctccatgacttcaggtgccatcctgtgacaagaagaaatagtagtaggtcatgcacatgagaactaacctcaaacactgttaatgtcctccacacaaaaaaaatataagaaggtattgggggcagtagttagcaactagcgtgggtacttaccagcaaggtgttccaacaaatgtgttccttgtccgttgcctatcacctgaatcaaagagacaggcagatacaccaaagtctcccaacttgactgcacctcgagcaccaagcaatatattcccagcctgaaatgaaaacataaagatatagtcacaacgtgtaaagttgacagagtcatttgatgataaacacaattcaaaaccacaagattacaaagtaagatgagctaaaagaattgccaagtgaagtgaaatccagacaggtggaataactgactttgacatcgcgatgaatgtggccatgctgatggagatagtctaatcccttcaaagcttcacgcaatatagtagctataatagcttcttcaaaaccatcaggatatgcagcttttagaatgtgaagacaagaaccaccagacatgtatggcatgatgacccacaaattgtgatcactaacaaaggaacaatgtgacttcaacacattgggatgatcaacaagcatcatcgtctgcgcttcacgagagatgttgttctgcccccaaatcaataaaaaaaacgtaatcactttagatacaatgcaaattacaaaaacacaaaaaaaaatccagattcagagtcagagaacaagagaatatatataatcaccagatcgcagttatcgcgttcaaaatcaagaatcttaatagcaacgacttcatcaaacggaatgcacaaagcacgatgcactagagcactaacaccttgtccaataaactcgtagagagtataatgctctggtccaattggatacttcttcttctccattgtctagatcctttggtttcactgaaaccacaattcagaaaactcaatatcttgtttcaaattccaaatctcttcagcaacaaaattaggggagaatcaaagattacctggaattgagaggcggaaacaaaaacgcagctggttacagtggagtaaatctacagaataaattcaaaaaaaaaaagggaaacaaataagattcataaaaaacctaaatctcgtcgcaataactattcgcgtaacggtgggaagcgaaattaaaaacaatattagtaccgggaaaattacgacacccatgtaaaataatcaagaaacaaattaatgagaagagtgagagaaaaggaaagagacagatatcgtgctgatgaagatattgaacgatgatgatgatgatgatcttcttattaagtttttttgtctactttctatcaaaattttctggagaaagaaaacgagaaaaaacgagagagaatgagaaagagagagtcacaatcggatcgccgctcaaatggggagaagctttttgggctctgttaaatttggaatcccgccactttaggtctctttctgcttttttgcccttttctcccttcaaatttcctttttttattgctatttattttcttttgttaaaaaaaaaaactgaccgtctacgtctcattaattgtttaacctagaatggataaggaacacttaatcaatttgattaattttctggtgaaataaccgattccggtttatgagctttaccaatgcaagaaaattcaaaatcgtaatttatcaatcaaatttctgaatttgcaccaaaccaaccggtagaaaccagatgaaaccggagacgctacctaattaacccaaaatgtatgatatcagcacaacacttcatttctggtaacgaaattgagaaattcgggatttgggctaataccagagaagccatcggttttcctgaaccaaataaaaccggtctccacctagtgtatcttacttatcaccggaaaatccgtgttttggcaattaatcacaacaacataggaacatgttggttaggataaatatctatcgattacactttatgtttatccctcgagaattatgtgatcacacttttgtatctctctgcttcaatatctatcacaaacgtaacaaccgcccccatcgcaaacggagaaaataatattcaaaacaaaaaaaggacaaactaagtcacagagagagagagatcaaatcccacacattaattcacggaagatatgtaattcaacgtaagaaaagagccaaaactttttcgaagaagagataacgttttgtgaactcagtcttcaaagtcacctgagttctccaatagatagttagctgccaattcttcatttcggtcacatgcgaggaacgcttctattactaaggctctatcaaatcccattgcctcgagctgttagataggccagaggccagggatatagttaataagggttgcaaagaaaaaagtgtggaaacagagtgttactattaatggtgttttacccgttgaatcgcttcttgttctgctggggtaacgttaatggcatgtggcatttcttgctcgggttgatcgaacatgtccccctccctgatgagttatgtttttaaactttgtgaatcaaattatttagtttaatgaaatatcaataagaagcatataattacatctgacagaaccttagattacaataaacagattggaggactcacccgtcagaaccctcatagggctcatttactaactgaagaaactctgcctggttttcttgaattagcctcagaagttgagggttttgctttccaagttcctgaagcatgggctggtaacaaaagcagttgttccaacataagaggttcggaatcagtgagaagtcttacaaactactggaccaggataacgaaaactagacgagtcttacctgaagaatttgagggttggaatggaccatggtgcgtaattgttggaactaatgtaatagcaaatacaagagaatgagtatatggagtaaatttacaaaagttagaacgaacagtcaaagcatgttaatatcatctcggttaatcatcccttgatagaatggctataccagacaaacaatctccacataagttgatcaaatgtggttctaaccaatctagatgccttttcatattcacaatcggtcaagaatgatgaggagagatccaaatagttaaaagataagaacttcgcaatttagggaaaatgcagatatagttagaatagcaacctggtcattgtttctaagaaattcaagtgtcccaagatctccagagccagcagcagcaactgtttcctggggaaattaagccacagagtgagatggtaactaaatatacctttcaattctattggatacacaattaatacaaaagtacctgaggaaataaatccaaaggagatgagttaggtcctccagatgcaggtgcaacaggggctgcaccggatcctgcaatctgagcctcaggtactggcacagctacttcagcagtttgaggaattccctaatataagaaaaaaattgtcaataatttcatcctttgaacctttagcgaataatgttacagagagagcccatacagagtacaaataatccactgctctctcagggttgttataagctgcacgaagtgcacgagtaactgtttctttgtcccaacttccacctcccatttccattatctgttggaccatttgctcaagactactaccactaactaatgttgacgcagcttgtccataggtgtcagtctgtgccctgccacaccattcaattgtggagactataatgtattaatgaatccacaacaactaagttataaaacttatactagaggtcaaacatggaaacttttggaaaaccatataaggggcaaaaggcaagccctgcaaaagaaaagacgaaagcatagacactagaaagagagagagagaggtagagagaaaagagctctaaataatctcattttccaattataaacttacgccggttgttcttgagcaggaataggtgaagcaggaacaggtgaagactgggttgtagatggagctgcaggctggttttccaagacgtgtttgtattaaaacaaccagtataacaagctgctcatcgcatatttcaacaaataaaatatatgcaagaaagttaccttagtcgaagatgtggtagcggaaacaggctgtgaaacagaagaagtctgacacactaagaatcatcagaataagccaatgatgtgaaaatatgagaaataaataaattacctgaaccgaagcctgaccagctgaacctccagatttgctctacaattcatcaataaccaaaggaaaagacaatgtcagtgccattacaagataaatgatgtttcataggtaggaaacaatcatgaaagagacatctaggaacatatgcctaaagacacttattcatcagcttttatccttgtttaaggtaaataagaagactgatttgttgaagataaaagaagtatgatctttgcagtagccagatttgaactgttaccttgctaagcataacgacgagaaatccttcctccgtaactttgttctccaccaggctagtttcatctttcaaaacttttccattgtgaatcaacaattgctgcccacatggataattgtcttttccttgtgaatcttctatattcttcttcaccgccattatcttaaaaacaagcacatcatgcccagatttaatgatttgaagactaacataatcaacttgaccaaaccagattggattcgcgagtcataattttagcagttaataaagctattaaacacttatagaataaaaaaatttgatcaccaaacattcaaaattgtggatctgagtctcttctatgtgagattcctacttctctctactatactaggcgaaaattacgtaaacgcatggacgaagaaagtagaactaaccgtatcggagggtaaaaccctaatttcaaaatgactgcccttgagagttttaacggtgagcttcatatcgtcggaaaaattgaaatcgacggcgagatacgacggcggagagagtgtacagagagagacagacctaagaaaagctcaaatcaagagatcgaggccccgacgctagagaaaagctgaccgtagctaaaacagtctctctctctagcaacagagcgttttggatttcaaacgcggcaagagatcgccatgtgcaatccacgtgacacatgcatctccaattcggcccagctggtcacaattctacatgcaccaaagaaatattaatagcccagtaaggccctatgttagtgggctacgccctttaaatgacattaaattagactaacacaaaacagttctggttagtatgagtaataataattaagttttgttgtcggtatttagcaatcaattttctaaggatatactttgacatttaaatcaatagagagtcatgtaatgtcggtcgaggacttaaaagccagctagaataataacaaccccacatgggacatttataaaaaggtcacacaaagtaagtaagtggaaaataactcaattccagaccaacccaacacgcaatttaattctctctaatcaatttagttcctaaatatccggtttttgagaagaaacccgcgtttaccggcgaatcggctctttactctctagccggagacgagatctacaattttgacgactctgcctaagatatagcaattattgggagctgcacgaagaagattttatttggtcgacggagctggaatcagctattctttcttcttctccctaatcgtttcttttagcagctctttctctctcacccgaaggttcgttatctcttttcctgattcgatccgtttctttttatttattttgcgtcatgttttgagttttcttctgttggatcgtctaattcgttttagtttcgaataaaatggatgatccagatttactaagcttgtttataatcccacatgaaagattaatctcgtcttaaaattcgtcgacaaatcgtttgttttgaaatttggcaatgttacatgttttacatcccattgtttatctcgtatctgcaattttattttttgaagaagcttttggtttatgaactcaaaacttgtgtgtcatttttcaggttggtgttaagctggaaaggttggtcttttagaagatatggttcttgatgggattgtatcatcaccattacggaggccacatgctcttaagaagcaatgggatgacttgggtagctgctctactgttgtccagaggcatcgtttccttttgactgctatgcttcttttggcattcctctgcaccatttatatctactttgccgtcacactaggcgctaggcacttgttgtgctcagggatgactggaaaagacaaggcaatgtgtcaaatggaacacatccaagccagtttctccaacggaaaactgaaattcttctagagtgtcagcctaagctgattgcattatataaacatttgtctctctgttgaaatgtgtgtgtaatcgcctaaagaatggcttgtaaacccatcagaatctacacgtaccttattctactttgattatgtcccaagattcacagttattgtacaaatatgaatcttctgtaatcgaatatatatgctaaaagttttggagaatacaagtttttttctttgacatcatcaaattttttattaataaagaatggaacattgagagaatttgttatcacagcactttgtacatttgcagtgttttaggttccatcatcaccatgttcgttgaggaaccagcggttcaacgtctaacttgggcgataaatcaaagagggaagctggagcagtcatgtcgacgctccaagaatcatccatgttgatttccatggcgcattcttcttcgtcctcctcttcaatatgtaactccaaatcttcgggtgatgaacggatcctctcaagctcaactgaaacctctctcatatttggtcgtttcttcccttttagacttaaacaccttctggcaagtttcgccacagccaacacttgttccaacgtgcaaccttctttgatccgagaatcaacaatatcaagaactctgttctgtttcatagcctcattgaaatgagacacaagtcctctgttttcttcgggccgcattacagaaaacggcttttctccagttatgagctcaaccaagacgaccccaaaactataaacatcacttttatccgtaaactggctagtttgaaagtactctggatccaagtatccaaaagtacctgcaactagagtagtcaagtgagtttgatctacgtttatggatctcgaggtcccgaaatccgataccttggctctatacttctcatccaaaagtatgtttgtggtcttgacatctctatgatagaccggagttgatgcagccgagtgcaagtaagcaagtgctcctgcaatctcaacagagatgcgcaatcgcacatcccaagtcatagtgtaatcatcagaatcatggtgaagccgcttgaataggtctccatttggaatatgttcataaaccaagataggaacctctgtctcgagacaacaccccatgagtttgacaatatttctatggttaatctgcgagagaacaccaacttcattgataaactcctcaactttatcttcatctaaaactttagatcttttcacagcaacaattcgcccatctaccaacattcctttgtagacagtgccttgacctccttgcccaagaaccctgttcatattgaagttatccgtcgctttctccagctctttcgaactgaatatcttcgatgactgcacattacctcctcttgtagttaactgttgtttcaacaacaagcctccattacgtttaaagaacattctctttcggataatcttccttctcttcttaacgaacttgatcaatccccatatcccaagtaccaagaacaacagtggaaaacctagaacaagacctgcacaaggacgaaagaaaactataaagatcatcactcttttttgctctgtgatatgactttggaatctggaaaagaactccattgattcacctggaaacagaggcttgatcttccctactccattcagctcgcacctccacgatccaggaacattcacacaagttagttctccacagctgcttagtccttttccttcctcacattcgtcaatgtcttaaaaacaaaatgaacaaaaaaggctgaatcaacacatccgtaatcacttaattaaaaccccattgaagccaaatagacgaagaaacacataaatcttaccaatgcatccaccaggaagataaggattccctctgtaaccaatctgattgcagtaacagttactgtaaccaaagccagagaagttaccatactcacaaacacagctcggtgcgctcgtgtaaatccctgtttccgtcaaattcacacaacccacaggattcgttaaccgagaatctgatgtatcaaagtaccaaccaagctcaatcaccgtaaacccattagtataaaattgttccggctctgtaacattcgccggagagtaagtctcattcgtcaagaaagcaactttacagtttcctccttgagttgtgttaccaccggagctttcaaggtcaacgccgattacttgcggtctatccgccggaatcttcgcctgacaacatgtgtaaccaccgcagatcttgtctaaacgactcttatctccgtcgcagctcgattcgcatcctgtgatctgagattcgatgtctgtaatcaatgctctgttgtcacaaccaactgagacgagacgattcgagtcggtgatgaaaaagggacttcctttaccggtgaggtttaaaggaagaggctttacgggtcgttgagaacagccggaggaagtcaccggagatttaatgtgaacaactccgtaggaactgtcgatgctgcttcgaagagtgatgctaactaattctctgttgatcttatagaggaacggagctaaggatttaccggaggtggtgctgttacagacaacctcgtaccagtcgttgagaaaacagtctcttcgtccgattccaaaaggaaaaggaatctcgattcctccacagatacggttacatgaagttgaagaagaaggtggagattgagctgtcgttatcaaaggaccattgatgaacagagttaggatagagagtagaacagagaaaaaaagtctccttctcttcattttttttttctctaatgacttttatgtatgaaagttctattttagaaattattgagccgtctcgttggaatttggaagttctattttgtcaacggtcaagggatcaattatcattacaagtttacacaacttattgtccaaatcaattttgtaatttttcataattagaatcttaattttagttatacgattttactatcattttttttcccagatgatataacaaagttgattattcacatagattattaatatcaggaaattgactattcaccaacgcaaatcattcatatgtgtgcaatggaaaagttgactatcttaattcttaaactaaaggatccttttcatcagtcgaaatttctaaattatgttggttaaggttccatcacattgtcaattaacataatttctgttaaaccgaaatgaattggtcattgagtcgaatcggattaaggttcaacatgatccatgatctgaccggattcacaaaattctcatataattgtagtataaatttttttttaaaaacagtctcaacggttttatgttttggacatgtataattatgtaagagagcccatgtccagataacaaatacttgagtaaattctgtaataattattgccaaaatatttaaagaagtaaactatgaaattattcttatgtattgggaagtgtatagtacaaagtacaaactacaaagtggttacaaacagatctgtatggttaataacacaaattgacgagtgacgacatttatagaaataacttcacacgtaaagaccaaaacagaacgtaaatgcaaagatatgaggtagtaataaatttgtttgcatgcatggttaatatattaccgaggaaacaatggttcaacatctgaccgcgacgaagatgttgtagcaatgctgtattgagatgatgcggcggtaacactcacgtagtttctcgactctacgttaacgtccactaatgtttcttttttttcttcttcgttttcgctagcatactcatacggctgcatatcttcagaatatgaacgaatcttctccaattccatcgatacttgtctcatacttggtcgtttccttcccttcatattcaaacatttccttgcaatttttgcggctgctgtcacttgattcaacttacaaccatctcttattcgagcatcaataatgtcggagagtctgttctctttcattgcaagagtgaaataagttgccaatgtcctatattcctgagatcgcagaaaagagactgatttttctccagtgattagctccgctagcacgactccaaagctataaacatcacttttgtctgtgaattggctcgactggaaatactctggatccatatatcccaccgtgcctgaaactactgtagtgaggtgggtatgatccacggtcaccgttcttgaagtaccaaaatcggacactttggctcgatgtttctcatctaacattatgtttgtagacttgatgtctctgtgatagattggagatgatgcagccgagtgcaaatatgaaagcgctcctgcaatatctacagcaatacgaagacgcacttcccaagtagtcatcgtataatcatcggaatcatcatgaagatgctcaaaaaggttaccattaggaatgaattcgtagactagaatagggacatctgtctctaggcaacaccccaagagttttacgatgttcctatggttgatttgtgagagaatgacgacttcgttgatgaactcttctagcttgtcttcgtctacgactttggacttctttactgctactattctaccgtctacaagcattcccttgtacactgtaccttgacctccttcgcctagtattctggttaagctaaagttttcggtggctttctccaactctcttgagttgaacactcttgtactgtccacgttgccttcagttgtagtcaattgttgttgcaacaataaacccccattacgcttaaagaatttcttcttttggtttaacctcctttgtcttctaataaatttgtataaccagtatattccaccaatgaataccaatgtgctgaaactagtgctaagccctacaaacccacaaaagaaaaatgaaaagcaaaatacattttctatatggctcaacactatttgtacacaatcttatatatgtatatataaaagaaaactttagatagatgtgagtgtacttgagatgaaaattttcatgacttacctataacaagtggtcgatgatttgtgtactcacacgtataaccgcccagcaaattgacacacttgcctgccgtacagactgggtttccatcaatgcctcttacgcattcattaatatctgattttattaaaattaacatgttatcaaacaatgatctcgttggaatatttttatcatgcatggtcatagaaaactaggataattagcgcaattacttatatacctttgcattcgccaggaatatatgggttgccttcgaaaccactagcgcatgaacatgttgcatagcctgtagttgtagagttatagtcgcaaaggcaacctattccgtattcacgattgtctcttcttagaattgtgtactcgtctatacttttgcatcctagagagcctatgaaggaatgattcgccgtatggatgaaccatcttaggtcaaccgtatcatatccattagcatgaagcctctccgggtcagatccatttgacaaaaagtattcctcgtctgttatgaaggcaactttgcatcccttggattctgtgttactatcatctatttccacaccaataatctgttgatacctagcgggcaaacttgccttgcagcatccaataccgttgcagcttgtatcattcataatggaaatatttttacaatactcggaatcgccatacctagcattacagtagagtaccccgagataatcatttataggtatatcttgatttgtgctgcaagtagactcgcatcccacaatacttggctcgacatttgtcaacgacgccgtgttgttgcagccaaccgctatgagcatattgttgtcgccaaggtaaaaagggtaacctgtcatatttaaaagtgatccaaactcttgtccgccacttgagcatccctttgaagctattgggtttcttatgcgaattgacccgtagcctacgttaaagaaccggcgatacatatccgaaaaagagatactcacaacttccctgttaatgatggaaagaaaaggaacagagttgttgacacaaataatctcgtaccatttctcgagatagcaacccgttccgattccaaacgggtacgggatgtcgattcctccacatgtcttaggacaagagctagcaacggtgagatcaatgatcagaaggagagagaagagactcaaaagagaacaactacaattagagctcatattaatgttttctgtttatgatctgctcaagaaaagctaaaagcagagacgggttttgtaaggatgagcgaaggaaaaatcttgtgtttagtttgacccagcaatgaatcataagtcttcatctttgaatttcgctttcatattttcttctctggtcagtctttgtttctctagtcctcctagtgaaagcttttcttgctttcagtgagcctccttgtttgaatttcaatattttatattcctccatttatttacgagaaaaaagaaaaatatcaaaacgtgactggtttaggtcgcgaggagaaatttccactgtaactatcacaatccgactctagattaaaacgtggctaattaaatatcaaaaagagaacaagtatctgtagagctcatgcatgtttattatgtgttatgatctgctgaaacattagtcagagttgcgttttttggattttcttttgtaaggtcacacgcatgaacgcaagaaacatagagaagtgaatctagctcagcttattgttttaggcttattagaatagtagacactttttaaaaagtaatttgagaagtaggtagtttttttagaaatttgtgaaatagacactttttttactttttttgtgaaatagaggttatgtgtaataagctaaaagacaaaaaatatgtcaaataccattttaccttttactttatatgaaaaaatatgggtcaaactttttatattatttaactatttagaactatttttattatattatagttattttttttttcatattcatctttttgaattttataaaaataaattatttttaaaaaataatttcttcttccaaaaacaagatgatttatatgtttttaattataattctcgtacaccagcattaaaacatagttttgtacactaacacttatacaccaaatcattttatacatatcttctaaaatatttctatttatctcatatttataaaataaaataataattgttcataaattaataaaaatataatggtgtacaccatcatgtatactattaaattaaccataatggtgtataccattaaatgaaagtaatgattatacatttttacttatgtacactaacatttgtacacttttatgtacactaatctcatattattattatttaaactttgttttgtatattatcacttgacaaaaatggttttatcttttgaatatgaggtgtacacaataggtgaaggtgtacgatattatatacggtgtacaaggtgatttatggtttgatttattatctcattattgcatgtatactattaatatcatgtacaccatattttacattttcgtacaccatcttattatgtagttatacatcattgtatattatcgtttgtacatcactttgtacactgtctataccgtataccacttcttagatcattaagaaacaaaagttatttttgactttatttgactatatgacaaaacaacagaaggctataaaggtcattcactaaaatctctattagatagaaaattgtattagaaaggaaagagaaaagtgtctattctccctatttctaaaaaaactacttactttgcaaattatttgtgaaaaaagtgtctagtttccaacttatctctattgttttctgctacaatatttaataaatcgtactttctcctatacctaaatcaacacggcctttatttgttagagtatctccatgggatagatacccttgctagtttctcaacaaaagaaaaaattattattttaattatataatatattttgtttcaattataatacttaaactaatatttgattgacatgccgcgatttaggctgagaatcgtttctccttgattctcaagtgagaaactcttcttccactctctcttacttttttacttttgggttattattttattattaagtttctcattcagaaatgatgaagatggccttacgtttacattttaaaacaaagaagcatgtagtacttttgaatattgtttctcaccattattgtacttgtggaaaacacaaaagtagttgttgttactttcatcactctatgagcaataaaaatgcagtcctcgatgaaaatgtggctaagaaatgttagggaaatgatccaaaaacctttttgactaactcgttttgacctgtcattactattattacatagttatctcatttttggtctctattgcaagaatcatgaaatcttcttataagagactttggtattacccacaaaacaacttaataattttaccttttgatattatataatccacacaactaacatgaactaactgctgacataatcgtcttaacattaaaaaaaaatgaaatgaatgcatgcattgcatataaatgtacaaatgttggcttgatctcttgacccctacctaagacgtaagaaggtattttagagctgtgaaatgtgtcaagctgagtctcggagtgaaaagggtccggtttagtgaagccaagtaagcaaagccccttgtttttgacggacattatatctcctcctcttctcttctataaattgggcacctttttccaattttacgcacagtcacggagatagatagtaagagagagctatggcggaggagcacttcgacgttctgactaaatccggtgagaagaccggtgtgtccaaacccaggcatgtttattgttcatgtgttttcccttttcttgtttgatgaaaagtactcggaaatcgaattcgtacgctgagatgtttgcacattgaaattttacgtctttgttggaaaaagtcatccttttcttaggtttggggtttgatttgatgcttcgttgaccctatcaactacacaacaaactcgaccaaagagttttaggtcaatcggagaaatttcaattcgattttggttttaaaaaaagtttaagctgaaaaatttgggatttttttcttcatgatcagctcttctttggagttgtttttccagtgaattaacctcaattcgtctctgtttggaaccatgtcattgtaggggagaggttcacagagatggagattaccatcgtgctgttcatgtctggatttttgtggagactactcaacagctacttctccaacttcgatctgatgataaagattcttggcctggtcaatgggacatctctagtgctggccatatatcagctggtgatacatcgcttctatctgcacagtaagtcaatcccattctgctttcgttacttcttctttccgtttactaaagatttcaggatactttctgtaggcgggagcttgaggaagagcttggcgtaaaactcccaaaggatgcatttgaaaagatcttcgtttttctgcaggaatggtttgtctcttggcctatatgatacatgttctctgattctttcaagagacattatttgtagcttagtttgattggtatatcttgaagctaacttgctttcgcttatttaaataagcattgtaatttattactctcaacttgagaggtattcttaaagacagtgtgctgcttttcttttgtgtactttgacagtgtcacaaacgatggcaaattcataaataatgagttcaatgatgtgtatcttgttactattctgcatccaatcccattagaagcctttactcttcaagtgagtttttttccttcacgaagctgtaagtttaagtagtataaatcacttggattcttaagtaacatttttttatgtatgtattagaaagaggaagtctctgctgtaaagtacgtaccttacgaagaatacagaaactttctgtctaaggaagatcctgcttatgtgccatatgatgttaatggagagtatggaaaactatttgacataatcagacagaggtacagtatctctatttcggtttttctcctagctattcctttttttttcttgttcatatctaatatcttccatggtaccaaatgaaaacttttatgagtcaactattgctgaggtacatattttatatagatatgttttcttacatagagtgtttcttctgaatttgttgaaggtgccaagtgaacactgaggcccgtagtttatctctgcagaagcaactccagagatattctccagtcaccctcgaagccaaggtattaatttgttacatcttttcttgtgatttctttgtttcatatgcaccaaataaatcttattttgcaccgttccataaaagacattttgagacacctttcatttatatgcagttgacagaactttctgaagcagatcagaaagcgttgggtctaattgtgaaggctgcaaaaattatggacgatatattctatgagcaggttctgtggagtccgaaatttcttctttttttgaccgtgaacatgaaatctcagatcttaaactaaattagaaagttatcctttatcaggtttggaacagcaatccagccctaagagattggctgaaggatcatgccaatgcatcaaaactggacaaactaaaatgggattacttcacgatcaacaaaagtccatggtgattatcatcaaagttactttgttctaacatttatgttctacggaaagggttaggattcatcaacggagctgttgcagaatttaattaaagttgcaaaagatttttgtcttgaatataattcgttaacatattggtgtgtcaatctcatgacgattaggagagatgatccaagagattgacgttcgtattttatttgcaggtcgtctcttgatgaaaatgaagcattcttgagtactgcggattcagctgtaaagttgcttcctggagcaacaaaagccatagctggctggaagggtcttgaatatagagcagcctttccagtgactaaaccacctggtgccaatttctatcctcccgatatggataaaatggtattcacacatgtttgatgtgtctttaccaattccttttctgttcccattactcgtagtaagaaatgtgtatctaaaattataggagttcaccttatggctcaatggccttacggaagagcaaaagcatgctgcaacaggatttttcagtgttataaaaaggcgaagtgaagctaatttagatgcttctgatcatcttgccagcagcacaaagaagttaccagactctaattccgatctgtatagtattccttattcagagatatatcgacctttcctcaagaaagcttctgaattcttgcagaaagctggggacttggtcagttcgccaaggtatatatttcaaacagtttcttacccttaccatataaaatgtattcacccattcgattggcttagtatattgaagtattcacccacaatgctttctcatagtttgaagaagctactgcacagcaaagctgaagccttcctttcaaatgagtattatgagtcagacatcgcatggatggacttggtaactcttctctgttcatacatggtcttctagtcttctgtaattttccttccttataaaagaggatagctcttgtaagacgagctctggctattttaatggtccgtaattttctgtcacatatcagtcatgcattatagttttgagtaacttttgctttgtcttatcatcttttgtaggattcaaagttagatattaccattggtccatatgagacgtacgaggatgaaatctttgggtataaggtaagactttacataagcatgtgctttcgcaatgatttgcttatgctgatgctcatcctcgtcttcacataaccttcataaattgcaactccctttaaccattactctctaatctgtatttgttttccgtctaaggctacatttgaaaccttcatcggtattcgagatgataaagccacagctgatctgaaactctttggtgacaatctaaaggtactgctctcttcgtagctgctgtcaatcaaagttgcatttctttacgttttcaattttcttttctctaagatcatttttcattttctactttccggtagctattggaagataatctcccgcttgagagtgtatacaaatcgacagatgtatctgctgctcctattcgggtcatccagttaatttacaattccggggtaagttcccctcggcatccatctgagataggaaaaggaagaaaatgtattgccgttattcatggttcacttgtttcttgattgtgacaggatgtgaagggtcctcagactgttgcttacaatttgccaaacgatgaaaaaatcgtgaaggatagaggaacatcaatggttatgctcaagaacgtccaagaggcaaagtaatgtcccttcttcctccatatttcatcaataaacggtgtcataattacatctaactaatgcttttttcttttctaggtttgaacatattttaaagcctatagctgaaatcaccatcagcaaggaacagagaggattagttgattttgattctttcttcactcacaccatttgccatgaatgttgccatggcattggtccccataccataacccttcctggtggtcaaacctcaacagtgagaaaggttatactgcttattggaagaatgcagacatctaattaaggattgtttgcgctgtgactagtaatttacctttgttttctcggtatttcctttgatctaggaactacaagaagtccattctgcaatggaagaagcaaaggcagatatagttggtctttgggcactgaagtttctcatcactaaggttaatgatcatatttgctagttattgaaactttgttcatataagtctaattttcagacaatgtaaatcaacaggggttgctttcaaagagtatggtggagagtatgtatgtttcgttcctagctggttgctttagatcgatccggtttggtctcacagaagctcatgggtaatgaatgatctagagaattatataatccgcactcctatatgtatagttcctgacattattgtctattttggcctcaggaaagggcaagccttgcaattcaactatttatatgaaaaaggagccttcgtgttccacgaggactctacattctcggttgatttcgctaaggtatcagtccaagtttacatgaaaaactttctgattagtcatatatcgaaacacctcctgaatcttgttattccggcatgtaaagatcgaaggtgcagttgagagcctgagccatgagatactaactattcaaggaaaaggtgacaaaaacgcagcaacattgcttctaaataagtactgcactatcaccggaccattgaaaaccgctctggagaatctcgaacgcgttaaggtacagtttctttacaggataacaagacctaaattgagttgagaattgagatatccatgcagatagaatgatctgcgttcatggttttgtttgtgtgtttaggtaccggtggatatatctccgacatttccattagcagaagcattgatgaactgaggaaagtttcagtttcagcaagactctggttttaacttttaataaataaataaaactcagatgatccatcatcataaaccaaatttgggatttaaaagagttatctgaatggtgttgtgttcttatcataataaagttgctacctttacatctttattccatagaagaaatttttgagagctttaagatagaatgttatcatcatcactaagaaataatatttgatgtattgtgtagataatcaaaacaaaacttgtagaaaatacgattaaggtccataatcaaactcgttatagaagccaggatttatataagaattgaaacaatcgaatattacgtcttcctcagtcgctaacttgccggaatcttgacacccaaaatacgtctggatatcgtcggggaagctccggcgagttggaatcacttccggcgatgtagatggttcgattacttcctctgatttcggagatttgttatcatccgacgattcgggctcgcgactagggcttcgaatgggcttagaatcggaatcggctttatccgcggcggcgttagggtttagataacggctgacgtcgaaattggtaacggcgttaagtccacggtactctattgccgcgatgtcgtaggcgattgctgcttcttcttgcgtggctgcacgtgcacagggtttaaaatgttacaaacaaaaaaactttggtactataccatattttcatagaactttcatcccatttgtataaatatggatttttctttttttcctttttcttagaacaactttcccaatttgtataaagtggatttctatcacgtatttgcctaatatagtatgcatattgcatgttcatgtgatcaatacagaaatatgcatgtcatctgatctatttataaataaacattgtctttgcatgtataatctttttcaaagatcaggatacatgacctaataatttgtattaatatcatcgtcgtatcaataattcggatttaattttgctaacgtgtttaattttatgtgtgagatacataagacaaaaatagtaataattgggagagatataatatgtaaagggaatgaatttgtcaataaaagttggatgagtaacttaaaaagttgaaaacaatatagtaataaatagcttgagtaagtagatgggattggtgatctagttcccaaccaacaagatttgattaccctcttaaaggttcataaacactactaataagtccatatatcaagcatatagtataattattgataaatagtacaaattattttgaattttctatgagatctatcatgtgtgtgacttaaattttcttggagttgttgtcaagaaaaaaaaaacttaaagagttgttcgtttgactacattcatgcataacgtgaccttctttgttccctaccatttttaatatcatttctattttatatgtgtagtataagatatgataccatgtcatcgtctactagagtcccacttaacaggagaacagagaataactcccattttatactaatcccaaatttcaagatttggatttgctaggaactggattgtactaaagtatgaatttacacatttcataaaaatattactataaagtaaggataatggaatgaaataccgtatgttccaagatatagatatttattaccaaacacccttccaattctagcttcccatctcccattatggtgatgcctgcaaattcatcatgattcaacaacttatgtatattagagtagttctacgtatcatattgaaattctatctaccttgcaacgcctctgtattttgatacaccgcgagaaaatccactactttttctacaccgatatattgtaagttaattataaaactatgattaatcaatttggtataattgattgcttaattagttaatttttaccttctcaatgatccaatatactcttccttggattggccttccatttctttgacgtcttcgtcataactcggcaactaaaagattcaccaaacaacacgaaattatctttaatgaataaattattgcaagtatacgcatgtattttgtttttgttcttttgttctaaaaactagtaggcgagaaccgagaagattgtgtagctaattacaaagatcatgagagaagtagttcattaaaaattaagttttaccaaaagtaatactccctctgtttctatgtaaatatagtttaagggttttattttttttttcaatttaagtgttgttttcaactttttatgcaaataataaatgtatttaatattctttaactaattatatttaattatttatttttttattagttaaattggttataataaatgatattattatataaaagagatagattaaatgagatttttatgattttttaatttatgtttaaaacccttaaactacaactaatatgaaacagagagagagtaatatggattgggagaaacattacagggaagttcaagagtgtgtctcgtccccagtacttcaatgctgctaagtcgtaggcacgtgctgctgcttcttcttcgtcgtaagccccttatccataaaaccatatattaatttaataagaattatacaatattgtttgaattatatttatataagtcgaaaaggacatatacgaattgcattggatttggacccaaaaaagaacagctaataataaacaggttctaccaatttcggtggaattcattctttaatttacagccatatcacacatgtatatatggacttttttcatcactttgtcgaagagtatttaaaagaaaaagtgacaggaaaaaaaaaagaaaaagaaggaaaagtacaatactttatcaaaatgtgtatttttttgcaacttatataaaaaaataggatattggcaagaaaaaaaaaaaactcacctagataaactgcacttgatgagtcagcattcatcatccattgcacatcaccatcatcaaaaataccaaattaaaaaaatatatgaaaaagatcaagaatcaaatcaagaacagtcgaaggacaaagtctggtccgaagaaaaaggagtctccgagttcatcggaatccaatctaagaccaaaaagatctaacaaattcttgttagttgttaccaacatatacgtgttaagtgtagacaaaccttgacgtcctttcttggtctgtgtatcgttccagctgttcttatcccacaaatgcgcttcgtatctcccagtccatctatgcctattattattcaacaatcggaacaattaaattacctgataaagaacgatgtcgtttatggtattatgagaggagagagaccttgtgacgcctctgtaaggggagctgcgttgaagaggagcgtttcgaggcggcgacttacgtttgcgtttggatgttaaggcaatggacgcagactcagacgcagacgctgttttatcgctgatttcatcgtcaacgattgttttcttgctcctcccagagacttttgccattaccggtgaatgagaagaataaaagattgagagacaatcctgaaaatggaattatgaaaatgagagacagatagttggaaatggttgagtatatttatattaaatccgtcacatcttttttttcgtttatatatatatatatatatatgttaaaattttagaacaattttttggtttaaatacagattctcagccgaatattttaaattgtactgatcatatgataaagtcactaagattatggcactaattatcttgtatttttttttaatagattttatttccggtgatataaccgtgtctagtccactgtcacgttttcttaattagattcatatatgctaccatttttgcacttttcttagtcagattgattattaaacaccacggttaagaatttctcaaatcagaattaatgaaccattttctaaattgattatgactagcaaaaaagatccatatctgtattattgtttttatctgctcatttttgtcgaagaacctaattagccaaagaaaaaaatggagtgcctcaagttttatcgattcttggttgatctacttcttggtcggcccatgagagatgtgatgccgaactagcaagaaactttgttatattttttcattttttttgtacatatttacctgttctcccaataatttagcacttggtaaacaaatatgacgttttgatcataacagcacacacacacacacacaaacaggagaaattttatcacacaataaatttcataacttccaaaccattatctgttttattaatgtttgtatgaataaaagtcataatttattaaatataatgtgtctactacctgccctcatttttatgcaggtggaaggagttgtcaacaattatggtaaaagtttgccaattagagtccaataagcacccttcaaatcaaatgtatttggtagtgacaggtgaggaatctatgtgattgtgaaatttggccatctgaaatcataagtaagcatttaaataaatactttgtttattttcgcatgaaattattaggtattaacattgattctagaatgacaaagatgaacctatgacaaagtatcaacattaaagaccctcttactaagacagaggctttgcctagtttggaacagacaggacatgagccaaatgaagcccacaagacgtctacagaaacaatgggcccaaataagcctaccgaacgactaaagaactaatgggccacaaaaagcccatctactctaatgttctatatctttagaataagtaatttgaaaagattggaaccaaagtcccattgatcttgagtttgaaattccaagacatttttgtgtgcgtgcgtgatttcgtcatccgtgacgtcttcaaacattggttatttaacaagattctctgatttttgattcgtgtgctttctatatagttgggtaccaattcattagtcagatcgcttgttcgtcaacttctctctctaatggccaatcgatcggaggaagcagagtacgagaacgattctcggcgaaatcatcaagacaagaagaaagaaggagttttagatctggtactgaaacgacctttacggtggctaagaatgctcatcgaagagcttcactggagcttcttcttcggtgtgattatcgtctatggagttagccaaggacttggtaaaggtctcagcaaagtcagcacacagtactacttcaaagacgagcagaagatacaaccctctcaagctcagatttacgttggtttgattcagattccttggattattaaacctctctggggattgttgactgatgttgtcccagttttgggttacaggagacgaccctatttcatattagccggtaaattcactgaaagttagtttctttgcttcttaatgaatgaaagatgtaatttttttttgttcgattcgattttaggttttcttgctatgatctccatgatggtgttatggcttcacacgaatctgcatcttgcactggctttgtcctgtcttgtggcaggaagtgctggagttgctatagcagatgtaactattgatgcttgtgtgacacaatgtagcataagccatcctacacttgctgcagatatgcaaagtttgtgtggtttgtgttcttcgattggttccttggttggtttctcccttagcggcgttttggtgcacttggttgggtccaaagtaggctctttaaagatctctttgaatgcatagagtcgaaatgcttcaagtgttttccactcattttgtcttctttttttggtggcagggtgtgtacggtttactcggtgtgacggcaggattgcttgttgtggttgggatggttctgaaagaatctccttctcgcagtctaggtcgcaagcatgtaagtgttttgctaccctttggtccaaccagattctttaagctagtaatgtaatcgagtaactgtgctttcaggttaacgacaagtttctggatgctggaagtgcaatatggaaaacctttcaatatggtgaggtgtggcgaccatgcttgttcatgctattgtcagctgcagtgagcttgcacattcacgaaggcatgttctattggtacacggattcaaaggatggcccttccttttcaaaggtgctttcaccttttgcataagctctagagctgtaattcaccttccatggccttgcttaaaacatttgggaactctctgtgatgtttttggctaaggtagttattttctgttgcttaggaagccgttggatccattatgtcgtttggtgcaattggctctcttgtgggaatacttctctatcagaactttctgaagaacttccctttcaggaatgtcgtcttctgggcactttccctatctgtcctgtcaggatttctggatttaatcctggtgctgcgcataaatctgaagcttggtctccctgattacttctttattgtggtagatgagtttgtttcacatatgataagtagaatcaagtggttacccttacttgttctcagctccaagctctgccctgccggtatggaaggcactttctttgctttgctcatgtctattgaacatataggacatctagtgtcgtcatggggcggaggagtactactccatgccctgaaagttacgcgtactcagtttgataatctctggttggttattgtgatcaggagtttattgagggtaatcccaattggattggtctttttgataccaaatgttgattcaaactcaaccattctccctgctgagatgttaacaagtagaataagtgaaggtgttgataccgagaagatagagatgaccgctctgatcagtgatgaagcttgagttatatcagttctgtttttaggtacaggaacatcagattcttgagatgaccgttcattgtttgttgttcttatggtttagataattttccttcctcgcagaagatcatcgaacatttttgcttacaattcatcatttgctataccgatacagaaatatatttatttataagattagtgggagaattcaaattggctttgccaaaagagatgattggctttcatgatatgaagggagcacacaaatggatattaagttatggtgtaggcatcagactctgcagttttctccgacaattcctagcctctcttgtgtggtatcatatattactctctggtttttctgctgataatttccgatgatcccgacttcattttcatatgacagacttgctaaggccaagcagactagagatgcgtcaggcttgacaaagtagaacacaccagtgacatccacttcgagctcagcgttaccttggaagatcattttgataatgggaatgcttatgtcttcataacttgtgaggttaaagcaagtgtctaagattgaataaccaggagcagtaggaaacccggaaaactgtttcagaaactctatcttcacagctttgtaaatggaaggtggcaatcttgtgataaccgttcctgaatcgattagaatccctctgccaaagcttgaagatttcagttccacgccaccaatgctagcaccagtgagattcagaatgtaaaaggaacgaagctgagggttttgtactaacggcgtgtaggaaactgaagttgaattcgtgtaaacagaggaatcgttaccaaaggacaatgagccagaagctccatcctcaagagaaggtaaacagtatgagaaaactccgttgaaagttttcaaagtttgggagactaaagagactgaacttcttcccaaacccattaaaccagaggatcccccaaacagacctttgttgtttcggccacaaccaaagacaaagttttcaagttttgtgtcgcccaataggatgctttcacttgccaagtctcctcgagtgtatgatccatctccatagctgacaacgtactcacaaggtgtctttacaacaccattgttacctccacaagggccggaattgctggtagctgccacaaggtcctgacaagtggatgagttacagaacaccgtcttgtaagaagatgagactgatgggtcatacaaaggaccttgttggttgtaacaggatctgcaaggctggcattggacccaagtcaggtcacttccagtgtcaacgatcaaactcatgtttttccctcctaattcaactgtaacgatgtagttcaaagactcaagttttatccctgaggttaacggaatctgagtttcggaaacagattgttcagtggtgcttgaggtcattgctttgattttgagttgaagtgactgaactcgaatgttatccaaaactaaggctcttctcatcttcttacccaaatctatagtctttcctgagcaaagttctctatgtttcatctccaatgtagtggattctcttccttttcctaagtttttcaaagcagaatcatcagttctcataaagatcaacaaatcttgtctctttgtaaaaagtaactatactaatcccaaatcaatacaaggaaaaaggataatataaagtagtgtaaaagctaatgactttaactaagagtttaaccttaaattacgccattaaatattaaactaaagcaaaagaaacagtatctctacggttggtgagcctttgatgaaaatagaactgaccaagactgcgagaaaaacatgaagttgaagcttcgtatgatttcttgggagaccagatgttgttatgtacactgagaatcttcttctcatcgacgccatgaacaacacacgagagaaggaaaagaaaaacaagtagcaaaggagcaagtgaaagattcaatgttgctttcttgaacattttcgtaaggaggattctcttcagaggaaattaaagaagaggcgagagagaagagaggagagaaagagagattcttgggaagtttggaggtagtgaagagaacaaaagaggagaggctggcgagaagtggcaaatgaacaaaaaagattggaccccactatgtgtgcatgagatcaaattattggggattcacgtgaattactgcaattttgttaccaaattactaaaaacttgcaatgtcttttggttgtttttttagtatatgttaattttcttttgttacaaaaataaaattcaacgtgagatggtggtgctactgatgttaagtgttggccgctagtgctaaaattctcaccattttattttaatctttgatgttattatacagattttttaaaatctataaacgtttgaaattgatagcagtgattaaggaaatttgtatgtatcaacaatagcttgaataatgattagatttaagcataactaaaaacaaggcattgtctcttttttttttttttctgtttttatattttttttcagccaatcacaaatcaacacaactgattttagcaattaacattttaaaacttaataaaatttccatatcaagatatttataagagaaaaaaattaatagacatacaaagagaaaatgtaattttaaaagaaaaaaaaaatcatatgaaaagaagaaaaatgcaaaattttgttattaaaatatatattattatccatattattaggaaaggaaaatattaaatctatattcgaagtccacatgtgattggtcatttcagtaattgacattttaaatttttataaaatctctacattaagatacttataaaaagcaaataactaaataaataaataataaatgaaacaataagaatgtaaacttgtttaaaaataatgtaaaaaacatatcgaaagaagaaagttgtaaataaaatatattcacattgcagagcttcccagtcaaacaaatcacaaataaaacgttacattatttagtcaaaaacggttgcttttttcctcaatagaaaactccctcacgcgcccaattttttaattttaccaaaaacagccaaaaacggtccacagattttgaggaggtggcgtcgacgcgctaattgtgcgagtgggtaagaatttgaatttcgcagttatgttttgggctgatttttatactgcccactgggctacacaagaggaaacccagtttcatataataataggcccacctaatagaaaaagcccttcgtaaaagaaaacatagtggaccataataatttcatttgtacaagaaattttgaaaatgtcatattttcgggaacctgtaaaataaccacaattgcaacactgggatctactacagtacaagatttgctctaatccatcctaattaattactggtagtagaacctgtataatattattacagattctaatcagctctggtagaaagacagtgtaagtaagtatctaagaaggcttctctgtacaaggaattctctcagggatgtgttctcatgaacatagccactgaagatgaacggagctgccacattagataggatcaaagtcgtaaatggccaattcattaattatggacgtgtacatgtaaaatcgtttttcaacttcgccagctatccaaatcaaaatttctttacttgccaaactacaaagctgtggtggaggccatattacgcttttaaattagcctacaatagccttgcaggaaaaccattgcaaaaccgattcaatagtttgaggtacacgaaacgttcattcagaataatcatcctcattaccatcactatattgattggcatcttgttccggctcgtgtttccaagatctaccaaggccgccttcgtcctctaatcttctcatcttggagctcgaagcaccaaccctagaagagtaaacctacatccaaagccccaaagtccaaaggaattggtaagagaactagaactttccacgtgttactcttttaaaggctaaatgtatggatttactatacccctgaatctttatgttctatcactgatacagttgatctccgccttacagttacccttgaaggtactggaaagtgttcaatctcatcagaagatcttccttccctggcccttttcttcctcaagttcaacctcatgggtaggggctgccaaattctcaacggtcatcccaaagtattatagacagaagaaaaaaaagatacacaactggaatatgtaacaaaaaccgatgcaataccagatagctagcggtcccattgtcaaatgataccaggtatgtgccaggatcgtttgcattgggttgtacctgttataacatcaggtgacatatttatttcaatctgcaactcaaacaatcaaaatttcacttaaaccacattggctatagtacatacatcccagaggtattcgcgaacccaagtgtaagagatttcttcgttttcatcatggatatccttagacaactggcacagcaacataaattgataacacatcaatcaaactgaacttttcttgacttgtcaaaatttgtgtaaaagagagatcagtttatggagaggcatgtctacctcatccaaggaaggaaccatgtacgccagaaatttttctggattggcagtgtctgatccagccaccacatagcttttcaaaatggcctgtggagtatgaggtcagagctcgtcatcaatatgaaaataaggcaatcaaccatagttaagattcagccccatatatcatatatcctatcctcattcaagtacacttatgtaagcaacaaaaacgatatagttgatacagtcatcttttctctcaggaacaaagtatccctatgatagagaccagagataattggaccatactcatggatatcggtaactcataactcacccgtgactcatgtgcatcacgaattgaagggtccaacttgccaaagaattcagaatcagctataggagcaccatcaaaattcgctaccacaaactgctcatcgtacctgtgtcaaaaaaggaaggggagagtcaaatgtaatagcatagtatgctacaggttcagtgaaaattattagtggatgtttcatccaaaaggcaatacactaaaaccctagcaaagaaacatttgaacaagagttggagcagagaaaagggaaaaattaaagacccaacatctctcttaagtgttgtatagttagaccttaacaaggctgcctattttcccacccgattgattacactatcctataggaaaactattcgtgcatgtttccgaccacaggagatccttcagagagagccaacataaagataatctgtaaagtgtcagctttcaagctgtgtctacatgtaggactattatgagaaaattttgcctgattcggtatttcagatttaagattgtctgcaaggggaaataaagagcatccaacctatcaaaatatggcaacagtggtagaacttcaaccggctgcaagtttttattggtggcatgaactggtcgagacttgcatgcctcaaaggatgcttcaatatccttgatttgtctctctctagagaccaaagaaaaataaaccattagacctttttttttctcactttccttagaaatacacatatttgagaaacaacacacctattgttaagattgtgcaagatgttgatgcctcctttcatctctcgcagttcctttgcttgcttctccgttagcgactacacaaggtaaacataggaaattggaaactgtctctagaagctatacatggcaaaacaaatttccaacaagcgagatggatagatacctgtcttgccgattcgttattaatagaagaaatgtattgtgttttgacgagccaagacatgcctttatcagtaggtctttctttcctccggatgccatctttcttaataggtgtaacagcgtcatcatcacgcaagagttcttcatcttcaggggcaagaggtgccttgactttgggagggctgaaaagagctacaacagtaagtatccccagtagatgaggtcgctggcattaaagacactaagactttattgagagcacatacttgtacacacttaggtcaagcagatccaagggtattccaagatcaggctcgacaaagatttttggtttccataatttctccagggatgtgatggtatactttgtaaatctagtgggatcaaaatagctggcaagtaaggacagtagaataacacagaaataaaatttggcaataatagagaaacatactgatctttatcccgtttaatggtcataagcttaagctgtgcactagggtcagggagctcattccggaaccttgaagaagaagatgaatatcagagtctaacaataatatgtaaaaaagatttaggtagtcgtttgaagaatactgacttgagcttgcagatgaaggtggttggtttctttaacctattctcgaccctgtcggtggtgagtaggggcgtcggcttcttctcctcggtgtgtcccttgggcatctgagacttgtgagaatttttcatctgctgtctatgtttttcgtcttgcctttgtttctctaactccctcttcttcctaagcctcctctcttcttcggtctcgattttcttagaatgaggaagatgagacctgtggtggtgcttcgatggatccggtttagcacgctcccgccttccaacctgcttggaggcccctttctcgtggtcattgggaccctggtgtcgaggaggatcgggaacgagcggaggaggagctgagggaggtggcggaggaggaggagcttggagctggttgaattgaggatagtggggcccctgctgatagtaagcatgcggaggaggaggcggcggcggaggatatgagtacggttgatgcgacggtggtgggggaggaacaggagggggtaacgacggcgggggaggcggaggggccaaagaattttgagatggtggctgaggaagaggaggatacggcggccggtacgacgccattctcggtgtactttgtgatctgaatcacctaaaccaactaaaacgagtcttcttgatatatattaattatatagctccggtcagactgatttttcctttttactttaatttgggcctcactagcggcccaataaccgctactatcatatgggttctgataattacggcttcaatacaaacaaaaacaatcttaagctcaccgttttatgaatcccaaatatgaacgaaacatgctttgtaccaccaagctcatcgacgtgtgactgtgtgaggaacacaaaatatttattttctacattgataattactcaaacattatgtacagtatagcgaaccgaggtgtgtggttaaacactcaacacgctggaccaacttatgaaaacctcttaccaggacttcacaagccgaagatgttatggtcgttggcactgaaaatagcaccgccaaactgcctggtgttcaagtcgcctccatcaagggcggtcccaaaacggtcaagccactgggcaggactgggattctctgcctcttccacccactccgacatcatgtcaatgtcctccagggcaattgggtctgtctccaaggttatcatcctccctaactttagattctgattcacgtacgccaacttgttcaatatttctctgtcaatcttgtttcgcctttcccagtgcatctgctggaatgtgctccattggcgttccaagttgtaaccgctgcaaacttggcttagtattctgatggccacccgctgcaaaacaggtgctgagtcaccaaactgctcccaccagagacctgcattactaagcaaaccattattagacatcaacttctagtcttctagtgcttcgttaccaattctaaagatcccagaccatacccctaatagcctggtgaggggaagatatctactagttttgcaattcggtttactacgtgccaggctatatcaacctggacttatttagttgtgtaataagaccatagctttaattgcggtcatagataagtggattatttttctcccgactcagactacctatacatctctgttcactagtcatgacttaaagaaaatataaatgtatttattgtccatacctggtgaaactgaatccctcgcctccatggccaggttacagccgaacattccctttgccctagtgaaagtgaatatctgatttgtaatatcacgccgtagatcgctagtaggaagaagtttctccaacactttgaaaaaatcttctttcaaggaagtgaggaactttatctctgggttatactgaatactggggttcaagaatgctgctgctgcatgaagaggtgaatgcaaatgctcacaccagttagtatcaactatgtcagaaaagaccttatgcttattctcatccatgatgtagtatgtccgtattgactccttggccttggacattaactcgtatatagaacctacagcgggctttccagtagaaacttccctcaacactttcaggataggctcggaaatagccacactttcttccacagctctccagaaatcattatcctctaggatattcacgcatgaaatgctctgtggtttgttagtatttgtggtatactctgggcaattgaacatgtgttttagccttgccttttgtttcatcattgactgtaatgatagaaaattggagacagaccttgtgacaccgcttcggataatatcttgcccgcctgttaactttctcaataaatctagcacggggctattgttgtagacaaacttagatatgacctgcgcttgcgatatacattgattgacccaatcaaccttggagaattcttctaagatgatgttcaaacactgagatgcacagggggagacgaaaatggttgcatagttttgcaagagatggtttgagataccagtgtagcagaagctgttgtccataatgatttgcacaatatgctcctgaccaatatcttggatgacagaatcaaagagatcagcaaggcattttgagttcttgaaatatgaggaggcgtcgacagacttgtgaaaaaagattctggaaggtgaagagacggagaagttaatcagtgctcgtgatttgttgtcggtccatgcctcagcgatgatagtacagccggtggtgacccactccttttcagtgtctttcagttgtaagctaatatctgacttaaccctgtccagccattcagtcttgggagaaggagcaacaaatccaggaccacacttggcaacggcgtcgagcatatggtgataagagggtgagcgggcaacagcgaagtcaatcttgttctcaaagaagaagagagaaatactcctctctgcaatgtcctgcgcattaggaggagaactaggaaagactagtttggacgcaggagcatcaaacggaggagataaaggtggtggaggcttgtacttgttggtaatggggggatcatccttggcagataaaatggaacgaactctatcagtaacatcgtccctaaccttggcacatggattaacccctttactgggaaggcgagagagatgatgcttcaatctactaatgccgccattaagaactctagagcaaaacttgcatttaaccttgttaccatctagtttctctgcgtattcccagcagatatctttttctcgtaccactgtctcacacaacaacaatcgaatttttcatctcaatcataggaaagaaaataaatagagctgctactttactttacattacttacttggtgaatgatatatgatgttgttcttcgtcagcttccacctgccaacacacacaaaaccctagtaaggaaataagaaatgtatggaggattctagatttcctcttgaggattgccggaatatgagaaagacacatgacgtagccaccggttcccggagaggagagaaacagattcgaagatctaatcggagaagaccaagtagcaagaaatcaaagagaatttgggataaagaagagtaattgggataagctgctttaccgagagagaaagagattcacttcttctcgccggaaccaacacttctgagaagttaatttttcgcgatattttgctctccttctttcttatgtcgtcgtcctagttttactttcccttccttcctctaattgtcgtcgtcatttcactcttaattacattttcaatgaaatcgatactagtttccaccactttcaattcactatcatccttaatttggttcactgcactaaacgattacactcaacaatcaagatattggctcatcattaccacgcactagaatgttttagctatcgatgatttgcagtatacgatgaccatacttgaagtatttaagtaagaagaagaaaaaaacaacaaagctagctagcagtcacaataaaattgatgatcctgaatatttcctaaaaggaaagcacaccatatgcaatcacatgttgctaccaagagactactagcatacacgagtatatggcccagagaaacaatttccataggaggattattacggacttaaaaagaaacaacaagggaaacagtgattacaacacaagattttaaagatgctgacaaacaaacaaacaaaaatctcacgggaagtggaaggtgaacgaataggagaggagagaaatggccataagagtcgtatgagacataacaaattagattaagcttatcctcagcggtagcttcgatacgaagggctgtacatgctgctctcagcacactgctccagctccttgggctgaggcaacctcgtggccagtcctatatatataaggaagtgtaatgttgtcattcacactttaaaaaagaaacaccacacacacacattacattactagtgcgattcacacttgaaacacattacatcaggcaacacaactacttacccagttcgtaggccttggcagccaccttagctgcaatacgagctgagatttttctgatattcctgaagggagggtatatcatccccttctcatagtgttcctccatcagttcctcagccaaagcttctgatgctgccagaagcatgtcatcatggacacggatcgtccctgacattattagcccgagtccaaacccagggaagatgtatgcgttgtttgcctgtccacataaacgtcagaatcaactctcttaaattacttgtcaaatcctattctacagctgtggtcacaacctgtccaggcacaaacgtctttccctcatactctactggcgcaaatgggcttccacttgcaaagatcgcccgtccctgtaaaaatagtttgactttgtaagtcaacgacaatactccacttctctctgatcatgagaaatcacaatcttaactcgtttacctgactccacgtataggcctcttctgccgtacattctgactgagaagttgggttcgaaagagaaagaatgatgggtttctgtatgcaccaaatttgactttatggtcaggactatgtgctcctagaaaaaatgaatatgccaaaatgcttctttctttttcatgcaagtccatgcggaaaaagtatacctcatttagctttgccatggtttccaccacgtcttgagtgaatgtttgacctacacctgatgttccgatcagaactgtcggcttgattgcctgatgaaaaaaaagaaaaaaagaaaaagggttcagttgactaaaaaaggcttcttccgcagagatatcttctgcagcagaacaacagccaacacaccttgacggcatcaacaagttcccttattggttcatggtcatgagcccagggctttttgaaatgttgaatggattctttccgggaactgacaatcaatccctacatagataaaaaggtgtacttagatttaagtacatgcaaaacaaagatgaatccgcatctcataagttacctttgaatccacgagccaaatattcttccgagcctcttccaatggaatatgggactacagtcaaaagaaaataaaagatactccatctaagaaaacaagaagcttaacagagaaaattaacacaaacatattacttaccttctttgaaatctcaagagcaattagttcagctattccagtgccagcctgcatcacaaaaaaaaaaagtggaagtaaaaccatataacaatcctgcagattgtcccatccccatccaaggaatagataaacataatgacggaatgttcagtgaaatcccaacccttacctctccagccccgaggaagaggaatctgtggtctgacaaggatccccccacaaatctaagagcagcgataagtccagcaagcacaactgatgctgtgccctatatatgaaattacagtttcacaagttggtaaatatgtaatccaagccgaaatcacctcctgtctcacaacttaaacaggatatagttatacctgaatatcgtcattgaaaacaagatgtgttgtaccatacttagctaacagatcaaaagcattatggttggcaaagtcttcaaactgcaaatcatcaaaagaaacatatctggttacaagacagcagattcatgttggtggagtacacttatcccacttatccatgtctcaagctaacctgaataacgactttctccccatagttctgcttgactgctgtcatgaattcatgcataagttcggagtattcctgtagaaagaagaggattaagggttcagtttcaccataattttcacaggaccgtctaactgaaaggtgaaaggtgccaattacctctcctgtagctctcctttggcggagccctatgtagaactcatcgttcaatagcttttcgttgtttgtcccaacatcgattgttacgggcagacactggcaaccaatatacagagagaaaaagatgagtggatatggttgaatgcaataaagctgattagcataaaactatacttacggcagatggccggacacctccaagggctgtgtagagagaaagtttcccaacaggtattcccattccctgaagacattaatgatggcatgtaatgtgcaaattagtaagaggataaaccctgactcaccactctcatgaaagcagaaaagaatcaaacaacttgcctgacatccaagatctcctaaccctaaaatgcgctccccatcagtgacaacaatgacctggatgttcttctcaggccagttcctcagcacttcatgaatcttacctctattattgaaaattgtatcctcacttaaaagatgagaacaagaatagtgaaagtggtagttgatttccgtataaaaaggctcacttttctttcaagctgataaaaagcccctgtggacgcaggaaaatgctaccatacttctggcaggcttccccaaccgttggagtgtagataacgggtagcaactcctcgacgtgatcaatgagaagtttgtaaaacagcctctcgttggtctcctgaaatacaaaagcattgtgaaagaagttgggtaacaaaggaaggcacttggtgtagttgagatagcgagacttcctaatgagttagtttacctggagatccatcatagccatatacttctgcaagggaacttgatactgacgaagagtgtgcataatttttttaacctgtagacaaagcgtgcagtaaaaggatcaaaagtccaaatctccagttgcatatatatatatagaaagggtaagtgaaacctgacaagacgggaaacctgaagatcttgtgagataacagtgggggggaggaggccgcgtagatagtgagcgtcacgctctctgtggctaaaggcaaggcctttgttgtgatgtggatcacgcaacaacgtatacccactggcgacagagagagaccaaggagtgataggcatgtcctcggtggcggcatcctcgccgtagacatcctgaactccaccagatacggtggatttgggaacaatgtcggcggcggaggtctcgagagaggaggatgaagtggcagtggtctcaatcaaaacgctgccggtgggatcctggttagatccgagagaggaaaagactctcaaggaagcaggaggagtaattatagttctaggctggcgcagagagaggcgtgtggaacatccaggaacaaccgtcttgttctgagaaaccaaagcaatgagactttttcgtatataaaaaaagatgagacatggacgatggatggagaaggaatgatgtaaataataccagaaacaacgagggagtgagagagatcatggcgtctggggatgccttgtctcttagacggaggaggagaagggaggagacggagagagtcttcttcttcagagcggccgtggtcgtggatttcagcgcggccgtggtcgtggatttcagcgcggccgtgatcgtctctcgctcactttctctcttcctatctccctcacacgctctaaatctgctgggagagagtcttcttcttcagaacctccattgttgacgtgtcttcttccttttctatctcttcccaaattgcgtctccactccttggcttctccctttatttaccaatttgccattgctcaccggtccctgtattggtacgcttttgtcaattttagcccacaaaatctaaattataacttttcgttgactctgacctctctctcttatttcttttcaattgaaaattgtgactcaaactagcaaaaggacagacaatttcaagcgaaaatgcaactaccatcaatgtactggtactaagtagatttagttggtttggaattggtatgagagagattcaccacttgccctctctacttgacatttatttttttatttatgtgacagaaaaggactcttccaacttggacttgtgtcacactcgatgcccatcctgtgaggatccacgtcaattgggtaaacaaaaggccgcttaaggcccaacttgggtccatccataatatgatgaatagtgtcatcctctctggtttttggaaaaggaaaagttgcaatgaataaaagcaaacaagagaattgcatctcatcattatgctctcgctttatttaacaaaaactttttctttggccaatgatcgatccttgctctacatatatacaagtattatcacgagtaagaccccaaacaaaaatgggagtttcctctcccgacttccgagcccctcctccgtccccggtagcatccagccgccgtgcctccttcacggccaacgaagacgtcctctcggagttcctggacaagtgtggtcgagtcccaaatcttgtattgcccgataaagtcttccccaagcacacattccttctcaaccctcccaccttcgatttccaccggttggactccctctcggctctgcttgatgccatcgccaccatcggttgttttcagctcgttaaccacggtgttccagaggctatggtgaaagccgccatggacaaaaccattttccacgatgagacggaggagttcgtgtttaataaagatattaatgctgatgatcacacggcttgttattcagatttgaggtaaggcagcaaaatttactatatatagtaattgattaggaatatatattgtttaaaataaagtagtaagtaatgatttgaagatgcagggagttgatgggtgaggcagagaggatagggaaggcggtgagagaaaagctaggagcaggaggaagaagccaaaaggaaggggtaggggtttgctacgtgaagaggcataatattaaaaacgaatcaaaggaagaagccataaggatgctgctaagaggctatgacgaaagacattctctatgtctcaacttctgccatgcagagttccacgtctactccaaaagaggttgggtctccttctccccacgtcccgatgcggtgatcgtcacaatcggagatcaaggctggagcggaagattcaagggcgttgtggggaggccccttctttacaaatcagatcttcatcacaatctgatttccatatcctttctctacactagtactaccactctccacaacacaagcagaaaaattaccaaaaggacgaagaagaagaccatttccctcttccaacagctcctctttgctctctttctcacactcctcttcccttttttacttccttgatcattacatacttgttgccttgttgctccttttttcctttttttctttggaaactaaaatacaagtgggtaatgtgtatctcaatcttgtttaattttagcctttttcccaagcaatgcatggcccaatcattcagtttaaaatcccgctatatccaaataacgatatttgacccctcacccattcggttatcaatctcatgcccaatccacttgacactgcgcaagaatcacatagatatatactctgaactctgaagtaattcttacataacccgagattaattaggtggtgcaagagcacatatccaccttcgagtatttcactgcaagaaacgtaacgtgtatatatatgcacagatttgatgtatagtaatgctatgcatcgttttcacactacgtatgtaatgtaagtgtaactataatgcaatatagacaacaagatatatagagttatgttgaatcagctacatataatagacaagaaatgtatgcatgcacgtgagcgtcctcccactttccaagttatcgcaaaagtgagtttaaaacaaccaatatatattttttcttcttcttctttttgttgggattgataatatttacaagtttcaacttttaacttcattacgagtggtcttcctcgagtccatgttgttcctctcttatatgtgtggttagacaaaactcccacacacgtgacctatatatcgttgtctctgcgatccatatagttccttttacttacctccacacaattcttgagggcttgcttttggtacgtaattgtttgtatcttcacttttagctcgaatagcacatttttgtatatttgcacacttgcttatctgatttccttctataattcagatttcatgctacaaaatgtatctaatttttgcaatctctaaggaaactacattaatgagaacgaaatgaacaccaagtttacagttcattaaaaaaatgacaaaagtttagttgagatcgattagtgacggcagacaaaaaataaataatgtttttgtttgtatatatccccatatatgcatgaactcaatacagagagagatataccaatttagaagagttgtattaaaggctaggatccagttgcaatgtagcacgtgaattagtggcttcattaattagtattgttgtgaaaagtaaaacaaagagtaagtaaagagctaggtcgctatagcgtgagcacgtacgtgagatggcaatgctgaaccacacaatacacatgaatatgtcaacacagacagcaccgcttataaataccaaagcttagcgcagacgctctaggtgaaaaaaagaagattggatatggcagcaaacgggagaaggaagagcgtgagcggaagcttggtgaagccgcccccgccaaaggtagggaaaaagtcactgcataggtccctgtcagacatatcgctggattatcacagagaagaagagaaaggactggggacgatagtggaggtagagaaggcaaagtgcgagtgctgcgggatgagggaggagtgcacgatggagtacatagagagggtgagggagaagttctttgggaagtggatatgcggactgtgctcagaggcggtgaaggaggagagggataagagggaagaggaagggctagaaggggccttgaaggagcacatgagcgcctgcctcaggttcaacaagctcgggagggagtatccggctctcttccaagctgatgccatgagagatatgctccggagaagcacgaggggtcagtctattatccctaagcccgccatttcccgtacttcaagctgtattcctgccatcaccagggaccttaattaatttgtctcttctaatatcttaacgtttaatttagtccctagctagctatagctactagtactctaaacactcatatatatatatatactacagtactaattaataaaactgatccagatatcctggtcaagcgtaatataagttgtatttaattcctatgtattttcgtttctttcaatccaaaggaaccagatacttttttctatagaaatgaagggatcatgaactgtctatatagatttgttttttcgctataaattttcaattcagaggaatagaatggatgtgggatgggatgatcaatgatgggtccattcttgcaaatctcttattcaggtgaactcatcatatataaccgctagtttaccacccggccgagtggacgacctattcgtatatctgttatgacgacacgtgtcaacttttctttggctgtatcccctttcctttaaattctgtctccgttgaattccggatatatagatttaagtttgtgactcctcaaatttctcttctctcagttgttgtagtattagttataacactatcacatctcaaaaatctaattaacctatcgtccacgtacatacaaatattaattgatgttataaggaggagaatgtgaaacatatgagaaagtaaatacaaatatcattcaaatcgggttctttggcatttgcgtcttaataagcagagaacatgaggcacgctgattgtacctgctcatgtacatagagatagacaagtcccccaatagagatgtttatttttccatcccattttttaaattacatataaataaatatataagaaaggaatgagctaggcttgattcacaactttcgtctttttttgttataaaagaaagaaatacaaagtcgtataaaaaaaagagagagcgaaacaggaggaagcagcaacacggaaaaggtggaggagaaaaagagagtacttgttgtggtataaagaatgaaggagtgagtttgtgtgtgagttttataaaaataaaaaagcaggagcatatcacacaaacaaacaacgtagaaagggttcgaatgacgagtaatggagaagggggagaggtggtggcgaagaggaggaggaagggaattaaggagctagtgcaggtggctctcaggggaggttgtttggctgcttcagccacggccatggcggtgatgctgaccgctactgaggagggagtggcagacatctacggcttcaagctcactctctcctccaactggtctttctctccctcctaccagtcagtcttcttcttcttcgtcttcttcttcttacgagcattataattagggacagacatagcaattagaattttctttttatctgaatgcatatatatatattataataaaagaaaagcagcaaaacagaatgtgtgtgttcggatgacagatattccggtgaacagaaacacatccgtgaaccaaacaacaacatgacattattgtgtgtcctagctagttttaaactttgtgattatatatagtgtatatttcattcatctcactaagaaagagttgtttggtgttaaggtatgtggtgggggcatgcgcagggaccgtgctctactccctgttacagctctgcctcggtgtttacagactcgtcaccggatctcccatcacgccttcccgcttccaagcttggctttgcttcacctccgatcaggttcctcgtctccttttctccattcccttttcttccgaatgtaacccatttgatttactgtgtgcacgcagctcttttgttatttgatgatgagcgctggatcagccggttccggagttaccaacctcaacaaaaccggcatcaggcacactcctctccccgacttctgcaagaccctttcttctttctgcaatcatgtcgccctgtctctcctcttagtcttcctctccttcatcttcctcgcttcctcttccttctttactgtccttgtgctctccactccctagtctcaatattttcgctgctttatataatccaacaaagactctacttgcaatcccaaaaacaatgtatttctcttttgagtatttctctgatgcaatacatttaagatgatgcgttgtgatgaaattacaatcataatttgggtacagagacgttgatccctagatctgagagatccttagcgagcgaatctgcattctcaaagcataacccacccatccctatctctatagcacacttgacgttggttggcctgcgtatcagacactccttcagatcaaaatggtttctttcttttaagttataaaggcattgagttcatgttataacctgtcatcaatgaatatacagtcgcaaggttcaactccgaggtgtcccacaacctcgaggtagaactctggatcaggctttctcttccctgaaagatataacacatgaggagctttgtatgtagtaggaatggtttggatctgacaagcaataagtagtaaaaagaggcaagagatgtgtgatgtaccagcaatacaggagcaaaacgtccatgataagtaggcagaaagctttaacttgtcttcgataatgttgtacctatggaaacacgacaagagtaaacaaagagacatgaagctccgtttcaaagagtgaaaggcaagggatggaaaccagatgggatagttagtgaaagcatgaatctcgaagtcgtcagctgccaaagtttgaaggagctcttgcatgccatctaagtaggagtaacctgacctcatgcactccttaagccctgcaataaagaggattgaaataggtacgaggaaaccctctctctgtgtatttacctatctatctatatggcaatctcaccttccaaatcaaaatccctcccatctataaagaagtttctagcaagctcctcctaaaaccaaaagtcagaggagataatatgaagaaaaaaagaaagaaagagtggtggtacctcacctcatcaatcaaacccttttcaaattcgatccagaccatcgggtgcttgcactctagtagttgcttcattggcattctgatccacaacctcagtttatcattgatgaatcgagaaataaattcgaggatttcactttctcacccgaagaaggccggaacgtcctggtaaaaggggtcacggacgatggtgtccatgacgtcgaagaggagaatcggaagcttccttttccgagagatttcatcaccactgctgctgcccagacagcaagaacccgaggcccgaacaggattcttcttccacatgttgggtttcagattgatgaattccgccgatgtgtgcatcgccgccgccgccatcagaaactacctagtttctagttccgatcatcatcatttgtaaatgacaacaggggagtcgaaacgcagcgtttagagagaaaatcgcagaggagaaggtgattggtccacgtcagtaattaggatgacgtggtgaagaagaagtggcccatgacttgcagcacgaaggagaatgaatgaattaaataaaaaccgtttcaaattcatctccacgactcctcggcctcggagagctcaaccgccactttccttctccttgtttatataaagcagagccagccaccttcatttttacacacaaccatcaaagctacgtacgaattcctctcaaacatactatatacttacaaaagaacaagaagatgatgatgatgatgatgagatctacttgtaatctaacactaatgctctgcatttgtgcccttgtggtggcttccatggcggcggaaggtcctagggatttcaaggttggagacgagttcgggtggagagtcccactccagaatgattcagcggtttacagccactgggccagcagcaaccgcttccacatcggtgattcactctgtgagctagcttgttcccaacttgtgttttcttttttttatcattcatgatcggtaataattgattggtttctaatcaaaaatatgtcagcgtttgtgtacgacaaggactcggtgatggaggtagacaaatggggtttctaccactgcaacggcagcgatcccattacagcctttgacaatggaaacagcacattcgaccttgatcgtcctggtctcttctacttcatcagcggctccaaccagcactgcaccagcggccagcgtctcatcgtagaagtcatgcatatccaccaacaccatgaccatgacgcttccatgcctccatccatgtcgcctctttctaattctgcctctccctacgcatccgcatccgcatcttctgctgcctcctccctgcctacggcttgtcttcttattcctcttttcttaaccattgctagctttcgtttcatttcttattagtcaaattgtttcccttatagttcttctcctcttttacttttcttcatctttttgtttcattcatcgaacccttatggtataatccaatttatgttcttctctgacatttattataagttttacttttcactgttcaaaacaaatcaatcaacaaactgtggaaaaaaaataaaaaatctatcaacaaactacacaagagcatcgttattaatagtttcttaaaacaattcttaagttaagagacagtcttataatagcttataattaacaaagtctcataaataagagactttaatacaattttgttagatataagacatatctcttaactaagagtaatgttaagagatcatcaataaggataattttatgtcgttagtactaatagaaccgggccctagagtttgtaacagatatgggcctttttattgctatgggcctatttttggtgatatgggtctttaataccatatgagccttttaagacaaaataataatctgataaaagtggtgaatcaagaagactaaacaattttgaaagaagaagaagaaaggaggagacatggatgaatctctgtgggtgtgagtgtgagacaaagagagaaaacaaacaacgtagctgtagattggaaaagacggtaagaccctcgtcgggcttcatcaataaacaactttgccttgttgtctatcgccggaattacaaaccctagccctgctacaccgccaatgacgccgtctacgcctgcagacgatgcttggatccgctcttaccagcgcttgcttcctgaatcgcagtctcttctcgcttcccgccgggtaggttctgtctcagggatgcttgtttgtgtcgtggcttgtttgcttattatatgtggtctttgatggcagtcagttataccggttgcaatctctagagtgaatcagttcgacgcagcacgactagatgtggaaatgtcagccatgttgaaggaacagctcgttaaggttttcactctgatgaaggtgagcagagagctaacttgatgctttccttggcattttattaagccatttactttctttggcattttattagccaggaatgctctttcaatacgaaccagagcttgatgctttccttgagtttctcatttggagattctctatttgggttgacaaacccacccccggaaacgctctcatgaatcttagatacagagatgaacgaggagtcgttgctcagcacttggggaaaggtattttttattttattttctaaacactcttcttctgtcaccctttttttctaatcactcttgtactctcgtatagtcagaacaggactggaaggacccggacttacttctccccaaaagatttggtactgcgttgcctccgttggtggtcagtacctcttctcccgtttgcagtcattttctgctttccgtagatggggtgattctgagcaggtctgtatgaggagcatggtttattctttttttctcccgtttgcagtcatcctcacgccatcgctatggttgattcttttctccttgttttgacttgtagagaccattggcaaggcgactttggaccctcgtacaacgaatcgaaggcatctacaaagctgcttcttttcttaacctattgtcatttctttatacgggaaggtacaacttggtacatggactctttcatttcctctacttatcctgataaaaccacactgcagtgcagttacttcttatgaccatttaaaatctgattcagttcattggtaacttttgagttcacagtgaaatatcgaaacaagaaccaaaatcacaaacagaaataccttgatgattctcacttccgctactcttctttttctttcttgatccaggtataggaacctcattgaaaaagctttaaaagctaggcttgtctataggagtccccatatgaaccgatctgtcagcttcgagtacatgaatcggcaacttgtgtggaatgaattttcggtaggtcttctctgtgtgttgcttaactagttcaacatcaatttaaaagtttggcaacctgtcagttctgagtagcatccttggctgatggtttctggcctatgattgatacttgctggtctcgaacattttcttgaatgatagtatctatcagcttaccttcactttttctttggaagaaacacttttgctgcttgaacttgagctgttaaaagctgaaaacatattgtgtccgtatctggaattctgaactatgtagatcctgtgactcaacagtttcattggagtacaaataccttgtctatgttcaaaacactgtatttgtcgctttttctctctttcagatccttcaatagatcaaaacattctgtttagacttgctaccagaaacgtaatgttaggatctgatttcctggttctgttttggcattcagctttaaatttgtttggtgatattcaggaaatgcttttgttgcttctcccgctgctcaactcttcagctgttaagaatattcttagtccatttgccaaggacaagtcctcaagcactaaagaggatacagtgacttgccctatttgccaagtggatcctgcaattccgtttatagctctgccttgtcagcacaggtatggtatttttctgtgcaaaagttttggatcagaataaagtagttaactctctccccagacatgtactataactgattgtactagaagcaaaaaatttcacatgattgtgtatctgactttggagaagacacagaagtgattttattgacttgttgaattcatagtatgtgctgtagttgttacatacatttaaaagaattgacttgtcgcaggtactgttactactgcataaggacccgctgcgcttcagcagcatcgttccggtgtcttagatgtaacgagcctgtggttgccatacaacgggaaggtgtttcaagtggcaaatgaatggaggtgacaaattgttgagtcatgccaccaagtcttgaagaataagcagatgcaatagtggaagtgtaaaaagccaaggcaagcagccgaaagcagagaagaatctgataggtgtttgtttgcagacagactatacaataagggaacatcatgaatgtgatgcaacaaaaaaattagataggtgcacttctgtacatgagttgagaacctaccattgttgaatgaagtttggtcttatgtttattacaaaatcagttgaaacgttggctatactcgaatgaataatatccatttccttacatgttgtttacctacttactactcactcctacttccatattaggtacacgttacttgtgtctctccaaggaaaaaaagagagccagaagaataatacgaattctcagaataaagagatcaatcactgggtggaagagagcagactgatttctatctcttgtaggctctttcctttagtctcaaccacgttcttctgcacaaagatgactgccaccacacagaagaacccaaatattgcatttagaagcaccgaacctagttgctccagcattctcagaaacagcagcccgacaaagaagtttataacctgttgtagcgtgtaattctccaagcttattattatttcaacattatcgatttcctaaaaaagtccacaaagagaaaaaaaaaaaaaaaaaaaggcatacccagtgaacggcaagacaaacagccaacgcagttgctcgaagtcgaccagggcatatctcagacaggagaagacttggaacaggacccgctccagttgcaaacgacaacacaaacctgcattcgtaatcacacccctagtttatcaaaataaaacatcccccttttccagtgctgttgttgtgatagaaaacttacagcagcattcctccaaccgagagaaacaaggttccaaagggcgaaggaagcgaagtatatgctattgcttggagacccagcgatactgcctgttaaagatgataaacatttacatctacatacatggagcgttattaaatattagctgcgtaaagtttgattcaaatagcactttttgcctcaacaattaccatgcccgcaaaactcccaataagcaacacttttctccccagcttatccatcaaaaccacagcaacagttgatcctgtacaagagtatgaatgatgctcacattcgttttaaatacagatcatcaacatgttgaaaggaaagatttcagatcatcatctttgtggtaagaggaaggttgttcacttaaaccagtgattagtttactgttcctaatgttgtgtttgtattcaggaagactgcattcacctacttgcttatctagcttatcatgaatatgatggcctttcaagccatagtagaatgtacaagaaaaagtcacatttcaatacctaagaggttgcaaactcctacacatatgtttgcagaggctgaaggtacaccagctttcttgaagacagttgatgagaaatagaacacagcatttatcccagacaactgttgtaaagcaaaaagggtagatccaatgaaaaccactgcaatcggagaaaatttaaacgtaaaaatgaaggtaattaagaggctacacatcatctatatgtatgtttttggcaaatgaaaatgtcatttttttggctatggatccagtttagccacctaacataccttccgtgcaaatgattcaactttttgatgaataaaaatctagatctaatatttccgtgatatttgacatcgaactaatgccacacattttcaccaatcttgttggttaaagatcacacatacctctaaaactgcgtccaaaaagcaactccgacaatttggctgaatcggcgtcatctcccctatccgacttcactaactctgccatagcagctttgacgtacgaccctcccaatagcttctcaaacacagcttcagcttcagctgcccttcccctctacggttaaacagaaaaagaatcaaccaaagaaatggtttataaaaatcaaaacgtctttaagagctatgcgggttaaaattagacagtaaccttaaaaagccactgaggactttccacgcagagttccatgaagacagcaagcattgcagctgggactgtggatatccaaaaacatatgcgccacctacaccaatcaagaaagagaaacctattcaactagtaattcagccaagtagaccaaagcatgtgatctgctagtagcttagaaactccaggatttctttccctacaaaggcggttctcatgtcaaaatcactaatgaatttgcagcaaaagatgaggtggttcctatagagttgcagcattttaacaaggcactagagattcacattgcatataggtgggtttggaatagacaacggggatcaaacatgccacctaaagcaagcaaaaagggtgaactaccatgcgtttggaagtcacagatggcacagagttgcaataatttcaacctcgaagagttacaggccatataagctgttaagtcatctattccttgagttcttatcaacatcttaccagcccaagttatcttttgccgggattccagcaaacagcgaacctaagagtccaatacatgttgcgatttgggtagaactcccatatgtacctctcacataagcaggtgacacctgcaaagagaaactgtgagtcttgctctaagtatgaatgtaagatgtattgacaaagcgagttagtgatatttgtgtgcccagaaccttctttttcacattaaataaatccaataatgcgaatatagctttcaagattgaagtccttattacaatgaaaattatgtgcgtcaatgaccttctgcatgttaatggttccaagttcaagtctttttatgtctgaaatagacatctatttacattgactccaaacatcttttgacataattaaaataatatacgccaagtaatattcacatcaaaagtgaggaagaaatttcatgtagcaatcctatcaaaacaagtgcagataagaaagacttcaacgtatatgtcaagtacctcagtgacatagagagctgtaacagaaggacctatgcccatcccaattccgaccaaaaaccttcccaggagcatgcccataagactctcagttgatgcactgcaaacaacacacttgtaagcacacagatttcatgattacataaatggactctggctaaaagagaaacaggatgaattaacctaactagtgagtacaccttgggataagtgaaaatcaccatggcaatgacttgagaccaaatatgttcaaatgaggccaaatatgttaaaatcaccacgctataactataaacatccaagcaggaaatcactacgagataatccaactgcataatgactagcctagaccacaggttcagcaaatcaacaggcaaagattcgaatctgaaatgttcaagtgcccacatagacattcaaccaaaaatatatatcataccataagaacctgaaacaagtacttagtcatgtgaactgaacagcctaaacccccaattaacctgaacaaaacatcacctcacagaagctccaacaatcattggtaaagcgctcaactggaaagctctacggcgcccaacaccatcagctaccaacccactgaacagagacccaataaaggcgccgcctaagcaggtgctaaccacaagaccttcatccatcagaaaaaggtttttggaatgatcagacgggagatagacacaaagactggataaacagaaaaacaagtaagttgtcttcttggataggtaaggtaccttcagctatggtgttcccactaaagccaaggtcaattgatatgctttcgagagtttcattaacaaccctgtgtccagaaaagaggcatgaatttgctattattcccagacatatacatttataaaaaactgagtcattgaggcaaatagataatgttatcgagtgctccaagaaaaacaatgcatcgagaagaaatacaacttgagcctgaaaaataagcttacgaaagaaaaagataatagcctagcatcatgagaagtaaatttccatgtttggtctataaatgcaaagatgaaaaagaaaaaaggaaaaagggagaacaaatgtcacaaggagagacccgagatgatagccgaataaaagcgaagtcagagaagcaacgagcacgtgaggcagagatcgcttccaggaaggattcccgcagtcttttcccgtcccagtaggaagacgtactggagttgagaaaagtcaagagtcagtctatgcagaagaagtttcaagatattgaggcaacaagaaaaaagtggtatatctaggtacaatgctatgtctaaaacacaaacaagcaatatagagttgatgagcaaatacaataaaaagatcagaagtggtctttaaaatatataacactgtccgtgtgcaccaaaaagtaggcaatagagtaaaatcatgactattatgagggtgggtacaaaaaacctgcagtttcagctttatccaaagcagagagaaactctttagaaggaacacgcttgtctatgtgacgacctcgcataatggtgtaagtgcgtcgaacagaatccatcccctctggaaacacgctcctgcacattcaaacaagttgagtgctgactgatgcaaggccatagaagaaaagcatacgaataatgggattcttcaacatggatggatgctcaaagacgtcaaagtcgcaatttattaaataatcaatccattaaaggaaagcttcattcaagtgctacttgttagtgtgtgtgaagtccagcgatcacttacacataatcaaaaccagccttgcgagtcaatttaaaattcaaagcacacacatgacgtaacgtgacgtgagctactaggaaaattccagaatcaacaatatatttattttaaaaataaaaagagataaaagaagaaacaaaaaagctgacgacagatgatgagaaagtgagatcgtcggatctgacggaagcaatgtaaatcagaaatataagatttggattaaaaaaggcaatggcagatctacaaggaagcaaggaaggaaggagggatgcaaacaaagagaacaaggatgatgatagtaccaacctggagaggaaatatgataacgtcgagaggaatcgtcgaatagaagaaacttttacagaggagcgacgacaactttatggctacacctacactcactccgttcacaggggatgggttttaatcacctgctctcgcctctaccgttcttttcatggaactcagcaaactatactctagtaccaatgaaataatgacatttatatatgaattc

SEQ ID NO: 1021 - DNA, 87584 bp, Arabidopsis thaliana
  modified_base (27031)..(27150): a, c, t, g, unknown or other
gaattcgtcgaccaggacggcggaatgctcgaccaggacgatgaatgggcgatgaaaatctatcgggttagaggaatggtcgaccgggtccgagaattcgtcgaccaggacgaggagtggtcgaggatttgtcgaccaggagttgaaatcgtcgaccgggtccgagaattcgtcgaccaggacggcggaaccctcgaccaggacgatgaatgggcgatgaaaatctatcgggttcgaggaatggtcgaccagaagttggaatcgtcgaccgggtccgagaattcgtcgaccaggccgaggagtggtcgaggatttgtcgaccaggagttgaaatcgtcgaccgggaccgagaattcgtcgaccaggacggcggaaccctcgaccaggacgatgaatgggcgatgaaaatctatcgggttcgaggaatggtcgaccaggggttgaaatcgtcgaccaggtccgagacttcatcgaccgggtccgaggattcgtcgaccaggacggccggatgtccgagaaaaaaaaatgttgccgaataactttcgaaaatcattggatatgatgcaatgttttgtgatcgaatctcttaaaatacatcaataaagagtttaggatgtcaagtttgcatcaaatatgcccacggagccccaactagaccatgaaaatccgttgttgtatcaggtcaaatgacctagctagaggtgtcagaaaattatgtaaatttaccagaaaataggatttagtatccttatgatgcatgctaaaaagaattttcaaattccaagtatttctttttttttggcaccggtgtctcctcagacatttcaatgtctgttggtgccaagagggaaaagggctattaagctatataggggggtgggtgttgagggagtctgggcagtccgtgggaaccccctttttcggttcggacttgggtagcgatcgagggatggtatcggatatcgacacgaggaatgaccgaccgtccggccgccgggattttcgccggaaaactttttcggcgacttttccggcgatcggttttgttgcctttttccgagttttctcagcagttctcggacaaaaactgatgaatcgtcgaggagaatgagcttgccttgcgtgggctgccattagttcttcgaggcgttagggtggcggcggtataaaagtgtcggagttttttcagcagttctcggacaaaaattgctgagtggccgagaagaatgggcgtgtcatgcgtgggctgacatggattcttcgaggcctaggggtggcggtatataacttgttcgcatgatattaccgagatgtccccacgggcatcttttcacctcgtcgccgaagagaatgggcgtgtcatgcatgggctgacatggattctcctaggccgtttgggtggcggtatagtcgtcctgcgcacgaaataccgagatgtccccatgggcatcgattccacccgcctaggttggatgggcgtgcttcgttggaaagcatggatccgcctaggctgtcccgagtgtgagcgaggtgtgagtgtcgcccatgggcatcgacaccttgcggctaggaactggaacgagatgggtggcgaagatttcgagtagcacttcatactaccgtcggttttttaaaccttccgagttttgttgatgttattccgagaattagcaaaccgtaacgaagatgttcttggcaaccatcttttgatgggagtccggctgttcgatagccggccaagggtgatgaacgaaatgtgaacccttgtctcgcctaggttggatgggcgtgcttcgttggaaagcatggatccgcctaggctgtcccgagtgtgagcgaggtgtgagtgtcgcccatgggcatcgacaccttgcggctaggaactggaacgagacgggtagcaaagatttcgagtagcacttcatactaccgtgggttttttaaaccttccgagttttgttgatgtgtttccgagaattagcaaaccgtaacgaagatgttcttggcaaccatcttttgatgggagtccggctgttcgaaagccggccaagggtgatgaacgaaatgtgaacccttgtctcgcctaggttggatgggcgtgcttcgttggaaagcatggatccgcctaggctgtcccgaaggtatctcgcgcttgtacggctttggcttggattcgtccgtcttctttcttcttagccgagtacttcggtagagtagttggaacgattgatgattttgagttaattgaacgttcggcgtatgagtggtgatcggatagctagtgttcgtaggctccatgctcgcgcatcgaactacctaccacctatccttctcagttaattcacgggcgatgttacgctcgatgatgagttccggggcctgtgtttcgtacctaatttgaaggaattgttgagtttggtttacacctttgcccgcggcttctccttcgtggggaagtcgtgggcacaaacatcggcgcttgttcacctctcgtcatcgcatttgttgccttgctcgcattggtgaatgagttgcgggttgaaatctcggatgcggaaaagttgtcgacggtgactcgaagtgattcagtcccgccaaagctcatccgtccttcgggcaaaagatgacggtcaagacctcgtcctttctctctttccattgcgtttgagaggatgtggcggggaattgccgtgatcgatgaatgctacctggttgatcctgccagtagtcatatgcttgtctcaaagattaagccatgcatgtgtaagtatgaacgaattcagactgtgaaactgcgaatggctcattaaatcagttatagtttgtttgatggtaactactactcggataaccgtagtaattctagagctaatacgtgcaacaaaccccgacttatggaagggacgcatttattagataaaaggtcgacgcgggctctgcccgttgctctgatgattcatgataactcgacggatcgcatggcctctgtgctggcgacgcatcattcaaatttctgccctatcaactttcgatggtaggatagtggcctaccatggtggtaacgggtgacggagaattagggttcgattccggagagggagcctgagaaacggctaccacatccaaggaaggcagcaggcgcgcaaattacccaatcctgacacggggaggtagtgacaataaataacaatactgggctctttcgagtctggtaattggaatgagtacaatctaaatcccttaacgaggatccattggagggcaagtctggtgccagcagccgcggtaattccagctccaatagcgtatatttaagttgttgcagttaaaaagctcgtagttgaaccttgggatgggtcggccggtccgcctttggtgtgcattggtcggcttgtcccttcggtcggcgatacgctcctggtcttaattggccgggtcgtgcctccggcgctgttactttgaagaaattagagtgctcaaagcaagcctacgctctggatacattagcatgggataacatcataggatttcgatcctattgtgttggccttcgggatcggagtaatgattaacagggacagtcgggggcattcgtatttcatagtcagaggtgaaattcttggatttatgaaagacgaacaactgcgaaagcatttgccaaggatgttttcattaatcaagaacgaaagttgggggctcgaagacgatcagataccgtcctagtctcaaccataaacgatgccgaccagggatcagcggatgttgcttataggactccgctggcaccttatgagaaatcaaagtttttgggttccggggggagtatggtcgcaaggctgaaacttaaaggaattgacggaagggcaccaccaggagtggagcctgcggcttaatttgactcaacacggggaaacttaccaggtccagacatagtaaggattgacagactgagagctctttcttgattctatgggtggtggtgcatggccgttcttagttggtggagcgatttgtctggttaattccgttaatgaacgagacctcagcctgctaactagctacgtggaggcatcccttcacggccggcttcttagagggactatggccgtttaggccaaggaagtttgaggcaataacaggtctgtgatgcccttagatgttctgggccgcacgcgcgctacactgatgtattcaacgagttcacaccttggccgacaggcccgggtaatctttgaaatttcatcgtgatggggatagatcattgcaattgttggtcttcaacgaggaattcctagtaagcgcgagtcatcagctcgcgttgactacgtccctgccctttgtacacaccgcccgtcgctcctaccgattgaatgatccggtgaagtgttcggatcgcggcgacgtgggtggttcgccgcccgcgacgtcgcgagaagtccactaaaccttatcatttagaggaaggagaagtcgtaacaaggtttccgtaggtgaacctgcggaaggatcattgtcgatacctgtccaaaacagaacgacccgcgaaccaaagatcaccactctcggtgggccggtttcttagccgattccttgcccgccggatccgtggtttcgcgtatcggcatgctcgggagcttttatctcggtcttgtcgtgcgcgttgcttccggatatcacaaaaccccagcacgaaaagtgtcaaggaacatgcaaacgaacggctggcattcgcctccccggagacggagtgtgggcggatgctgtgctgcgaactgaagtctaaaacgactctcggcaacggatatctcggctctcgcatcgatgaagaacgtagcgaaatgcgatacttggtgtgaattgcagaatcccgtgaaccatcgagtctttgaacgcaagttgcgccccaagccttctggccgagggcacgtctgcctgggtgtcacaaatcgtcgtccctcaccatcctttgctgatgcgggacggaagctggtctcccgtgtgttaccgcacgcggttggcctaaatccgagccaaggacgcctggagcgtaccgacatgcggtggtgaacttgatccattacattttatcggtcgctcttgtccggaagcagtagatgacccaaagtccatatagcgaccccaggtcaggcgggattacccgctgagtttaagcatatcaataagcggaggaaaagaaactaacaaggattcccttagtaacggcgagcgaaccgggaagagcccagcttgaaaatcggacgtcttcggcgttcgaattgtagtctggagaagcgtcctcagcgacggaccgggcctaagttccctggaaaggggcgccagagagggtgagagccccgtcgtgcccggaccctgtcgcaccacgaggcgctgtctacgagtcgggttgtttgggaatgcagccccaatcgggcggtaaattccgtccaaggctaaatacgggcgagagaccgatagcgaacaagtaccgcgaggtaaagatgaaaaggactttgaaaagagagtcaaagagtgcttgaaattgtcgggagggaagcggatgggggccggcgatgcgtcctggtcggatgcggaacggagcaatccggtccgccgatcgattcggggcgtggaccgacgcggattacggtggcggcctaagcccgggcttttgatacgcttgtggagacgtcgctgccgtgatcgtggtctgcagcacgcgcctaacggcgtgcctcggcatcagcgtgctccgggcgtcggcctgtgggctccccattcgacccgtcttgaaacacggaccaaggagtctgacatgtgtgcgagtcaacgggtgagtaaacccgtaaggcgcaaggaagctgattggcgggatccctcgcgggtgcaccgccgaccgaccttgatcttctgagaagggttcgagtgtgagcatgcctgtcgggacccgaaagatggtgaactatgcctgagcggggtaaagccagaggaaactctggtggaagcccgcagcgatactgacgtgcaaatcgttcgtctgacttgggtataggggcgaaagactaatcgaaccatctagtagctggttccccccgaagtttccctcaggatagctggagctcggacgcgagttctatcgggtaaagccaatgattagaggcattgggggcgcaacgccctcgacctattctcaaactttaaataggtaggacgtgtcggctgctttgttgagccgtcacacggaatcgagagctccaagtgggccatttttggtaagcagaactggcgatgcgggatgaaccggaagccgggttacggtgcccaactgcgcgctaacctagaacccacaaagggtgttggtcgattaagacagcaggacggtggtcatggaagtcgaaatccgctaaggagtgtgtaacaactcacctgccgaatcaactagccccgaaaatggatggcgcttaagcgcgcgacctatacccggccgtcggggcaagagccaggcctcgatgagtaggagggcgcggcagtcgctgcaaaacctagggcgcgagcccgggcagagcggccgtcggtgcagatcttggtggtagtagcaaatattcaaatgagaactttgaaggccgaagaggggaaaggttccatgtgaacggcacttgcacatgggttattcgatcctaagagtcgggggaaacccgtctgatagcgcttaagcgcgaacttcgaaaggggatttggttaaaattccggaaccgggacgtggcggttgacggcaacgttagggagtccggagacgtcggcgggggcctcgggaagagttatcttttctgtttaacagcctgcccaccctggaaacggctcagccggaggtagggtccagcggctggaagagcaccgcacgtcgcgtggtgtccggtgcgcccccggcggcccttgaaaatccggaggaccgagtgccgctcacgcccggtcgtactcataaccgcatcaggtctccaaggtgaacagcctctggtcgatggaacaatgtaggcaagggaagtcggcaaaatggatccgtaacttcgggaaaaggattggctctgagggctgggctcgggggtcccagttccgaacccgtcggctgtcagcggactgctcgagctgctttcgcggcgagagcgggtcgccgcgtgccggccgggggacggactgggaacggctctctcgggagctttacccgggcgtcgaacagtcagctcagaactggtacggacaaggggaatccgactgtttaattaaaacaaagcattgcgatggtccctgcggatgctaacgcaatgtgatttctgcccagtgctctgaatgtcaaagtgaagaaattcaaccaagcgcgggtaaacggtgggagtaactatgactctcttaaggtagccaaatgcctcgtcatctaattagtgacgcgcatgaatggattaacgagattcccactgtccctgtctactatccagcgaaaccacagccaagggaacgggcttggcagaatcagcggggaaagaagaccctgttgagcttgactctagtccgactttgtgaaatgacttgagaggtgtaggataagtgggagcttcggcgcaagtgaaataccactacttttaacgttattttacttactccgtgaatcggaggcggggtacaacccctgtttttggtcccaaggctcgcttcggcgggtcgatccgggcggaggacattgtcaggtggggagtttggctggggcggcacatctgttaaaagataacgcaggtgtcctaagatgagctcaacgagaacagaaatctcgtgtggaacaaaagggtaaaagcttgtttgattctgattttcagtacgaatacgaaccgtgaaagcgtggcctatcgatcctttagaccttcggaatttgaagctagaggtgtcagaaaagttaccacagggataactggcttgtggcagccaagcgttcatagcgacgttgctttttgatccttcgatgtcggctcttcctatcattgtgaagcagaattcaccaagtgttggattgttcacccaccaatagggaacgtgagctgggtttagaccgtcgtgagacaggttagttttaccctactgatgcccgcgtcgcgatagtaattcaacctagtacgagaggaaccgttgattcgcacaattggtcatcgcgcttggttgaaaagccagtggcgcgaagctaccgtgcgctggattatgactgaacgcctctaagtcagaatccgggctagaagcgacgcatgcgcccgccgcccgattgccgaccctcagtaggagcttaggctcccaaaggcacgtgtcgttggctaagtccgttcggcggaagcgtcgtttggaccgccttgaattataattaccaccgagcggcgggtagaatcctttgcagacgacttaaatacgcgacggggtattgtaagtggcagagtggccttgctgccacgatccactgagattcagccctttgtcgctaagattcgaccctcccctaaatcactccaaaaaaaacaatccccaattctacacaagtgtttctacactaacaaagcaacagctccttaacgaattcccaactttacacgagctcgtctctcgaggttaaatgttattacttggtaagattccggacctcgccaagtgttttgaaaacccgcaacgctcgcaaaggtgcatagtgagaagaataagtgaagagacagacttgtccaaaacgctcacgaaggtgcatagtgaaaagagtaagtcaagagacagacttgttcaaaaagaaacaaaagagaatgcttggggttacactcacgaaggtgcatagtgagaagagtaagtcaagagcagacttgttcaaaaagaaccagaagagaatgcttggggagatagaagtgtgagatagttctcaagctaagaaagttgtaaaagctaagaactagcatcaaatgatggatgaaacacaaggtagttgttgaaaagtcaaacacttggtgatatgaacacaaacgttcaatatgacaaacccatgccaagtaaagagaaaatgaaaactggtgattgttgcggaaatcgtccaggattcctcgaccaggacttgaaatcgtcgagggaaaataatcggttctgaggaatcgtcgatccggacttggaatcgtcgagaaaagtttaccgggtccgaggaatcgtcgatccggacttggaatcgtcgagaaaagtttaccgggtccgaggatttgtcgaccaggagtggaaatcgtcgagaaaaatctatcgggtccgaggaatcgtcgaccaggacgaggaatcgtcgaccgggtccgaggatttgtcgaacaggggttgaaaactgctgaatcgtcgaggagaatgggcttgccttgcgtgggctgccattagttcttcgaggcgttagggtggcggcggtataaaagtgtcggagttttttcagcagttctcggacaaaaattgctgagtggccgagaaaaattgcagttctcgttcacatatttcttagccaacaccgtcgctccatcggttttttctgatggccagaaaatgtgctgacttagtcaaacggtccacgatcacccaaatagcatctttggttcgcgacacaggcaacccaaccacaaaatccatcgtgataaaatctcacttccactcaggaatgggtaaactctgcaacaggccacctggcacctgatgctcagccttaactaactggcaaacatcgcactctgcaacccaattagctacatccctcttcatcacgacccactgatagtaccgcttgaggtctcagtacatcttagtcgctcctggatgaatggaaaacatgctcgcatgagcctcactcaagatctcttgtcgcaactcctcatccttaggcacacaaactcgctcatggacaaggatagtcccattagctacaaactgatactcagagccctctaccttagaagccgcaatcaacccctcatccttctcctgagccaaccaaactctagtcagaagatctgctcgatccacggcttccaatcctaatggctctcgtgccacagcacacaaccgcaaagcaccaatctcactcaccaaggcctcaacactctgccctggagccgcgcccacgcgcttacggctcaacgcgtctgcaaccacattagccttaccaggatggtaagctatctccagatcataatcagccaccagctccatccatcgcctctgcctcaggttcagctctcgctgagtgaagatatacttcaaactcttatgatccgtgaacacctgcactttcccgccacaaagataagacctccaaatcttcaaggcaaagattactgtagccatctccaaatcgggagtaggatagttgccctcatgcttcctcaactgtcgtgatgcataagcaataaccttcccacgctgcattagaacacaacccaaaccaactctcgaggcatcagtatacaccatgtaaggctgtccatgctctggcaatgctaacactggtgtactcgtcaacatctccttcaggctcacgaaaccctcctcgcactccggtgaccacacaaaaggaacatccttcctcgtcagcttagtcatcggctgtgccatactcgcaaaccccttgacgaacctcctgtaataccctgccaacccaagaaaactcctgatctcagtggcattcgtcggtctaggccaatctctgatagcctcaatcttctctggatccactgaaactccctctgcagaaacaatgtgacccagaaaacccatttctctctgccagaaactgcacttactcaacttagcgaacaacttctgctcccgcagcttctccatcactctccttagatgtacctcatgctcctcaggactcttagaatacaccagaatgtcatcaataaagatgatcacaaactcatccaaaaactcctggaacacgctgttcatcaacctcatgaacgctgcaggtgcattagtcaacccgaaaggcatcaccacgaactcaaaatgtccatatcttgtcctgaaagcagtcttgcgaacatctgcctccgctatcgggatctggtgataacccgacgtcaaatcgattttggagaaacaagtaccaccccacaactggtccaacaactcatcgatccttggcaaagggtacttgttcttcacagtgacccggttcaacccccggtcgtcaatacataagcggaaactcccgtccttcttcttcacaaataacaccggtgctccccaaggtgaagtactaggacgaatgaatcccttacccaacaaatcctctagctgcttctttagctctgccatctctgctggagccatcctgtagggtgccttagacaacggcgctgtccctggttccaactcaatcgtgaaaggatcagaccgtgatggtggtaatccctgcaacgattgaaacacatcctcccgaatgtcgctcactgctacctgccccacagactccggcatagataccggcatcccttctcgatcattttctctgcctgcactgctgagatgacgagactccctgaggtaggtctcactccctgataaaccaaccttccctctggccgctcaaaagaaactctcccacggtgggagtcaagatgtactctgtaatgatccaaccaatccattcccagaataacatcatacaactctacaaggctgataatcaaatctgctggcattgactcccctgcaatctgaatatctacacccttcgctctcccaagaaccgctagaaactgccctccagcaaccttgacgtggagatgtcccctctccctacagtggtagcactccctcatctcagctcgctgcgtgcaatccgccaccttgtggtcaaggctcccacaagaaaaacatcctgcacgaccaccctgtccagctctggaaggatgatcccacttcctcttctgcccctgtgcaggcttgccgcccttgctaggtgtcacctgctgctgagtcttcttcggttgtaccgctggactcactcccaccacctgcctctgaaggtctgaaagtccccgatccggactgcctaaagtccgggcgagttctctcgacccaagccactaagtgactcggccctaaccgtttatgaggttctttcctagtctaatccgtttcatatgattccgagattcaatatatgagacgaatagagtaaacaaacaatcggatactttattaattaagcaaaggattcgatacaacctatgagtttgcatataagctattacaagtcatataatcgatccctagactatccgaactatcaccacccatcatcccggccttgagtctctcgcgcctaagccaagtccttcccacgatcaccattcgttcctgaaagtcatagagccataagtaatcttatttacttaatcatatgcaagtccatgcaatgctctatatgccatacactactcggatcagtggagagaattcagagaggggaagatcgcgcatcagtccggccgattctcggcaggtcagttaagacccgccggtcctccgccgagccgcgtccccgcctcagccgacccctacccggaccgagtcttgtgtaggatgcacatgacccggatactactcagccctctagtcggtcctttcaaggatccgactactaactcacatcctagaacccttagactcaaagtctaggatcccttaccttccttctcgaggttaggtcgatccgaccctccttctttattgccggccacagcccggctaccgaatcctaagactatttattctcccaagagggagagagttttaatggtgagttttcttgtgttttcggtgtgttgtggtgagtagaatggtcctgggcgcccttccttatatagggggcgaatggatgctcccgaatcaacacatccgttccttgcacctttccgaagagttgcacctttccgaagagttgcgcccttccgaagagttgcacctttccgaagagttgtatctcttcgcccataaccgcccagttcgtccgtcactcgtccagctacctcgagctcgtccgtcactcgtccagctacctcgagctcgtccgtcactcgtccagctacctcgagctcaaccgtcactcgtccagctgcctcgagctcaaccgtcactcgtccagctgcccgagctggactgtcactcgacctgagtaactgtcactccttccagctgagcttgagctttgggcgagctgacccaagtgatttctttacgatcctagcttagcctgcatgatttcccctttgtccgagcttatagccagctccttctcacttgtccgagactccaccttcttctctcggaccaagtcctagccaacgatcctattgaggatcgcgggcgttacaagtctcccccccttgaattggattcgtcctcgaatccgcatcaagttgatctttacccatctccttgaaccactccggaaaattggccttcatcttattctcggtttcccaagtgtattcctcacggcctccacaattccacaagacttttaacaaatcccttgattttccccgagtcgctttcgtcattcggtccatgatccgtaccggccatgcttccaccgtcatattctcctttaacccgggaggtatatcttccacgctttcttcttgatcacttaaacacttccgtaattgtgacacatggaagacgttgtgaaacgcatttaattttggaggaaggtcaagtttgtatgccaccgcccctactcgttcgatcaccttgtacgggccaacataccttgggcttaactttttccttgaggtgaatcgccctgcccctttgtaggtcatcgcctttaagtacaccaaatctcgtacttggaattccaattcctttcgacgtttgttggcgtagcttttctgtcgatcttgggcttcctttaacttgatttttaagaacttcattctctccgtggtttcatccacgatcgtaggtccaaacaaccgacgtttgcccacgggcgtccaacacaacggtgttctacaagctcgtccatacaacgcctcatagggagacataccaatactagcttgaaaactattattgtatgcaaactctactaaccttagatatttctcccagtttcctccccaatccaagacgcatgccctcaacatgtcctcgagggtttgaatcgttcgttcggactgtccgtccgtctgtgggtggtaggcagtacttaggtttactcgagttcctaaggccttttggaaagccttccaaaactttgacgtgaaccttgtgtctcggtctgacactatactaaccggaatcccatgtaaccgcacgatctcgtctatatacttctcggcaatgatttctgctccatccttatccgagatcgccatgaagtgcgcagacttagtcaatcggtctaccacaacccataccgcattgtgtttggacttgatccccgttggcagtccggtgacgaagtccatcgttatgtggtcccacttccattccggtataggtaggttttgtaacaacccacttggtacttgatgctccgctttgaccagttgacaagtcgggcacttggccacccatctggccacgtctttcttcattgctacccaatggtagtaccttttaaggtcgcagtacatcttgtttgacccaggatggattgagaacctcgattgatgggcctctcttaggatctcctcctttaatgccctatcgttcggcacacatactcgaccgttcaccatgattgtaccattgttcgaggtttggtactcggtcttattgtttagtgcccatccttttatctcctcgtcccgttcctgagccagccggatcctactaagcaggtcggcctgatcggcggctcccaaccctaagggttcaacttctttagacaaggcattcacatgcaatgtcccgatcatgttaaccaagtccacttggctccgttccgcctcaacttccgagcgcctcctactcagggcgtcggcgacttggttggccttgcccggatggtacgctatatccaagtcgtaatccgccacaagctccatccaccttctttgccttagattcaactccggctgggtgaatatgtactttaggcttttgtggtcagtatagatttgaactttagcaccatacaagtatgatcgccaaattttcaaggcaaatactaccgcggccatttccaaatcatgcgtagggtaattcttctcatgtttccgcaattgccttgatgcgtatgcgataacactccccttttgcatcagtacgcatgaaaggccccgatccggactgcctaaagtccgggcgagttctctcgacccaagccactaagtgactcggccctaaccgtttatgaggttctttcctagtctaatccgtttcatatgattccgagattgaatatatgagacgaatagagtaaacaaacaatcggatactttattaattaagcaaaggattcgatacaacctatgaatttgcatataagctattacaagtcatataatcgatccctagactatccgaactatcaccacccatcatcccggccttgagtctctcgcgcctaagccaagtccttcccacgatcaccattcgttcctgaaagtcatagagccataagtaatcttatttacttaatcatatgcaagtccatgcaatgctctatatgccatacactactcggatccgtggagagaattcagagaggggaagatcgcgcatcagtctggccgattctcggcaggtcagttaagacccgccggtcctccgccgagccgcgtccccgcctcagccgatccctacccggaccgagtcttgtgtaggatgcacatgacccggatactactcagccctctagtcggtcctttcaaggatccgactactaactcacatcctagaacccttagactcaaagtctaggatcccttaccttccttctcgaggttaggtcgatccgaccctccttctttattgccggccacagcccggctaccgaatcctaaaactaattattctcccaagagggagagagttttaatggtgagttttcttgtgttttcggtgtgttgtggtgagtggaatggtcctgggcgcccttccttatatagggggcgaatggatgctttccgaatcaacacatccgttccttgcacctttccgaagagttgcacctttccgaagagttgcgcccttccgaagagttgcacctttccgaagagttgtatctcttcgcccataaccgcccagttcgtccgtcacccgtccagctacctcgagctcgtccgtcactcgtccagctacctcgagttcaaccgtcactcgtccagctgcctcgagctcgtccgtcactcgtccagctgcccgagctggactgtcactcgacctgagtaaccgtcactccttccagctgagcttgagctttgggcgagctgacccaagtgatttctttacgatcctagcttagcctgcatgatttcccctttgtccgagcttatggccagctccttctcacttgtccgagactccaccttcctctctcggtccaagtcctagccaacgatcctattgaggatcgcgggcattacaagtctcccccccttgaattggattcgtcctcgaatccgcatcaagttgatctttacccatctccttgaaccactccggaaaattggccttcatcttattctcggtttcccaagtatattcctcacggcctccacaattccacaagacttttaacaaatcccttgattttccccgagtccctttcgtcattcggtccatgatccgtactggccatgcttccaccgtcatattctcctttaacccgggaggtatatcttccacgctttcttcttgatcacttaaacacttccgtaattgtgacacatggaagacgttgtgaaacgcatttaattttggaggaaggtcaagtttgtatgccaccgcccctactcgttcgatcaccttgtacgggccaacataccttgggcttaactttttccttgaggtgaatcgccctgcccctttgtaggtcatcgcctttaagtacaccaaatctcgtacttggaattccaattcctttcgacgtttgttggcgtagcttttctgtcgatcttgggcttcctttaacttgatttttaagaacttcattctctccgtggtttcatccacgatcgtaggtccaaacaaccgacgttcgcccacgggcgtccaacacaacggtgttctacaagctcgtccatacaacgcctcatagggagacataccaatactagcttgaaaactattattgtatgcaaattctactaaccttagatatttctcccagtttcctccccaatccaagacgcatgccctcgacatgtcctcgagggtttgaatcgttcgttcggactgtccgtccgtctgttggtggtaggcagtacttaggttcactcgagttcctaaggccttttggaaagccttccaaaactttgacgtgaaccttgtgtctcggtctgacactatactaaccggaatcccatgtagccgcacgatctcgtctatgtacttctcggcaatgatttctgctccatccttatccgagatcgccatgaagtgcgcagacttagtcaatcggtctaccacaacccataccgcattgtgtttggacttgatccccgttggcagtccggtgacgaagtccatcgttatgtggtcccacttccattccggtataggtaggttttgtaacaacccacttggtacttgatgctccgctttgaccagttgacaagtcgggcacttggccacccatctggccacgtctttcttcattcctacccaatggtagtaccttttaaggtcgcggtacatcttgttcgacccatgatggattgagaacttcgattgatgggcctctcttaggatctcctcctttaatgccctatcgttcggcacacatactcgaccgttcaccacgattgtaccattgttcgaggtttggtactcggtcttattgtttagtgcccatccttttatctcctcgtcccgttcctgagccagccggatcctactaagcaggtcggcctgatcggcggctcccaaccctaagggttcaacttctttagacaaggcattcacatgcaatgtccccatcatgttaaccaagtccacttggctccgttccgcctcaacttccgaacgcctcctactcagggcgtcggcgacttggttggccttgcccggatggtacgctatatccaagtcgtaatccgccacaagttccatccaccttctttgccttagattcaactccggctgggtgaatatgtactttaggcttttgtggtcagtatagatttgaactttagcaccatacaagtatgatcgccaaatcttcaaggcaaatactaccgcggccatttccaaatcatgcgtagggtagttcttctcatgtttccgcaattgccttgatgcgtatgcgataacactccccttttgcatcagtacgcatcctagtcccactattgatgcgtccgtataaaccgtatatggctcaccttcctccggtaagaccaatactggtgcattagtcaacatggcctttaactccaggaagcttttctcgcattcatccgaccaattgaatgcggtgtcttttccggtcagtcgagacaagggttgggccatgctcgcaaaactccttacgaaccttcggtaataccccgctagtccgagaaaactcctaatctcggtggcattccttggtcgtggccactcctttatcgaccgtattttctccggatcaaccgatactccttggtccgagataacatgaccaagaaaaccaacgcttctttgccaaaatgagcatttacttaactttgcaaatagctcatgttcccttagccgttccagcaccgcccttagatgttcttggtgagcttcccaagatttcgagtaaacaagtatatcgtcaatgaagatgataacaaactcgtctaaaaaatcccggaacaccccattcatcattttcatgaaggctgctggtgcattggtcaatccgaatggcatgaccacaaactcaaagtggccgtaccttgtccggaaagccgttttcctcacgtccgttggctctatgggaatttggtgatatcctgaggccaagtcgatttttgaaaaccactgtgcacctccaagttgatccatcaactcatctatccggggtaaaggatatttgtttttcaccgtaactttattcaatccccgataatcgatgcatagcctaaagctaccatctttctttttcacaaacagaaccggcgcaccccatggtgagctactcggcctgatgaatccaacaactcctccaactgtttctttagctccgccatttccgccggtgccatccggtacggagctttagatatgggggttgtcccgggctcgagttctatcgtgaacgggtctgaccggtccggtggtacaccactaacggccgcaaacatgtccgagaactcgttgacgatcggaatgtctttcaactccgcactcgcccccacttccttggttgtgatcgtggctaaatatgcctcacatcctttcccgagcatcctttcagcctggattgccgagattaccaagcttcccgaggttgttcttattccttggaattttaacataccctcgtccctctcgaattgtatccgtcctcggtgacaatctatgtgagccttgtacttccccaaccagtccatccctaagataacatcatgtttctttagtggaacaatgattaggtccgcgggcatattgacaccgttcactacaaccgagatgccccgaacaagtccggtcggatacattgcctgtccgccggccgctcgtaccattccataatcggtgtttggttctttcctgaacccacctattttaaccaattctggactaacaaaacaatgtgtagccccagaatcaaatagagtgtgcgttactacgtcacctactctcaaggtccctacacattcccttagaatgctgagtacctcccctttcccatatgcatgatgcaatgcaaatgcagttattgaaataatgaatagggagttgtgagaacgtaccagtgatcgccctgaagtttctggcatcgttagcttcctccgacaactcataaactcgcggtgccacggcttgccgctttgggggaggcggcagtccatttcccccgcgattgtccctttgtccggcctgcttctccgcagtcaacttagggcactctcgctttagatgtccagtctttccgcaatagaaacaagtccttgtctcttcaccgagaaccttggactgccctggttccattctcgggcaactttggatcgcatggtccttgcttccacaccggccacatgcacctatggccttccagcaagttccgctgtggctcttaccacaggtcacgcattccccggtcttagcatcggacttggtgttatccaccttgtcaaatttccttttcttatccgcgggtttagtggattgattgttccggatcggtgctttctcccggttcaagtacctctcctcctcgatcccttcctcaatcattgctgccctttcaaccaattcggaaaccgagttgaatgtccggactaaacaatggttgcggatctctatccttagtccacggataaatcggcgcacttgagcttgttcctcctcaagttcacgtcccacataacgccttaggcggttaaattcctcatcatattcacgcaccgtgcggttcccttgaactaggtcgaggtacgcacattcaagcctatcccaagcctccggtggaaagtacttcttgttaaactcgtcttcgaaatccgcaaaggaccggacctcgtcccctctgcgtttctcgatggttaaccaccaattatgggcgtctccttcaaggaaatggactgcaatgtccctttggtaatcctcagggcagcgggtagacttgaagttcctcttgagtctactcctccactcatcggccataatagggtccgtactgcccatgaagtgtctcgtgcccagctttgagacatgttcgagaagactcagatagtctccccttttccgcccataattcggttgtggattcacttccacaacttccgattcatcgtccctttggttatccccttttaggaccaccggatctgctacaacggccttggtcaatgtggctagttgcgccatcattcccttcatcaaatcccactgttcttgggccgttggagtattattccggttatccgtgatgtcccttgcaccactactctccggtgcttcctcatttatggacttcttcccggcctcaggtccggccgagtctgtcccatcgaacatcgtcccgactctggttttctcgttgatcatcgtttcctcctcaaccaaagtctcctcgacaatgcccttgtccttcttactctttcccgttttgctgctcttacccatctgcgaaacctctaaagttaatccacctaactcctagtaaaatcgcaaaagagtaaagaacaactaccgcgagattctcaagccgacgagtggtgataccccttaacccaacacctagtcctagaaccaagcatgctctgataccaacttgaaaggccccgatccggactgcctaaagtccgggcgagttctctcgacccaagccactaagtgactcggccctaaccgtttatgaggttctttcctagtctaatccgtttcatatgattccgagattcaatatatgagacgaatagagtaaacaaacaatcggatactttattaattaagcaaaggattcgatacaacctatgaatttgcatataagctattacaagtcatataatcgatccctagactatccgaactatcaccacccatcatcccggccttgagtctctcgcgcctaagccaagtccttcccacgatcaccattcattcctgaaagtcatagagccataagtaatcttatttacttaatcatatgcaagtccatgcaatgctctatatgccatacactactcggatccgtggagagaattcagagaggggaagatcgcgcatcagtccggccgattctcggcaggtcagttaagacccgccggtcctccgccgagccgcgtccccgcctcagccgatccctacccggaccgagtcttgtgtaggatgcacatgacccggatactactcagccctctagtcggtcctttcaaggatccgactactaactcacatcctagaacccttagactcaaagtctaggatcccttaccttccttctcgaggttaggtcgatccgaccctccttctttattgccggccacagcccggctaccgaatcctaaaactaattattctcccaagagggagagagttttaatggtgagttttcttgtgttttcggtgtgttgtggtgagtggaatggtcctgggcgcccttccttatatagggggcgaatggatgctttccgaatcaacacatccgttccttgcacctttccgaagagttgcacctttccgaagagttgcgcccttccgaagagttgcacctttccgaagagttgtatctcttcgcccataaccgcccagttcgtccgtcacccgtccagctacctcgagctcgtccgtcactcgtccagctacctcgagttcaaccgtcactcgtccagctgcctcgagctcgtccgtcactcgtccagctgcccgagctggactgtcactcgacctgagtaaccgtcactccttccagctgagcttgagctttgggcgagctgacccaagtgatttctttacgatcctagcttagcctgcatgatttcccctttgtccgagcttatggccagctccttctcacttgtccgagactccaccttcctctctcggtccaagtcctagccaacgatcctattgaggatcgcgggcgttacaacgcatcctagtcccactatggatgcgtccgtataaaccgtatagggctcaccttcctccggtaagaccaataccggtgcattagtcaacatggcctttaactccaggaagcttttctcgcactcatccgaccagttgaatgcggtgtcttttccggtcagtcgagtcaagggttgagccatgctcgcaaaactcattacgaaccttcggtaataccccgctagtccgagaaagctcctaatctcggtggcattccttggtcgtggccactcctttatcgaccgtattttctccggatcaaccgatactccttgctccgagataacatgaccaagaaaaccaacgctcctttgccaaaatgagcatttacttaactttgcaaatagctcatgttcccttagccgttccagcaccgcccttagatgttcttggtgagcttcccaagatttcgagtaaacaagtatatcgtcaatgaagatgataacaaactcgtctaagaaatcccggaacaccccattcatcattttcatgaaggctgctggtgcattggtcaatccgaatggcatgaccacaaactcaaagtggccgtaccttgtccggaaagccgttttcctcacgtccgttggctctatgggaatttggtgatatcctgaggccaagtcgatttttgaaaaccactgtgcacctccaagttgatccatcaactcatctatccggggtaaaggatatttgtttttcaccgtaactttattcaatccccgataatcgatgcatagcctaaagctaacatctttctttttcacaaacagaaccggcgcaccccatggtgagctactcggcctgatgaatcctttatccaacaactcctccaactgtttctttagctccgccatttccgccggtgccatccggtacggagctttagatatgggggttgtcccgggctcgagttctatcgtgaacgggtctgaccggtccggtggtacgccactaacggccgcaaacacgtccgagaactcgttgacgatcggaatgtctttcaactccgcactcgcccccacttccttggttgtgatcgtggctaaatatgcctcacatcctttcccgagcatcctttcagcctggattgccgagattaccaagcttcccgaggttgttcttattccttggaattttaacataccctcgtccctctcgaattgtatccgtcctcggtgacaatctatgtgagccttgtacttccccaaccagtccatccctaagataacatcatgtttctttagtggaacaatgattaggtccgcgggcatattgacaccgttcactacaaccgagatgccccgaacaagtccggtcggatacattgcctgtccgccggccgctcgtaccattccataatcggtgtttggttctttcctgaacccacctatttcaaccaattctggactaacaaaacaatgtgtagccccagaatcaaatagagtgtgcgttactacgtcacctactctcaaggtccctacacattcccttagaatgctgagtacctcccctttcccatatgcatgatacaatgcaaatgcagttattgaaataatgaatagggagttgtgagaacgtaccagtgatcgccctgaagtttccggcatcgttagcttcctccgacaactcataaactcgcggtgccacggcttgccgctttgggggaggcggcagtccatttcccccgcgattgtccctttgtccggcctgcttctccgcagtcaacttagggcactctcgctttagatgtccagtctttccgcaatagaaacaagtccttgtctcttcaccgagaaccttggactgccctggttccattctcgggcaactttggatcgcatggtccttgcttccacaccggccacatgcacctatggccttccagcaagttccgctgtggctcttaccacaggtcacgcattccccggtcttagcatgggacttggtgttatccaccttgtcaaatttccttttcttatccgcgggtttggtggattgattgttccggatcggtgctttctcccggttcaagtacctctcctcctcgatcccttcctcaatcattgctgccctttcaaccaattcggaaaccgagttaaatgttcggaccaaacaatggttgcggatctctatccttagtccacggataaattggcgcacttgagcttgttcctcctcaagttcacgtcccacataacgccttaggcggttaaattcctcatcatattcacgcaccgtgcggttcccttaaactaggtcgaggtacgcacattcaagcctatcccaagcctccggtggaaagtacttcttgttaaactcgtcttcgaaatccgcaaaggaccggacctcgtcccctcagcgtttctcgacggttaaccaccaattatgggcgtctcattcaaggaaatggaccgcaatgtccctttggtaatcctcagggcagcgggtagacttgaagttcctcttgagtctactcctccactcatcggccacaatcgggtccgtactgcccatgaagtgtctcgtgcccagccttgagacatgttcgagaagactcagatagtctccccttttccacccataattcggttgtggattcacttccacaactttcgagtcatcgtccttttggttatccccttttaggaccaccggatctgctacaacggccttggtcaatgtggctagttgcgccatcattcccttcatcaaatcccactgttcttgggccgttggagtattgttccggttatccgtgctgtcccttgcaccactactctccggtgcttcctcatttatggacttcttcccggcctcaggtccggccgagtctgtcccatcgaacattgtcccgactctggttttctcgttgatcatcgtttactcctcaaccaaagtctcctcgacaatgcccttgtccttcttactctttcccgttctgctgctcttacccatctgcgaaacctctaaagttaatccacataactcctagtaaaatcgcaaaggagtaaagaacaactaccgcgagattctcaagccgacgagtggtgataccccttaacccaacacctagtcctagaaccaagcatgctctgataccaacttgaaaggccccgatccggactgcctaaagtccgggcgagttctctcgacccaagccactaagtgactcggccctaaccgtttatgaggttctttcctagtctaatccgtttcatatgattccgagattcaatatatgagacgaatagagtaaacaaacaatcggatactttattaattaagcaaaggattcgatacaacctatgagtttgcatataagctattacaagtcatataatcgatccctagactatccgaactatcaccacccatcatcccggccttgagtctctcgcgcctaagccaagtccttcccacgatcaccattcgttcctgaaagtcatagagccataagtaatcttatttacttaatcatatgcaagtccatgcaatgctctatatgccatacactactcagatccgtggagagaattcagagaggggaagatcgcgcatcagtccggccgattctcggcaggtcagttaagacccgccggtcctccgccgagccgcgtccccgcctcagccgatccttacccggaccgagtcttgtgtaggatgcacatgacccggatactactcagccctctagtcggtcctttcaaggatccgactactaactcacatcctagaacccttagactcaaagtctaggatcccttaccttccttctcgaggttaggtcgatccgaccctccttctttattgccggccatagcccggctaccgaatcctaagactatttattctcccaagagggagagagttttaatggtgagttttcttgtgttttcggtgtgttgtggtgagtagaatggtcctgggcgcccttccttatatagggggcgaatggatgcttcccgaatcaacacatccgttcctnnnnnnnnnnnnnnnnnnnnnnnnnnnnnnnnnnnnnnnnnnnnnnnnnnnnnnnnnnnnnnnnnnnnnnnnnnnnnnnnnnnnnnnnnnnnnnnnnnnnnnnnnnnnnnnnnnnnnnnntagcctggattgccgaggttctttcctagtctaatccgtttcatatgattccgaaattcaatatatgagacgaatagagtaaacaaacaatcggatactttattaattaagcaaaggattcgatacaacctatgagtttgcatataagctattacaagtcatataatcgatccctaaactatccgaactatcaccacccatcatcccggccttgagtctctcgcgcctaagccaagtccttcccacgatcaccattcgttcctgaaagtcatagagccataagtaatcttatttacttaattatatgcaagtccatgcaatgctctatatgccatacactactcggatccgtggagagaattcagagaggggaagatcgcgcatcagtccggccgattctcggcaggtcagttaagacccgccggtcctccgccgagccgcgtccccgcctcagccgatccctacccggaccgagtcttgtgtaggatgcacatgacccggatactactcagccctctagtcggtcctttcaaggatccgactactaactcacatcctagaacccttagactcaaagtctaggatcccttaccttccttctcgaggttaggtcgatccgaccctccttctttattgccggccacagcccggctaccgaatcctaagactatttattctcccaagagggagagagttttaatggtgagttttcttgtgttttcggtgtgttgtggtgagtagaatggtcctggcgcccttccttatatagggggtgaatggatgcttcccgaatcaacacatccgttccttgcacctttccgaagagttgcacctttccgaagagttgcgcccttccgaagagttgcacctttccgaagagttgtatctcttcgcccataaccgcccagttcgtctgtcactcgtccagctacctcgagctcgtccgtcactcgtccagctacctcgagctcaaccgtcactcgtccagctgcctcgagctcaaccgtcactcgtccagctgcctcgagctcaaccgtcactcgtccagctgcccgagctggactgtcactcgacctgagtaactgtcactccttccagctgagcttgagctttgggcgagctgacccaagtgatttctttacgatcctagcttagcctgcatgatttcccctttgtccgagcttatagccagctccttctcacttgtccgagactccaccttcttctctcggaccaagtcctagccaacgatcctattgaggatcgcgggcgttacaattccactgaagagtgtaaacatcttctgaatatcctcctcggaaaatataaatccggtgaagtagaggcagtctatcatcccaagaatgggaaaaataaacgcaagagcgacttcaaacagtcccaggcggaaccagcgcatgaagaacaacacgtggatcaccaactgctcctcgaggacgatcacgtagaggaggcgagggtcccggagaacgaactccccggtcccccaaaaagatggagaggacagcaaccgcagcgagctccagaccatccccgcggaaggatctccatgattatggccggaccatctgacgatgaggattcagtctcggctttaaagaagcgagctcgacaagtatgcagcattagggttgccccagaagctgagccattgagccaggaaccaattatctttacttcggaagatgcgcgtgggattcagcatccccataacgacgcactagtcgtcgaactggtaatggaggacttcgacgtagaacgggtcctaatcgataccggcagctcggtcaatctgatgttcctgaagaccctttcaaaaatgggaatctctgaaagcaaagtaatacctaaaatccgccctctgacgggatatgacggcgaggcaaagatgtcaataggggagatcaaacttcaagtccaagtgggcggcatcacgcaaaaaaccaagttcgtcgtcatcgactcggaaccaatctacaatgccattctgggaagtccttggatctattcgatgaaggcaattccctcgacgtatcacctctgcctgaagttcccgataaacacaggaatcttcaccctgtacggcaaccagaaggtctcacggacgtgctacgtgattgagaagaaacaacgaaagaaggaattcttatagcaattaaaggacgaagagcgagctgcaccgtcggagcgaccagctcgtgagtcaataagagcgccaagctgcaaaattatccaggtgaacatcgacgaatcagatccatctcgaacggttggaataggaagcgaactggaaggagagataaaggaagaactgatcgccttcctgaaatcgaggtcatcatcttttgcttggtccacaaaggatatgacaggaatcgctccagaggtaacctgtcataagcttaacacggatccaaccttcaaaccagttcgccaaaagcgaaggcggctaggggcggaccgcgccaaggccgtccaagatgaggtcgagcggctcctaaaagccggtctgattaaagaagtccaatacccagaatggttagctaacccggtggtggtcaaaaagaagaacggtaagtggcgagtctgcgtggactatactgacctaaacagggcttgccctaaagatagttatccactgccacacatagatcgcctagtcgaggcaacatctggaaatcagctcttatctttcatggatgccttttcgggatataatcaaatcctgatgcacaaggacgactgtgaaaaaacggctttcatcactgatcgcggaacgtattgctacatagtgatgctgtttggtttaaagaatgcaggggcgacctatcaacgtttggtgaacgaaatgttcgccgaactgctgggaatcacaatggaggtttacattgatgacatgttggtaaagtctttacaggccacagaccatatcaaacatctcaccgcgtgtttcgatattctagacaagtatcagatgaagctgaatcccacgaagtgcactttcggagtaacgtcgggagaattcttgggatacatagtcaccgaacgaggaattgaagccaacccgaagcagatcgatgcgataatcggactgccgtccccccagaacaaacgagaagtacaaaggctaacaggtcggatcgcagctttgaatcgcttcatcgcccggtcaactgataaatgtctcccattctacaagctcctgcgcggaaacaaggatttccattgggacgaaaaatgcgagaacgccttccaggagctcaaatcctacctcatgagcgggacgatcttagccaaacctgaggtcggggaaattgtaacgaccgcgtcccgcgttcataaagagggcaggttgttttaggagaaaactagaccatggtcaagaaacggactaaaatacttagtaggaagaacgagaaagttcaagccgaaccagctaggtgagctggacaagctggatgaactagctagctaagctaggtgagctaaaccagctgtaagactagctagctcagctaggtgagctgaccgacagctcgattgagctcggtgagctaatcaagtactgacccagctgggtggtccggtcagctgacactcgagctggtgaactgtggtagctcacgggtgaagaggtgtctcggccaaaaggtgtaaggtcgagcgggtaccaacgaacggttgcatcgcccaagggatgcaaggaacagatgtgacctttcgaaaggatgcaaagaacggatgtgacctttcggaagggtgcaaggaccggatgtgatgcttcgggaagcatccattcgcctcctatataagggaggacgcccaaggcatctcacatcatctcacaacatccaaaacaccataaaacattctaaaaggagtcccaacacatcctagagttgttggtcggaaagggggtgcggctcggcgagtataactcgaccgaactgatgcgcatgctacctcccggtccaacggttcgatggagtgtagaggatggagagggtagaccgttcgtcttagagacgaatcggatctggtagaccgatcgttggatcggatcggccagaccgatcgtcagacggatcggatcggccagacggatcggacagaccgatcgtcggacgggtcagatgggacaggccgatcgtctgacggaacgggtcggacagaccaatcgtcggatgagatggatcgagaaaagtgttcgaggaagcacaaggataagtgcatccgaacacacccaagggtcgcccatggatgcaatcttaccgataaagggagaaagcaccaagaatgggtaaggaacgtgattcaccatataggatcaacatcgcggccgccttcatgtatctatctccttagccatggtgaaaccgatcagagatcagtaagaccaaagggtgactcgacggataaccaacgggaaagtccacggtgggaaccgatggacaaaacggatgttggacccgcgagcaaacctaaggccgacggaagaaagatttcatgggctagcctatgatgatccagtggatgaatccacggacccttgggtgtgataaggatatcgttcggaccgcatggatggatcattaagccgaaagctttatcgaccaccatggactggacgggtaaacgattagtaaaccgtgggcggtcgtagtgttaaacgaccggaacggaaacatggatggttcgataagccgagggctcaatcgtccaccatgtagccggaggggcgtacgtttggagaacgaatggaccaataagccaagagcttgattcggccatcgtgaaccaagggaatcgtacgatccccaatctctatcgttgtacttagaccagtggggttggttggttgtatggctaagtaacaatagggattggttcatcaattcacgaccgatgacgagtcgttgaacgaatggagtaaggcgacaaacgggctaaggaatcaaatctgcatattgaccaaggtatataacgatctagcttattagttaagatagacgtttggtaattgaccgtgaaagtaggataaaggaatatgcgattgtttggcttagaatggttagcgaacatatgcatgtcttgaccgagtaaaggatcgatctaagtctaaggaacaaagacgatgaaaccggtacaagagttggttagaattaaaccaaggttagaaagacttccgctgtgtaataagagagcgattatagaatttagcctcgtaaaggcaattctatgttgaatcgcgaaaaattaagaggttcggccgggaagaggcgcgaacttgagtacaacgtcgccggacgtcgagacgtccgggatggggtctcacaagttggtatcagagcatgcttgatcctaggatggataggtgctcgggaaaacgtcatagtaaggttctggcggataaggaagttaagggatcgttgtgtacggaaacggaaatagttacccaactcacgatcaggaaccaagatattatccttgtagtcaaaactcaaacatgacggaaaagtgggttgatatattcggagatggaccgatatcaatgaaatttggatctagtcgaaacttgactaagatcgggtacagacttagtcgggatttgactatttctggggttttgatcttatcagaaattgaccaagatcatggaaaaacgacaaggttggaaagagacctatgtcgggaatattgaccgagtccggtggggaccagggtcggaaatattgacaaagtcggaaaaagactttagtcgagaatatgatcgagtccgggaaaggaccaggatcggaaatttgatcgaatgtcggaagagacaaagatcagaaaacgttgatcaagtccaggaaaggacaaagattggaaaacgttgatcaagtccaagaaaggacaaagatcagaaaacattgatcaagtccaggaaaggacaaagatcgggaaataatgatcaagtccgggagaggactaggatcaggaatttgatcgagtgtcgtaagagacaaagatcgggaaacttgatcaaactcggaaatagagatttgatcaaacgtgatatctaaagtcttggagagactaaagatgggaaagcattaaggagtaaacaagatcttacactcgctgaattcgaggacgaattcagtttaaggggggtagacttgtaacgctcgtgtctcgagttagggagtaaccaagatcttacacacgccgaattcgaggacgaattcagtttaaggggggtagacttgtaacgactgcgtcccgcgttcataaagagggcaggttgttttaggagaaaactagaccatggtcaagaaacggactaaaatacttagtaggaagaacgagaaagttcaagccgaaccagctaggtgggctggacaagctggatgaactagctagctaagctaggtgagctaaaccagctgtaagactagctagctcagctaggtgagctgaccgacagctcgattgagctcggtgagctaatcaagtactgacccagctgggtggtacggtcagctgacactcgagctggtggactgtggtagctcacgggtgaagaggtgtctcggccaaaaggtgtaaggtcgagcgggtaccaacgaacggttgcatcgcccaaaggatgcaaggaacagatgtgacctttcgaaaggatgcaaagaacggatgtgacatttcggaagggtgcaaggaccggatgtgatgcttcgggaagcatccattcgcctcctatataagggaggacgcccaaggcatctcacatcatctcacaacatccaaaacaccataaaacattctaaaaggagtcccaacacatcctagagttgttggtcggaaagggggtgcggctcggcgagtataactcgaccgaactgatgcgcatgctacctcccggtccaagggttcgatggagtgtagaggatggagagggtagaccgttcgtcttagagacgaatcggatctggtagaccgatcgttggatcggatcggccagaccgatcgtcagacggatcggatcggccagacggatcggacagaccgatcgtcggacgggtcagatgggacaggccgatcgtctgacggaacgggtcggacagaccaatcgtcggatgagatggatcgagaaaagtgttcgaggaagcacaaggataagtgcatccgaacacacccaagggtcgcccatggatgcaatcttaccgagaaagggagaaagcaccaagaatgggtaaggaacgtgattcaccatataggatcaacatcgcggccgccttcatgtatctatctccttagccatggtgaaaccgatcagagatcagtaagaccaaagggtgactcgacggataaccaacgggaaagtccacggtgggaaccgatggacaaaacggatgttggacccgcgagcaaacctaaggccgacggaagaaagatttcatgggctagcctacgatgatccagtggatgaatccacggacccttgggtgtgataaggatatcgttcggaccgcatggatggatcattaagccgaaagctttatcgaccaccatggaccggacgggtaaacgattagtaaaccgtgggcggtcgtagtgttaaacgaccggaacggaaacatggatggttcgataagccgagggctcaatcgtccaccatgtagccggaggggcgtacgtttggagaacgaatggaccaataagccaagagcttgattcggccatcgtgaaccaagggaatcgtacgatctccaatctctatcgttgtacttagaccagtggggttggttggttgtatggctaagtaacaatagggattggttcatcaattcacgaccgatgacgagtcgttgaacgaatggagtaaggcgacaaacgggctaaggaatcaaatccgcatattgaccaaggtatgtaacgatctagcttattagttaagatagacgtttggtaattgaccgtgaaagtaggataaaggaatatgcgattgtttggcttagaatggttagcgaacatatgcatgtcttgaccgagtaaaggatcgatctaagtctaaggaacaaagacgatgaaaccggtacaagagttggttagaattaaaccaaggttagaaagacttccgctgtgtaataagagagcgattatagaatttagcctcgtaaaggcaattctatgttgaatcgcgaaaaattaagaggttcggccgggaagaggcgcgaacttgagtacaacgtcgccggacgccgagacgtccgggacggggtctcacagaaatcttatatctctacgtctcggtgtcaagttcggcggtgagcggagtactggtaagagatgatcgtggtgacgaaaaacctatcttctataccagtaaagccctgaatgacgccgagaccagatatccgaccttagaaaagctggcattggcggtgataacggcagctcggaaactccgaccttatttccaatcacattccatagtagtgttcactgatcagccactacgcacagtgctccacagcccaaaccagtctggacgaattgcgaaatgggcaatcgaactgagtgaatacgacgtggaatatcgctctcgcccgagcctcaaatctcaggtcctagcggacttcatgaccgaactatctccagatgtgatggacgttatcccggacgaaaactggatactctactcggacggctcctcatcgttacaaggctccggcatcggaattctacttcgttcgccaaccggagaaatccttgaacaatcacttcggctccagtttaaggcatcgaataacgaagcaaaatacgaagcacttctcgcaggacttcgactcgctaaggggctcggagctaaacagatcaaagctttcagcgactctcaactcgtggtcagtcagttcagcggggaattcgaagcaaagaacgaaagaatgcgggcttatctctcactggtccacgcactttccagccagttcgaacagttcgccctgatcaaaatccctcgaaacgataattcggcagcagatgcattggccgcactggcctcaagcaccaaccccgacttaaggcgaactatcccagtcgaaagcatagcacaaccgagcatcgaaccgctgaagtcgacctgcgtgattgtagaccccgtaacggccatggacatggacggcaatgcagccaacgcgccggatacagaagaaaatccggaaccatccgattggcgactccccatcaaaatgtacattgccgacggcatagttccagcagatcgatgggaagctcgccgactaaaaaccaaagcggcgaactacatgatgatgggcggcgaactttacaggcgaagtgcgaccaaagcttttctcacttgcgtggatcaaaaagaagccctaacactcatgaaggaaacgcatgacggagacggtgggaatcattccggcggacgagctctctgccttaaaatcaaaaaagacggtcattactggccaactatgctggcggactgcgaagcctacgcggcaaagtgcgaaccgtgtcagaggcacggcccgatgaagaacgttcctcccgagatactgcgttcggtcacggcaccgtatccattcatgcgatgggccatggatatcgtgggaccaatgcccccttctggatccaaaaggtttatgttagtcctaactgattactacaccaaatgggtcgaggcacaggcgtaccacaaggtcaaatcacgtgatgtggttgcattcatctggaagaacattatttgccggcatggccttccttatgaaatcgttacagataacgggaagcagttcgtctcgctcattactagaaacttcctcgccaagtggaacattcgcatgagcaactcgactccaagatatccacaagggaacggtctagctgaagctacaaacaaaacgatcatagccggaattaagaaaagacttggccctaaaaagggaaactaggcaaacgagctggatggcgtactctggtcatacagaactacacctcggcgacctgcatcattatctcctttctccctggcttacggcatcgaggcaatggctccaaacgaagccggagttccaactttacgaagatgcatgatgtcgaacgaccaaaaactgaacgatcagcttttaggcgaccataatgatttcgccgaagaacttcgcgatcaagccgccatccggatccagaattaccagaatgcagcggcgaaatactataatcgaaacgtccgagagcgtcgtttcaacgttggcgacctcgtgcttcgggaagtttacagtaacaccgaagaaaagaacgctggaaaactcggagctcgatgggaaggaccttacttgatctcgaaggtacttcatccaggagtctatctgctgatgaccatgaagctgaaagaggtggaaaatccgtggaatgcagcccacctcaaaaggtactattactaggttaaaaattagctacgcccaaaaaaaaaaaaaaaaaaaaaaaaaaaactatattcatatatttattctaagcacgcagatcgcctgtcgatctcctttatgtaatacgaactacgaatggcttgatcccttaattgggtacgtaggcagtccttcgcaaggatgcagctataatacttaataaaattaaagtttgcattctcaatacggaattcgctttacgatctattatgtcaactctcggcgccctggccaggcgttcgatgcgcgtctcacatggatgcagtggtgaaataatccacgccctattagaaacttaatttttctaatagggaaagccgagaccagttttctcgcacttaagctctggttcggacagaaatataagccgaaccgtttcgcgatctgccgaacagatgctctacggggagtaagccgagcccagcatctcgccccccaaataatatgctgagtccgcctcacttattttggaaacagagcccagaactccctctttaaatcatacataagcctgctggacataagccgagagacgtctcgcgtccagcacacgctgaatattctttctcaaaagccgggctcagtctcgcacctaacatctaatccaattagacagaaaaaattgcgttacttcgaaaagaactaaaaaagccgacctcagaggtcgcagaggaaataagccaattcaattgcattgtattaatcaacgaccaaacgggatcgggggttattacaaagacatttattccagaataaattagagttaaacaaggtcgccagccatcacaagggcgtttatttggaaataaaaagcaaaggaaaaacagtccgaaaagccaccaaggatcatcttctatcagccagatagaacatcagatcgccctgtcagaaacagtgcgattatcctgaagaaggcgatctggcatgggccacactagctgcagaccagctttctcccaatcctccgaacgaatctccaatgccctaatcgtttgttcgacctcatccagacgagtgacgacccttcttcttttcttcttcagcttagcaatcagagtctcgagctcctcgagacgaaagtccacccttcgtttcttggttcgaaagtactgcagctcgcggcattgatcctgatgcagaaatccaacctgagaagtcaaagcaacgaaattctttaaaaacatcccgatatccaaaacacaaaccaaagcaatccttacttggttgacgaagttctgacactccgtggtatcagcatcagtagcagccggcccaaggtagaatagagaaggcgtcctgggaatgaagtccccatcagcaatgattgttggatgcttctcctttgagacggcagcggcgtctcgatcacagtcctcacaatacgacaaaagaatgcccggcatcggagccagaagctgaaaaccattcttaagccaatggcgaggatgtgactccagcatagccatttttcgagcgatgtcggaccttcgttcgtcatagtaccttagcatctcgcggtattccttatgcctagactcgacgcatgacaagaaaccctcggcttcacgtctttcctccgagctcgcctgaaataggagagtccagggaactcgaaggttattgaaaaacggcatccctcgttcaatcgcctcagcattcgagaaagtcggaatatttctgccaacaaagggagaagatccaacactctccatcttgcaaatagaaggaagaaagggccgatgaaacaatcgtcgatcaacagagaagtatttataggggcaaatacagaaatcgaattgggaatttgccttaatgcgatctggaaattctcattttcctcttccgagacgttaacgtttccattttctccaaattgggaaaatggaaatttacttagttgcgggttgacttcctcaatttccttttccaaaaaaatgacaaagctcataaatggaagaaagaaccattctgcttcagaaacaggcaagatagaaaatcatcgaaaatagaagttaaaattaaaaaccgccctggaagtgggtccacggttaaataagagttttgagatcatcccgaaaattgggtccacgatcgatattccaaaatagattacaaaaggcgacctattcaggtcgtctggttcgtttcctcatcgcttacacgacgaatatcgcttccgctaacgaggtcgacatttgagccaagccgatctggggacatgttcagatcaccgtccccgagctcgataacgttcaaggcattgacttcgtcggtcgcccttttttggttaactccttaaggccgctgagttcagatgctacaatcttcgcgcctctctgcataaggatgcccactatctcctcagcgcctctggcttgattctcagcatccacctttggcccgacgaggtcctctggctcgagataagccttctctatcaagacgagcttaggttttctttgtagtacgggcgacgttagcagctcggtcattccacaacctgttgcactccctatccccgtgctcccttacagcaaccaatgcgacctgatagctttcaacgtcgtcatttcctcgaaacaacgaacgtttaccaggtaaccttcttcagcgccgaaggtcagagcggcaacaaaattgcagatcgccaccagagtaagctgggagaacgccatacgacttacgaggtcatcgttaatcttacaagatgcttcggttcctgagcttcacgcgcgcgtacagacgcggcaattggacacgtgtcagttacgaatcgattcggaaatctagtgattaattcacgctttccaagatttaaatcgaatattcaatttctaagttcggatgtttcgaattaagcaactcggatcttccgaactggggggggactaattgttggtgcaggaattagcacctccgacaataccgatttaaaccaagaaataacatgaataaaatcgagaattcgattgaaccgggaaatcccggttagcctgttaatgggcctgagtcatgagctcgcccgaaatttagatcgacaattgagatcgccgtaggcggtttctaaggtcgtgtgaaggaaaaacttctattttaaagaggggaatctcatgaagaatggaagtaatggagatttagatctaagataattagaagtttatcatattttggtatgttcgacccattgtataaatagggggggggggtcaaactccccaaaggatcatctttaacctaatacaagagactacaattatagagcaaaccttagctttttattcaagcaattttgttctttccctttgattatttgtgagctaagagaggagtgaatttgtctaaatcccttagtacaaattcattgtttgattacagaatcaacaatcctgattctgaaaatcacacaataaatttgtttaaaggggataaacaaatttacttaactctctcgctatttagtgaccaaagattcaatgaaaagaagaacaaggttgcttagagacaaagttagggtttttgaaaggccccgatccggactgcctaaagtccgggcgagttctctcgacccaagccactaagtgcctcggccctatccgtttatgaggttctttcctagtctaatccgtttcatatgattccgagattcaatatatgagacgaatagagtaaacaaacaatcggatactttattaattaagcaaaggattcgatacaacctatgagtttgcatataagctattacaagtcatataatcgatccctagactatccgaactatcaccacccatcatcccggccttgagtctctcgcgcctaagccaagtccttcccacgatcaccattcgttcctgaaagtcacagagccataagtaatcttatttacttaatcatatgcaagtctatacaatgctctatatgccatacactactcggatccgtggagagaattcagagaggggaagatcgcgcatcagtccggccgattctcggcaggtcagttaagacccgccggtcctccgccgagccgcgtccccgcctcagccgatccctacccggactgagtcttgtgtaggatgcacatgacccggattctactcagccctctagtcggtcctttcaaggatccgacttctaactcacatcctagaacccttagactcaaagtctaggatcccttaccttccttctcgaggttaggtcgatccgaccctccttctttattgccggccacagcccggctaccgaatcctaagactatttattctcccaagagggagagagttttaatggtgagtttcttgtgttttcggtgtgttgtggtgggtggaatggtcctgggcgcccttccttatatagggggcgaatggatgcttcccgaatcaacacatccgttccttgcacctttccgaagagttgcacctttccgaagagttgcgcccttccgaagagttgcacctttccgaagagttgtatctcttcgcccataaccgcccagttcgtccgtcactcgtccagctacctcgagctcgtccgtcacttgtccagctacctcgagctcatccgtcactcgtccagctgcccgagctggactgtcactcgacctgagtaactgtcactccttccagctgagcttgagctttgggcgagctgacccaagtgatttccttacgatcctagcttagcctgcatgatttcccctttgtccgagcttatagccagctctttctcacttgtccgagactccaccttcttctcccggaccaagtcctagccaacgatcctattgaggatcgcgggcgttacaagtctcccccccttgaattggattcgtcctcgaatccgcatcaagttgatctttacccatctccttgaaccactccggaaaattggccttcatcttattctcggtttcccaagtgtattcctcacggcctccacaattccacaagacttttaacaaatcccttgatttttcccgagtccctttcgtcattcggtccatgatccgtaccggccatgcttccaccgtcatattttcctttaacccggggggtatatcttccacgctttcttcttgatcacttaaacacttccgtaattgtgacacatggaagacgttgtgaaacgcatttaattttggaggaaggtcaagtttgtatgccaccgcccctactcgtttgatcaccttgtacgggccaacataccttgggcttaactttttccttgaggtgaatcgccctgcccctttgtaggtcatcgcctttaagtacaccaaatctcctacttggaattccaattcctttcgacgtttgttggcgtagcttttctgtcgatcttgggcttccttcaacttgatttttaagaacttcattctctctgtggtttcatccacgatcgtaggtccaaacaaccgacgttcacccacgggcgtccaacacaatggtgttctacaagctcgtccatacaacgcctcatagggagacataccaatactagcttgaaaactattattgtatgcaaactctactaaccttagatatttctcccagtttcctccccaatccaagacgcatgccctcaacatgtcctcgagggtttgaatcgttcgttcggactgtccgtccgtctgtgggtggtaggcagtacttaggttcactcgagttcctaagaccttttggaaagccttccaaaactttgacgtgaaccttgtgtctcggtctgacactatactaaccggaatcccatgtagccgcacgatctcgtctatgtacttctcggcaatgatttctgctccatccttatccgagatcgccatgaagtgcgcagacttagtcaatcggtctaccacaacccataccgcattgtgtttggacttgatccccgttggcagtccggtgacgaagtccatcgttatgtggtcccacttccattccggtataggtaggttttgtaacaacccacttggtacttgatgctctgctttgaccagttgacaagtcgggcacttggccacccatctggccacgtctttcttcattcctacccaatggtagtaccttttaaggtcgcagtacatcttgttcgacccaggatggattgagaacttcgattgatgggcctctcttaggatctcctcctttaatgccctatcgttcggcacacatactcgaccgttcaccacgattgtaccattattcgaggtttggtactcggtcttattgtttagtgcccatccttttatctcctcgtcccgttcctgagccagccggatcctgctaagcaggtcggcctgatcggcggctcccaaccctaagggttcaacttctttagacaaggcattcacatgcaatgtccccatcatgttaaccaagtccacttggctccgttccgcctcaacttccgaacgcctcctactcagggcgtcggcgacttggttggccttgcccggatggtacgctatatccaagtcgtaatccgccacaagttccatccaccttctttgccttagattcaactccggctgggtgaatatgtactttaggcttttgtggtcagtatagatttgaactttagcaccatacaagtatgatcgccaaatcttcaaggcaaatactaccgcggccatttccaaatcatgtgtagggtagttcttctcatgtttccgcaattgccttgatgcgtatgcgataacactccccttttgcatcagtacgcatcctagtcccactattgatgcgtccgtataaaccgtatatggctcaccttcctccggtaagaccaatactggtgcattagtcaacatggcctttaactccaggaagcttttctcgcattcatccgaccagttgaatgcggtgtcttttccggtcagtcgagacaagggttgggccatgctcgcaaaacttcttacgaaccttcggtaataccccgctagtccgagaaaacttctaatctcggtggcattccttggtcgtggccactcctttatcgaccgtattttctccggatcaaccgatactccttggtccgagataacatgaccaagaaaaccaacgcttctttgccaaaatgagcatttacttaactttgcaaatagctcatgttcccttagccgttccagcaccgcccttagatgttcttggtgagcttcccaagatttcgagtaaacaagtatatcgtcaatgaagatgataacaaactcgtctaagaaatcccggaacaccccattcatcattttcatgaaggctgctggtgcattggtcaatccgaatggcatgaccacaaactcaaagtggccgtaccttgtccggaaagccgttttcctcacgtccgttggctctatgggaatttggtgatatcctgaggccaagtcgatttttgaaaaccactgtgcacctccaagttgatccatcaactcatctatccggggtaaaggatatttgtttttcaccgtaactttattcaatccccgataatcgatgcatagcctaaagctaccatctttctttttcacaaacagaaccggcgcaccccatggtgagctactcggcctgatgaatcctttatccaacaactcctccaactgtttctttagctccgccatttccgccggtgccatccggtacggagctttagatatgggggttgtcccgggctcgagttctatcgtgaacgggtctgaccggtccggtggtacaccactaacggccacaaacacgtccgagaactcgttgacgatcggaatgtctttcaactccgcactcgcccccacttccttggttgtgatcgtggctaaatatgcctcacatcctttcccgagcatcctttcagcctggattgccgagattaccaagcttcccgaggttgttcttattccttggaattttaacataccctcgtccctctcgaattgtatccgtcctcggtgacaatctatgtgagccttgtatttccccaaccagtccatccctaagataacatcatgtttctttagtggaacaatgattaggtccgcgggcatattgacaccgttcactacaaccgagatgccccgaacaagtccggtcggatacattgcctgtccgccggccgctcgtaccattccataatcggtgtttggttctttcctgaacccacctatttcaaccaattctggactaacaaaacaatgtgtagccccagaatcaaatagagtgtgcgttactacgtcacctactctcaaggtccctacacattcccttagaatgctgagtacctcccctttcccatatgcatgatgcaatgcaaatgcagttattgaaataatgaatagagagttgtgagaacgtaccagtgatcgccctgaagtttccggcatcgttagcttcctccgacaactcataaactcgcggtgccacggcttgccgctttgggggaggcggcagtccatttcccccgcggttgtccctttgtccggcctgcttctccgcagtcaacttagggcactctcgctttagatgtccggtctgcccgcaatagaaacaagtccttgtctcttcaccgagaaccttggactgccctggttccattctcgggcaactttggatcgcatggtccttgcttccacaccggccacatgcacctatggccttccagcaagttccgctgtggctcttaccacaggtcacgcattccccggtcttagcatcggacttagtgttatccaccttgtcaaatttccttttcttatccgcgggtttggtggattgattgttccggatcggtgctttctcccggttcaagtacctctcctcctcgatcccttcctcaatcattgctgccctttcaaccaattcggaaaccgagttgaatgtccggaccaaacaatggttgcggatctctatccttagtccacggataaatcggcgcacttgagcttgttcctcctcaagttcacgtcccacataacgccttaggcggttaaattcctcatcatattcacgcaccgtgcggttcccttgaactaggtcgaggtacgcacattcaagcctatcccaagcctctggtggaaagtacttcttgttaaactcgtcttcgaaatccgcaaaggaccggacctcgtcccctctgcgtttctcgacggttaaccaccaattatgggcgtctccttcaaggaaatggaccgcaatgtccctttggtaatcctcagggcagcgggtagacttgaagttcctcttgagtctactcctccactcatcggccacaatcgggtccgtactgcccatgaagtgtctcgtgcccagccttgagacatgttcgagaagacttagatagtctccctttttccgcccataattcggttgtggattcacttccacaacttccgagtcatcgtccttttggttatccccttttaggaccaccggatcagctacaacggccttggtcaatgtggctagttgcgccatcattcccttcatcaaatcccactgttcttgggccgttggagtattgttccggttatccgtgatgtcccttgcaccactactctccggtgcttcctcattcatggacttcttcccggcctcaggtccggccgagtctgtcccatcgaacactgtcccgactctggttttctcgttgatcatcgtttcctcctcaaccaaagtctcctcgacaatgcccttgtccttcttactctttcccgttttgctgctcttacccatctgcgaaacctctaaagttaatccacataactcctagtaaaatcgcaaaagagtaaagaacaactaccgcgagattctcaagccgacgagtggtgataccccttaacccaaacacctagtcctagaaccaagcatgctctgataccaacttgaaaggccccgatccggactgcctaaagtccgggcgagttctctcgacccaagccactaagtgcctcggccctatccgtttatgaggttctttcctagtctaatccgtttcatatgattccgagattcaatatatgagacgaatagagtaaacaaacaatcggatactttattaattaagcaaaggattcgatacaacctatgagtttgcatataagctattacaagtcatataatcgatccctagactatccgaactatcaccacccatcatcccggccttgagtctctcgcgcctaagccaagtccttcccacgatcaccattcgttcctgaaagtcacagagccataagtaatcttatttacttaatcatatgcaagtctatgcaatgctctatatgccatacactactcggatccgtggagagaattcagagaggggaagatcgcgcatcagtccggccgattctcggcaggtcagttaagacccgccggtcctccgccgagccgcgtccccgcctcagccgatccctacccggactgagtcttgtgtaggatgcacatgacccggattctactcagccctctagtcggtcctttcaaggatccgacttctaactcacatcctagaacccttagactcaaagtctaggatcccttaccttccttctcgaggttaggtcgatccgaccctccttctttattgccggccacagcccggctaccgaatcctaagactatttattctcccaagagggagagagttttaatggtgagtttcttgtgttttcggtgtgttgtggtgggtggaatggtcctgggcgcccttccttatatagggggcgaatggatgcttcccgaatcaacacatccgttccttgcacctttccgaagagttgcacctttccgaagagttgcgcccttccgaagagttgcacctttccgaagagttgtatctcttcgcccataaccgcccagttcgtccgtcactcgtccagctacctcgagctcgtccgtcacttgtccagctacctcgagctcatccgtcactcgtccagctgcccgagctggactgtcactcgacctgagtaactgtcactccttccagctgagcttgagctttgggcgagctgacccaagtgatttccttacgatcctagcttagcctgcatgatttcccctttgtccgagcttatagccagctctttctcacttgtccgagactccaccttcttctcccggaccaagtcctagccaacgatcctattgaggatcgcgggcgttacagttttgcccaagaacaatgaagaaaactagggtttttagtattaaatttcggatccttagaatagaggacaaacccctctatttatacactattaagacggttaaaagagttgttaaacttttatttcttcgaggattgaatcttctaatttcctttatctccaaagacttcctattttcaaaggagaaaacttctttttcttcgaattaggaagtcggctagacggtctccctacttcgggctaaagtcggcaaatgacctccttattttggcccattaacaggctaaaccgggataccccggtttgattgaaatctcagtctaattcgtagttcctctggtttaagccggtattgtcggaggtgctaattccggcaccaacaattagtccccccccccagttcgggaaaatccaaatgctaaactcgagtttttccgaattaaaagaagtgaatattcggcttatactttaggaagatgcgaattaaaaattgatccgttgaacctccaagatacgtcagtttagcttggcacgcgtcgacgatataaaacaaggctaagcttgtgggttaggtagtctgatggacctcatgagttgttgaggagctgtgggatgctctcctagatgatctgaatgcctagcagagaaatgacctgactgatgagccgagcagtgagataggttaccaaatgatcttgctaacaagctgcaaggcaagctatcagatgatctgacgagcgatctgggatataggttgctagatggtttgtcttgcgatctgcgagatagccgggcagatgagctaaaaaaaacataagttgcgatgagctgcaaacatgccattatcatttggttagcaagatacgtgagcttttgagctctttttttttttttttttttaaggtgcgaggaactctcggcttatcctgttttgaagacttaaagcaagacgaggtcttggtttttgtgaaacattttcacataatagcaagcgtcgagctcggctcaatttatgtgtgactgcaagcgttgagctcggattaactgcaagaattatttttatcttttgaatgtagttcgatactaggtgaactaagctttttgagtcgggactcaatttagagcttgacttcaacaatcaaaaaatgtaaagcacgaatacttatcttgatgggagaagaaatggcgagaggctgagctcagaattgctgttccaaaggtagagttgcattgttcgtctatgaagagtcgttcttatcaaatagtgattaccttgcagcagagacagaaatactgtgataactctttgtcgaattcgacgttaaggtgtaggttggtctttctagaaagctgagcctcggggcttcaaattgatatgcagatcgccatgaaaattcttttggattgctagaaatttgctttctaatttggttgatcgtgcagtgaggatctgcgtttcgctggttgcatctgttgcaaagaaagagtcataaccttcagtgtaaatttctgattgaggcgagatttgcttcttttgaaagctaattttcggggcattccgtggataggttacacgccacgcagttcgtcggaatcttcctggaaattgatttcaaagtcgactggttttgtaacttttgaccagtgtttcgtcttgctgtatctgctggagagaagcgcatgtaactttcggcacatagcttcgattggaacaatattggactatatggagagctgtctgtctgggcaatctgtggatatgtttcctgtctcttggttcgcgggtcgtacaatgtcggaaaattgctcacgaagttggtcgtttgcaagtggtgtcagtctgaattgtcttggaaaaacgatcataactctcaaaccataacctcaaatcgtgatccgcttttttctgtggcttcgtgtgactgttgctgattattccagaaaatatcgtaattttccgagttgttttgttgctccattggcgatcagaattcatgacgacgaaagcaaaggttactttgtgctgcttcagaacttttaacgaaggagggagacatgcgatgctgctcaagttgagatctggaattttagagtctttgtaaacttctttggagctctccacattgttgacttgtcttgtagaaaaagcttattattttttttttttggtgctacgagattctgttcttgacgggtgttgctatctcgaactcaaaatgttagctgttgacaagttgagctaggaaagctgctaggcgacttgttgaagaactccaagctgttaggcgggcaatagcaagctaggaaggctgccgacgagctgttagctgggcgaactacgagccagagaaactgcagacgaactgtgagctaggaaaagtgcagactaggtgctagctagacgaactgcgagctaggaaagctacagacgaacagggagctaggaaagctgcagacgagctgttagctaggcgaagtgcagacgggctgctagcaaggaaacctacagacgaactgggagctagaaaggctgcagacgagctgttagctaggcgaagtgcagacgagctgttagctagacgaactgggagctaggaaggctttaggtcggttgacttatgtcgaccactcttatctttcagacttttatatttgaataaaatgtttttgcccttaagaacaagttcatgtttgttttttttttgtgaacctccgtcggttgattacgtattaaccatatcggattcccaatcttgaaattaggttttagatcgactaaattataagccatctgcaagctttgagctcggctttcgggcggactgattttcccagcttggagttcttcaacagctgttcttctgaaaatcacacaataaatttgtttaaagggggtaaacaaatttacttaactctctcgctatttagtgaccaaagattcaatgaaaagaagaacaaggttgcttagagacaaagttagggttttgcccaagaacaatgaagaaaactagggtttttagtattaaatttcggatccttagaatagaggacaaacccctctatttatacactattaagacggttaaaagagttgttaaacttttatttcttcgaggattgaatcttctaatttcctttatctccaaagacttcctattttcaaaggagaaaacttctttttcttcgaattaggaagtcggctagacggtctccctacttcgggctaaagtcggcaaatgacctccttattttggcccattaacaggctaaaccgggataccctggtttgattgaaatctcagtctaattcgtagttcctctggtttaagccggtattgtcggaggtgctaattccggcaccaacaattagtccccccccagttcgggaaaatccaaatgctaaactcgagtttttccgaattaaaagaagtgaatattcggcttatactttaggaagatgcgaattaaaaattgatccgttgaacctccaagatacgtcagtttagcttggcacgcgtcgacgatataaaacaaggctaagcttgtgggttaggtagtctgatggacctcatgagttgttgaggagctgtgggatgctctcctagatgatctgaatgcctagcagagaaatgacctgactgatgagccgagcagtgagataggttaccaaatgatcttgctaacaagctgcaaggcaagctatcagatgatctgacgagcgatctgggatataggttgctagatggtttgtcttgcgatctgcgagatagccgggcagatgagctaaaaaaaacataagttgcgatgagctgcaaacatgccattatcatttggttagcaagatacgtgagcttttgagctctttttttttttttttttttaaggtgcgaggaactctcggcttatcctgttttgaagacttaaagcaagacgaggtcttggtttttgtgaaacattttcacataatagcaagcgtcgagctcggctcaatttatgtgtgactgcgagcgttgagctcggattaactgcaagaattatttttatcttttgaatgtagttcgatactaggtgaactaagctttttgagtcgggactcaatttagagcttgacttcaacaatcaaaaaatgtaaagcacgaatacttatcttgatgggagaagaaatggcgagaggctgagctcagaattgctgttccaaaggtagagttgcattgttcgtctatgaagagtcgttcttatcaaatagtgattaccttgcagcagagacagaaatactgtgataactctttgtcgaattcgacgttaaggtgtaggttggtctttctagaaagctgagcctcggggcttcaaattgatatgcagatcgccatgaaaattcttttggattgctagaaatttgctttctaatttggttgatcgtgcagtgaggatctgcgtttcgctggttgcatctgttgcaaagaaagagtcataaccttcagtgtaaatttctgattgaggcgagatttgcttcttttgaaagctaattttcggggcattccgtggataggttacacgccacgcagttcgtcggaatcttcctggaaattgatttcaaagtcgactggttttgtaacttttgaccagtgtttcgtcttgctgtatctgctggagagaagcgcatgtaactttcggcacatagcttcgattggaacaatattggactatatggagagctgtctgtctgggcaatctgtggatatgtttcctgtctcttggttcgcgggtcgtacaatgtcggaaaattgctcacgaagttggtcgtttgcaagtggtgtcagtctgaattgtcttggaaaaacgatcataactctcaaaccataacctcaaatcgtgatccgcttttttctgtggcttcgtgtgactgttgctgattattccagaaaatatcgtaattttccgagttgttttgttgctccattggcgatcagaattcatgacgacgaaagcaaaggttactttgtgctgcttcagaacttttaacgaaggagggagacatgcgatgctgctcaagttgagatctggaattttagagtctttgtaaacttctttggagctctccacattgttgacttgtcttgtagaaaaagcttattattttttttttttggtgctacgagattctgttcttgacgggtgttgctatctcgaactcaaaatgttagctgttgacaagttgagctaggaaagctgctaggcgacttgttgaagaactccaagctgttaggcgggcaatagcaagctaggaaggctgccgccgagctgttagctgggcgaactacgagccagagaaactgcagacgaactgtgagctaggaaaagtgcagactaggtgctagctagacgaactgcgagctaggaaagctacagacgaacagggagctaggaaagctgcagacgagctgttagctaggcgaagtgcagacgggctgctagcaaggaaacctacagacgaactgggagctagaaaggctgcagacgagctgttagctaggcgaagtgcagacgagctgttagctagacgaactgcgagctaggagagctacagacgaactgggagctaggaaggctttaggtcggttgttttatgtcgaccactcttatctttcagacttttatatttgaataaaatgtttttgtccttaagaacaagttcatgtttgtttttttttgtgaacctccgtcggttgattacgtattaaccatatcggattcccaatcttgaaattaggttttagatcgactaaattataagccatctgcaagctttgagctcggctttcgggcggactgattttcacctgacgtcacagccgattttttctgtctaagttcgggttagatgttaagtgcgagactgagctcggctttataaataaaagtattcggcgtgtactgggcgcgagacgtctctcggcttatgcccagtaggcctatgtataatttaaagagggagttctgggctctgtataaaaaataagtgaggcggactcagcatattagttggggagcgagatgctgggctcggcttactccccgtagagcatctgttcggcagatcgcgaaatacagggttcggcttatatttctgtccgaaccagagcttaagtgcgagaaaactggtctcggctatccctattagaaaaattaagtttctaatagggcgtggattatttcaccactgcatccatgtgagacgcgcatcgaacacctggccagggtgccgagagttgatttattacagatcttaaagcgaattccgtattgagaatgcaaactttaattttattaagtggtatagctgcatccttacgaaggattgcctacgtacccagttagggatcaagccattcgtagttcgagttctaatggagaggtcggattaccgagctcgtgctttttttttttttttttttttttttttttttggcatagacgagtgtttcgaaaatctatgcaaaagaaaatataacagataatgcatgtatatgattgagtgatgtttgttagattataatcgataacacttatctcagcggtttggagatggagatgatgacatcaacgacatggacgatctgagtatccgaaattgtaaacgtcgatggatgaaaatctacatttgagatgttgttcgttagagaagatctcatctttgcgcagaaagagagaagcaatgatgaaagctagtgatataagcgaaaatgtcaatcaagcttaactaatatgtaagaaagtaattgaacttatcttttatgtgggaggtcgtcgagacggagacagaattggagatcgcatcattgatgaatgagtggaagccttgagcgattgctagtgatgatccattctgtactttcttttgctgatttacagaagaactgataacttccgtttgaaccgttaaattattgatcccaccgttgaatctttagctgatagtcccacgaagattttgtccgaattttagtcagatcggatattgcctgaggcttctaccgtcttatgaagttgctgtgacagtgaatttttcttcctttggctgattcggagatgcattaataactttattctgaaccgttgatttctcgatcccaccgttgaatcattatctagtagcgtcaagaatcactctgtaaatttatagctagatcggacgtcgtatgtatcttccatgatcctctgaagtcactacgacaaagtcgttttttcctgatttctgcagtttggatgattctgggccaactttgaaggtgatttgcagatgtagattaacactaattggtaatccgcttacggaaaatgattccttgtagtgagatatttgctaagagtacttagttagaccttaggtctttctgatgcgtcgggaaaatgtctcgcaaaagctctagttgcacatcagatcttgtttcagacttggcagataggtatatcactgcctagttcatcaggattttcaaggaaaacgatcccgaagctgactggttttatagagttgggtctcatgactggttgcacttgcttaaggtaaacgtttatatctctcagcatatatcttcgattaaggcgaggtcaacttctccgaaaagacgactctctgggcgatccgtagatgtattaacccttacgagattccctgtgatttgtcgggaaatcggccccgtggtgagctggattattcagacggattcgtagttctaaagatcgcatcttctggatagaagcagggataacattcgatagacagctccgatggaagtgaggtcagcttctagggacacctgactcgctggaaaatccatagatgtgctactagtttcgagaatcgttgagacttgtgggggaattgatccctaagatgactagtcttcttaagaaaggattctatgtcaaacgagattgcatcctctgcagaaacatggagataattctcggatgagatatcggatcgaaggctagttagattccctggaaagctaacaaccggggcaatccgtgaacatattattcgatgcaagagtcgttgcgacatatcgggaaatcggtcctgaggttgactggtctattcagacggatctgtgttgaaacagacagcatcggctttacaaatacggtgataactctcagaatagatatccgattgaaccatggttagactccctggaaagctgatctccggggcaatccgggaacacgttacacgtcacccggttcattggaacctgacgggaaatcgccgagcaaataaacggattggattatcttggcttgatgagcgttcaccgaaaacttggatgagtaatatgcgaagagagttgtttgtgtccccctacctggcgcgccaattgttgattctgaaaatcacacaataaatttgtttaaagggggtaaacaaatttacttaactctctcgctatttagtgaccaaagattcaatgaaaagaagaacaaggttgcttagagacaaagttagggttttgcccaagaacaatgaagaaaactagggtttttagtattaaatttcggatccttagaatagaggacaaacccctctatttatacactattaagacggttaaaagagttgttaaacttttatttcttcgaggattgaatcttctaatttcctttatctccaaagacttcctattttcaaaggagaaaacttctttttcttcgaattaggaagtcggctagacggtctccctacttcgggctaaagttggcaaatgacctccttattttggcccattaacaggctaaaccgggataccccggtttgattgaaatctcagtctaattcgtagttcctctggtttaagccggtattgtcggaggtgctaattccggcaccaacaccataccgcattgtgtttggacttgatccccgttggcagtccggtgacgaaatccatcgttatgtggtcccacttccattccggtataggtaggttttgtaacaacccacttggtacttgatgctccgctttgaccagttgacaagtcgggcacttggccacccatctggccacgtctttcttcattcctacccaatggtagtaccttttaaggtcgcggtacatcttgttcgacccaggatggattgagaacttcgattgatgggcctctcttaggatctcctcctttaatgccctatcgttcggcacacatactcgaccgttcaccacgattgtaccattgttcgaggtttggtactcggtcttattgtttagtgcccatccttttatctcctcgtcccgttcctgagccagccggatcctactaagcaggtcggcctgatcggcggctcccaaccctaagggttcaacttctttagacaaggcattcacatgcaatgtccccatcatgttaaccaagtccacttggctccgttccgcctcaacttccgaacgcctcctactcagggcgtcggcgacttggttggccttgcccggatggtacgctatatccaagtcgtaatccgccacaagttccatccaccttctttgccttagattcaactccggctgggtgaatatgtactttaggcttttgtggtcagtatagatttgaactttagcaccatacaagtatgatcgccaaatcttcaaggcaaatactaccgcggccatttccaaatcatgtgtagggtagttcttctcatgtttccgcaattgccttgatgcgtatgcgataacactccccttttgcatcagtacgcatcctagtcccactattgatgcgtccgtataaaccgtatatggctcaccttcctccggtaagaccaatactggtgcattagtcaacatggcctttaactccaggaagcttttctcgcattcatccgaccagttgaatgcggtgtcttttccggtcagtcgagacaagggttgggccatgctcgcaaaactccttacgaaccttcggtaataccccgctagtccgagaaaactcctaatctcggtggcaatccttggtcgtggccactcctttatcgaccgtattttctccggatcaaccgacactccttggtccgagataacatgaccaagaaaaccaacgcttctttgccaaaatgagcatttacttaactttgcaaatagctcatgttcccttagccgttccagcaccgcccttagatgttcttggtgagcttcccaagatttcgagtaaacaagtatatcgtcaatgaagatgataacaaactcgtctaagaaatcccggaacaccccattcatcattttcatgaaggctgctggtgcattggtcaatcccaatggcagaccacaaactcaaagtggccgtaccttgtccgaaaagccgttttcctcacgtccgttggctctatgggaatttggtgatatcctgaggccaagtcgatttttgaaaaccactgtgcacctccaagttgatccatcaactcatctatccggggtaaaggatatttgtttttcaccgtaactttattcaatccccgataatcgatgcatagcctaaagctaccatctttctttttcacaaacagaaccggcgcaccccatggtgagctactcggcctgatgaatcctttatccaacaactcctccaactgtttctttagctccgccatttccgccggtgccatccggtacggagctttagatatgggggttgtcccgggctcgagttctatcgtgaacgggtctgaccggtccggtggtacaccactaacggccgcaaacacgtccgagaactcgttgacgatcggaatgtctttcaactccgcactcgcccccacttccttggttgtgatcgtggctaaatatgcctcacattctttcccgagcatcctttcagcctggattgccgagattaccaagcttcccgaggttgttcttattccttggaattttaacataccctcgtccctctcgaattgtatccgtcctcggtgacaatctatgtgagccttgtacttccccaaccagtctatccctaagataacatcatgtttctttagtggaacaatgattaggtccgcgggcatattgacactgttcactacaaccgagatgccccgaacaagtccggtcggatacattgcctgtccgccggccgctcgtaccattccataatcggtgtttggttctttcctgaacccacctatttcaaccaattctggactaacaaaacaatgtgtagccccagaatcaaatagagtgtgcgttactacgtcacctactctcaaggtccctacacattcccttagaatgttgagtacctcccctttcccatatgcatgatgcaatgcaaatgcagttattgaaataatgaatagggagttgtgagaacgtaccagtgatcgccctgaagtttccggcatcgttagcttcctccgacaactcataaactcgcggtgccacggcttgccgctttgggggaggcggcagtccatttcccccgcgattgtccctttgtccggcctgcttctccgcagtcaacttagggcactctcgctttagatgtccagtctttccgcaatagaaacaagtccttgtctcttcaccgagaaccttggactgccctggttccattctcgggcaactttggatcgcatggtccttgcttccacaccggccacatgcacctatggccttccagcaagttccgctgtggctcttaccacaggtcacgcattccccggtcttagcatcggacttggtgttatccaccttgtcaaatttccttttcttatccgcgggtttggtggattgattgttccggatcggtgctttctcccggttcaagtacctctcctcctcgatcccttcctcaatcattgctgccctttcaaccaattcggaaaccgagttgaatgtccggaccaaacaatggttgcggatctctatccttagtccacggataaatcggcgcacttgagcttgttcctcctcaagttcacgtcccacataacgccttaggcggttaaattcctcatcatattcacgcaccgtgcggttcccttgaactaggtcgaggtacgcacattcaagcctatcccaagcctccggtggaaagtacttcttgttaaactcgtcttcgaaatccgcaaaggaccggacctcgtcccctctgcgtttctcgacggttaaccaccaattatgggcgtctccttcaacgaaatggaccgcaatgtccctttggtaatcctcagggcagcgggtagacttgaagttcctcttgagtctactcctccactcatcggccacaatcgggtccgtactgcccatgaagtgtctcgtgcccagccttgagacatgttcgagaagactcagatagtctccccttttccgcccataattcggttgtggattcacttccacaacttccgagtcatcgtccttttggttatccccttttaggaccaccggatctgctacaacggccttggtcaatgtggctagttgcgccatcattcccttcatcaaatcccactgttcttgggccgttggagtattgttccggttatccgtgctgtcccttgcaccactactctccggtgcttcctcatttatggacttcttcccggcctcaggtccggccgagtctgtcccatcgaacattgtcccgactctggttttctcgttgatcatcgtttcctcctcaaccaaagtctcctcgacaatgcccttgtccttcttactctttcccgttttgctgctcttacccatctgcgaaacctctaaagttaatccacataactcctagtaaaatcgcaaaggagtaaagaacaactaccgcgagattctcaagccgacgagtggtgataccccttaacccaacacctagtcctagaaccaagcatgctctgataccaacttgaaaggccccgatccggactgcctaaagtccgggcgagttctctcgacccaagccactaagtgactcggccctaaccgtttatgaggttctttcctagtctaatccgtttcatatgattccgagattcaatatatgagacgaatagagtaaacaaacaatcggatactttattaattaagcaaaggattcgatacaacctatgagtttgcatataagctattacaagtcatataatcgatccctagactatccgaactatcaccacccatcatcccggccttgagtctctcgcgcctaagccaagtccttcccacgatcaccattcgttcctgaaagtcatagagccataagtaatcttatttacttaatcatatgcaagtccatgcaatgctctatatgccatacactactcggatccgtggagagaattcagagaggggaagatcgcgcatcagtccggccgattctcggcaggtcagttaagacccgccggtcgtccgccgagccgcgtccccgcctcagccgatccctacccggaccgagtcttgtgtaggatgcacatgacccggatactactcagccctctagtcggtcctttcaaggatccgactactaactcacatcctagaacccttagactcaaagtctaggatcccttaccttccttctcgaggttaggtcgatccgaccctccttctttattgccggccatagcccggctaccgaatcctaagactatttattctcccaagagggagagagttttaatggtgagttttcttgtgttttcggtgtgttgtggtgagtggaatggtcctgggcgcccttccttatatagggggcgaatggatgcttcccgaatcaacacatccgttccttgcacctttccgaagagttgcaccttttcgaagagttgcgcccttccgaagagttgcacctttccgaagagttgtatctcttcgcccataaccgcccacttcgtccgtcactcgtccagctacctcaagctcgtccgtcactcgtccagctacctcgagttcaaccgtcactcgtccagctgcctcgagctcgtccgtcactcgtccagctgcccgagctggactgtcactcgacctgagtaaccgtcactccttccagctgagcttgagctttgggcgagctgacccaagtgatttctttacaatcctagcttagcctgcatgatttcccctttgtccgagcttatggccagctccttctcacttgtccgagactccaccttcctctctcggaccaagtcctagccaacgatcctattgaggatcgcgggagttacaaggccctcctctacctcagcagccgtctccaccagtgccgccttcgtggcgtactgcgacactctacaccgcactctcaaatccggtcgaagtcccctcaagaacctcctcatctgggcctggtcatcctccatgccccgacccgcatacgccaagagtcggttaaactcccggtcatactcccgagccgaccgctcaccctgtgtcagctcaagaaaacgcgcctccatacggtcgagcgcctccttcagaaagtacttggcattaaactcagccacgaaatctgcccaagacatatccgcctgcctcctcctggcagtcacactccgccaccacaaatgtgcatccccctctagaaaatgcactgccagatctacccgatactccgccgggcatctgctcgaaccaaagttccgctcaacccgcgacctccaactgtcggcctcctcaggactagtaccaccagaaaaataaccggtgccaatcctctgcaactgctccatcatcctcaaataagatggaacctcctcagcaaccgcagcccgctgctgcacctccgccactcgtggcgcaactggagcctccactggtaccacacctggtaaccgctccaacaactgcctcaacaggcccgccaaaccaacctctggaacctgggctccggctgcggcacccatcactcctggcccctcagcaccaacggcatgcacaccggtaccgacactagctccaccagcccccactccggctgcaccagctatatcggcaccaagaccgttcctaaccccgggctcaacaaactcaggctgcgaacccacactctgctcaactgtggcactgtggccatcactctcgccggtaccctcgaggactcatcccctaccgcgaccacgaccacgaattccagctcctctaaccatctgcgctactcaagaacaaatagctaagaaactaaaacaaacgaatatatcacgaactcctcggagaagatgatgctaggactccaacaacacacaattgactaaacactccataatcaatcctcaatatgctaacaccctagctcatcctgtgagaccccgtcccggacgtctcggcgtccggcgacgttgtactcaagttcgcgcctcttcccggccgaacctcttaatttttcgcgattcaacatagaattgcctttacgaggctaaattctataatcgctctcttattacacagcggaagtctttctaaccttggtttaattctaaccaactcttgtaccggtttcatcgtctttgttccttagacttagatcgatcttttactcggtcaagacatgcatatgttcgctaaccattctaagccaaacaatcgcatattcctttatcctactttcacggtcaattaccaaacgtctatcttaactaataagctagatcgttacataccttggtcaatatgcggatttgattccttagcccgtttgtcgccttactccattcgttcaacgactcgtcatcgatcgtgaattgatgaaccaatccctatcgtacttagccatacaaccaaccaaccccactggtctaagtacaacgatagagattggggatcgtacgatttccttggttcacgatggccgaatcaagctcttggcttattggtccattcgttctccaaacgtacgcccctccggctacatggtggacgattgagccctcggcttatcgaaccatccatgtttccgtttcggtcgtttaacactacgaccgcccatggttactaaccgtttacccgtccggtccatggtggtcgataaagctttcggtttaatgatccatccatgcggtccgaacgatatccttatcacacccaagggtccgtggattcatccactggatcatcgtaggctagcccatgaaatctttcttccgtcggccttaggtttgctcgcgggtccaacatccgttttgtccatcggttcccaccgtggactttcccgttggttatccgtcgagtcaccctttggtcttaccgatctctgatcggtttcaccatggctgaggagatagatacatgaaggcggccgcgatgttgatcctatatggtgaatcatgttccttacccattcttggtgctttctccctttatcagtaagattgcatccatgggcgccccttgggtgtgttcggatgcacttatccttgtgcttcctcgaacacttttctcgatccatcccatccgacgatcagtctgtccgacccgatccgtcagacgatcggcctgtcccatccgacccgtccgacgatcggtctgtccgatccgtctggccgatccgatccgtctgacgatcggtctggccaatctgatccaacgatcggtctaccagatccgattcgtctctaagacgaacggtttaccctctccatcctctacactccatcgaaccgttggattgggaggtagcatgcgcatcagttcggtcgagttatactcgccgagcagcaccccctttccgaccaacaactctaggatgtgttggaactcctttaagaatgttttatggtgttttggatgttgtgagatgatgtgagatgccttgggcgtcctcccttatataggaggcgaatggatgcttcccgaagcatcacatctggtccttgcacccttccgaaaggtcacatccgttctttgcatcctttcgaaaggtcacatctgttccttgcatcctttgggcgatgcaaccgttcgttggtacccgctcgaccttacacctttggccgagacacctcttcacccgtgagctaccacagtccaccagctcgagtgtcagctgaccggaccacccaactgggtcagtacttgattagctcaccgagctcagtcgagctgtcggtcagctcacctagctgagctagctagtcttacagctggtttagctcacctagcttagctagctagttcatccagcttgtccagctcacctagctggttcggcttgaactttctcgttcttcctactaagtattttggtctgttcctcgaccatgatctagttttctcctaaaacaaaccgaccttttttatgaacgcgggacgcggtcgttacacatcccacatcaatcatcaggaaaataattcatcaattaatttttctacacatcctagaaccgtaatcgctctgataccaaattgaaacaacccgacccatttttaaaaaaaaatatataattaaatattcccataaatatctaattaaaccaaccaataacataataattaaaccgcaagtcagaaatactattttatgaataaataaataattcgatcaagaaaaccaagaataaccgggttccaataaccaaaaagaccaaacataaaacaaacgagttcctagatcatcctctcttccttgccatgattccacaatcacactttatctttacctgcatcaacaacacaatgagatgcgtaagtattatcataaatacttagtgaggcgatcctcccatctacgagctatacacacaagcaaataaaaaggtataatcacgaatacaatacaaacaaaccagtcattgaacaattcacccaaaacacattcaccacacctacatatcatcacacaacccaatcgctcagataagctcatggtcacgcactcaccttaataaattgattctaatagcaattaaacccaggagagtctctccttgcgtctgaaacagtccagaaacgtccgttaactattcaatcgctccggtgaaatcctagctgcagacgtcacaaagctgcccacaaaatctcgtctcgatcgaaaaacagacgagaccacgatctcagtttcaatctccgctggtcctaattcgcgtctgagaaaacgtgtctcacgaaacttttaccacggtttgatatgacgaaactgatttctcccaaaccctaacgattctgctcattctccttttctctctttttctcctttacaaaacgaaaagtggctaactaaagccctaatttcgagtttccttcttttataggcatactctagggtttccaattaacccaaccaattaaaccggatgatttaaaaacaaaccctaactgattttccggttcacggccgttacacatccactctataagaattatcaaaccccaggcctcgacagatcctctctgctctgttccctccagcatgagtttcgaacaatgcaagcaggtctgttttataattcttcaacataaatcgaattgctcttcgaaaattgggtttattcgccccccctgcagttccagaatagacaatccattaaaaattgtagagttaaataccaaactaccggggaaaaacgtcatgccattccctcactggaattccccacttccgatccttcatgactcacaacagctatttcagacatcaaatcctcccgctggaaccgctgagacaaagtcgacgatgaatccaagtcgaaactagcctcatgggcatgcgaacccatcgcacttgaatacacaccacctggtctcccaacatctctttgttccacacgcagtcgcttcccgttggataacaaatcctccccaactggtactgagtttgcatctttagtaggcccaaatattaatcccctagcaggcttatttgcggccccatgtttctgttttggcccaatgggctccaaagccttcatccctccattacgcttccatttaaaaccacctttactcccgcctttccctttctccatctgcgtagaaccccgagcttccttaactagtgggacacccataaccttccccacattcctcccatgatattcattttccttatttggcccttctgtaatggcaacttcccttaaatcaggcaaatcaccattaccatccaatccaccaaatcgatttgcgagatccaccccctgatttttagggagttcccttaacctctgttttgacctaccaccagacgcacccaccgcaaacaccatcttctgcaccggtgccgccggccgtctagcggtgcgttgaaccactgtgaacccgtcatctccctccatcccaacaggcaccacagctctatccgtaaccgtctctgccccagccgaaactttcaccaccacatttcttggacaagaatgaaccaaatgaccgtaaataccacacgaagaacagattttagacagtccttcatatgctacgaagtatctatccccattgattagcacagtcccttttaaaggttttgctaagttaacctcaatacacactcgagcaaaacgacccttgtcaaagttaatcgtattcatatcaaccttgagtggtctacccaacccacgagcaatctccatgagtaaacaccgatgatagtagttatacgggatattcgataatctaacccacaccggggtagtcacaatatcatccctcaacggatcaaaccttgacgaccagtcttggaccaacagatagttcccaagaactctccatggacctccggttaaagcagccatatactcctcttccagttcaaacctaatcatgaaaaactggcggggcaaatccatcactgtcatcactcccgacggtttccaaagctcccttagcttgcgattcaacaccgagatcggaatctggctcccaagcaccttcactatcatacacttcttccaaagcccattcatggcttccaacacctcctcaccaatggtaataactggctcctcgtcctcaccatctggaaactccagccccacccgctccctcacaaactcatcatcaatcacgtcttctggtttcaagatacctcccccagcactacccttcactttcgtagcccacgactccaacttatccggaggatcccctggtggacgccccttttctccgacgtcaagcatcatagcatcttgctcaccagatctcaccgccgtcgcagaataattatattaaaatatactgtatataaatgttaggatccccatgatacttttatctaaagaaatgttagaatacttacggatttaagatatatataaatccaaattaaattttcaattttaatattttcttcaacaattttaaataattatattaaaatatactgtattttcatattaattacgaatttatatatatatatatatatatatatatattaattagatttaattttttaaatttaattaatatttcaaagataaaatcaaaataattatatcactttcttaaaaaaatgaacagttcaaaaatgtccactctgtagaaactcgtgcatgattggttgggctttaaatctgacttacagccttaatttttcttaaagccctattttcttgctaacttacaaaccaatggtgttgtagctttctttttaaacttacagcccaaattttttttattttgtttttaaggctgtactagagtaaattctcaaagccctattttcttggctatagaaattttaattcattagataaatacaaaaaaaatttatcaaaatatatatataacaaaaacaaagataaattctaaaaaaaaactgataattatcaaacctaaaaaaaaaaaattatattgcaataaatttatggaataatcatagataaaatttagatttattttattaaaaattcataggagtttttttatttttatataatcataataaatatatctaagttagtaatataagacattttatttactataaaaaaaaaattttattacaactattatatttacttatcatttttttataaatatttaaaaataaaaacctacagcagtaattctacagcaataaaagttacagctacagccaacacagctacagcaaaatctctacagcgaaaattctacagttacagcccaaccaatcacccaccaaatataagtcgactgttttgatatagtcggtagagaaaaaattaagtcgatgaaaataaaatataagtctactaagattaaacaaaaagctgataattcaaaaagtctatcttattaataaatcaacgtaaaataaaataagtctactaagattaaacaagtcggaaaaacaaattataaaattaataattaaaataataagtcaacagttgaaaaagtcatctatgtaagaaaaacaattaaccaaaatgtaaatcgactgttataaaataagtcgatgaaaaataaatttagtcgacaaaaataaaagagaatattacatcaaggggcactttttaaaaacatttgacgtgttccaacacttaaaaaacattagacacttttccttgttaaaatgactattataccccaaaattattagtaaggcatataactgacgattttcttatttttaaagtccaatttctctttaatcttttagaaaatctcaatattcaaaatcaaaattgaatctcttagggtttctcatcatctaccatatttctcaaccatctatcgcttctcttcttcttctctggagatctttaaatacattcatgaatctgattctaaatctctgaaagtctccaactttattacaaaatttggacaacagatacatgaaacatatgacggtttctgtgcacttctcctcctcgtttgacgacgtcgtttatggccaaagccaacaactttaatttcattgtgtccccttcaatccattacagtctatgatccaatacaaattacgaaccatttgcttgttatcaacaacattgtatcatattctcaataaaatgtttgttgatggatcttgtattaaaatatataaaacgaactgtttagataagtctatgtggccagtttatattggatacacaattagagacatttcagtttgtagagacctccaccttcaagatcttatgaacatggaattttggtttttttacaaaccacagttaatcgaatcttctgttattatggacatggtatatagaatggatatggatcagtaaaaaggtttctgaatgaatatatcttaatggacttgttattatggatacaaaactattgtttgttgatttttctttcagtttgcagagacctccacctccaagaccttatggacaagaaaatttggtagctttacaaaccacagttaatcgcatctcttttattatgtacattgtataatgaataaatatgtatcagtaaaaaggtttcttaatggatatacttaaatggactcgtttttatggatatatttaaatagactcgttatcttctttttgtcttcatgggatttaatcggacgactattgtttaattttagccctagatctcggctgaatgatatttccgacggtacgaaggctatgaaaaccagatcttcaggtaacatttcgatcatcatcttcccgaagaaaccgagttcgtcggagatgtcgtctccgagtttgcagagatggttaccagcggcgagaggtgtttccggtaatttaagaaaggagaagatgagtatagttaaggaagaagcagtgatgagaagaaataggaaaaacattggattcttcaaaaaatgaggtttcttcatcgtttctattgcgttgatttcatggatagatgtctgcttaaggagaaagaagaaggaagaagatctgagagagaggaagacctttttcatcagatataagattaaaaaaaaagcaaatttcatttctttttaaagaaaatattacgtgattagacagttatttggaaatgatataattgtcctttttacctccaaaaacaaagaaaagtgcctcatccctgaaaagtgcctcaaaaagaataagattttgtaaaagtgtctaaacgtgtcacattcccaaaataaaatataagttgtcaattcaaaaagttccttattacactgatatactaagtattttcttatagtagaaagagtgttttatatgaaagcaacattgtttcttagaaaatattaaatttttattttgttgatccaaaatagtttatttatatttgagaaatttaatatatgagaactgtaaaatacaacgtttggagagaacgtaacactagaaaataccataaagaacacaacccgtgcactcacctcattaccgtcatcgacaagaccattcgagatcgcatcaccagtctttattatcaaggcaccagcaaatatgcaaaccttcagaacggtgcaggcttcactaacgtgataatttgtaatgttctgttttgagatcatctccaggcctagctaactttatgctaggttattcagctgtgtatgtttaaatgcggcatgcgttactgttttgataaagtagctttagaagaatgtagtgtgttgggaataagagtaattttgttttgtgtttaccaaattacagcacaacacagacatattcattcttcatgctcgtgatagtgcctagagaattaacgacttgtgatcacattattagaggaaactcctaactaataaggattaggataaacaacactacatgtggtacactcaacaactcaaagattatctcctgaaaccttatccaactgttcttcggccccaagcagtgatgtagatggctggtcaaaggcgaggacatggtctgactgatggtaagaagtgttcaagcctgattctagtattgggtgacccactacaatatcaggtgtataaccagctgcacctctcaccaatcgaggcttctttgataatctctcctctcctgtgctctcatctggagacccaatgttacaccctgagtctggtgttaaaggctcccggtaagatgagagagactcgtcaactgagagacttttgtctggtccacagtccttgccagacttgtcttgaagaggagactcagatgttggggcaggggttgcaggatctgaatcgcccgttactggggctgagggttcgccgagtactccactgagtcgttgttgctcttcaattatcttcttcaagtactttccttgtgcttctatccgtagttgcagctgtctttgcacctaagaaaaaatcacatcaaagaataatgtcatatgtaatgcaaaattcagtgctacactgaaaatcctactaattgtttcgttgttgcttgtctttcttaagtaggaatggtgaagcatacttctagttgctcgtgtaatcgtttctgaacttccatctgcaacttgagggcttcagttatctgcattcccctgtaatctcgaaacgatattgatcacttaatctgcggcgcgaggtaatatatatatagcatcacaaatcaagctcaaagagggaaatttcacgtacgacgagccgtccaacccagagagcatatctccagattctttcttatcagtttttttccctgaaaattgaaaaaaccagttttcaggtatataggaaactggtagaatgagaaagaagatgaagaaaatcaatgtccacactaccttcagaagacgaatctggaagatactttgcaagtcgatatttctgactcaaaatacacaaatgcaaaaatcagcaagggtaagagaaagagagacgagacaagatgccacacagtttgagaatacctgtaagtgactcttgacatgatatatagttaagccttgtacacccatcactctaagaacgcctttgggtgtagctcctttggaaatcaaaggaagaaaaatgtttaggaaccctaagcaaacagacgataggctttccctctcatggatagtagtaaagcatacaagaagagcaatttgattatattggtgtgcatattattaccacagatattgatgaggaaaacatgagttactaaatttaccatagactatacaagaaaaaaggaaacttactatcagggccaccaagttgagcaacggcatcaacgaagcgttcatgtagctcatgcgtccaacgcagacgttgtttggatgcatgactagaattggggcctccgttgtctgcttccatcagggctaagatataaacacgataaagggaaagtaatgagtagtggcaaagctaggaaatgataacatatgaggactggccagagagaaagagatagaaatggaaacaaggaagacgaaatagcgcccagaattagctagtaaaaacagtccaagtcaagtttaagacttgctccggcagatccaccacaggacaccaaaatcagagacatgttcactaaaatcggaggaatttgtcgccgagaaagcaaaaagaaaacacaatccaaggttatggaatctacgaacctgtgggtggtggatctatacacgacgcccctccattttcggaacttgctcttctccaagctaaatcttatctgaaatagaagatattgtgttacagactagtttactgagtccggtgggttacagggcgggcggcgatggagcagagtcctcctcaaaaaaattccagtcttcttcttatcgctcgatcgacgaattccaggcagtggcattgactattgctgcatttctttctgggtaagccgggcctctcggtataggcccaaaccattctaaggcccaaaccattatattaagttggttggtccaccaaagtcagcagcagctagaacaagagcgactctgcagctgctcttctcccgcttccttcctgttagttagcctcagagatcctcgttccccgataatggatttgggaaaactgatccagctgtctgcgctgctgtgcccatttcttctatcattacactttagaatcgctggggcctccgcccacatctactcttcccagcccttccacgatgtcggtaattctctcctcctctacggtggcagcgagggcatcttcgcctcttcccgatctttaatcaggtatattctatggattacattttcaactcttttgatgctctctactctactctactcatcctccctcctcactgcaggtttgagaacatcactctctggaggacaattaccggtaagggccaccgcagcaatgggttagttcaagcagtgatctttgaagcctccgatcgtaacaatatcggtggttcagcttacggaggccaaagatctatttgctgcactccagatctggccaagcttcaaggctgtaagcagggtgagatcattaggattccttctccacatgaccctcaatggcctatcctcttacctgtccgctttaaaggaaaacgctcgtctgctaagatggcagacactgagattcttatcaccaagactggaatctataatctcttattcatatcttgtgatccacaacttaagggcctcaaaatgaccggaaagactgtttggaaaaatcccgacggctatcttcctggtaggatggctccactcgtgaatttctatgtctatatgtctctcgcttatttgttgctcagtgccgtctggttcttccagtatttgaggttccggatggatatattgccacttcaacattgcattactgccgtcattcttctaggattgcttgagatgctcttttggtacttggattatgctaattttaatcacacggggatgaggcctttagcccttactacatgggttgttaccattggtgccttgagaaagactgtttcccgcattctcattctctgtgtttccatgggatttggggttgtcaaatctactcttggtggtctcacttctaaagtcctccttgttggagttacttacttcatagcttctgagatccttgatattgctgagcacgttggcatcattgacgatatgtccggaagatcaaaactttttcttgtccttcctgacgccttcctcgatgcatttctcatattgtggatatttacctctctttcgaaaacactggaacagttacaggtatctctttctttctaaatatagccatcagactctgtaagttgtaagggttttgaggcaagattcatcagaccagctataaaattctttattactgcagatgaaaaggacctcggtgaagctggaaatttaccgcaagttctcaaatgcactcgctgtgatggttgttgcctctgttgcgtggatagtgtatgaggtaccatcctgtcaagcctgatttgatgctgatttagtaaactcaaatcttacctctaggaaacaaactgctcaactaaaactggctttgtttcaagctaggaaaaaagaagctccttctttcttggaatatacccagcttgcttgcctgatgatttgtccccgtgcaggtgtatttcaaagcaacagatccattcaatgaacgatggcagactgcttggactataactgccttctgggatgttatcgcattcttgttgctatgtattatttgctatctctggaccccctcgcagaactcccaaaggtatgttacatcaacttaaaaggttttgatacctctcgggcataccaacaaataagcatggttttgtggaaacggtttcagctgagcatgttgtgggaagtcttggctacatgctagtggttcttatgtagtggtccaattttggtgttcctgggtgtgatagggatgctaatatgaaactaatgatggacagatatgcatattcgggagacgtggatgaagaaaacgaggaagctcaatctctgacaggggggaagcaagatggtgatattagcttagttaagcaagagaagaatgcggagtcggacagggaagaagatgttgaagaagataaaagagagtgaggagagtcagtatagaaacgacgtggcatctgtgtttgatcaagagttgacgaaaatataaatatcagcaagaggtcagctatatagcacaaagcaacgacgtaatacatatatatgatgtaactaaaggatagtaactgtgtgtttgtatttgtttgtttttttaatatcagatccaacattttttgagtcatctctaacccttgtctgagtgtgagatttgcctaaaattgctgtaaattacattattgatatttttattggtggttaaaattgtgaaacattaatttgtcaataatactagagtccagacacggaaacagggtctctctctcttgttgtgtataatttcaacaccgctattacagaagaagagtgaaaagggagagggagcttcctgctttcacttactatgcctcctcctccttctagttctagagcaggtctcaacggcgatccgattgctgctcagaaccagcagccgtattaccggagctactcatcgtcgtcgtcggcgtcgctgaagggatgctgctgctgcttgttcttgctgttcgcgttcctggcgctgctggtactggcggtggtgctcatcgtaatactggcggtgaagccgaagaagccgcagttcgatctgcagcaagtggcagtggtgtacatggggatctccaacccaagcgctgttctggatccaaccaccgcctccctctccctcaccatccggatgctcttcaccgccgtcaacccaaacaaggtcggaatcaggtacggtgagtccagcttcacggtcatgtacaaaggcatgccactggggagggcgacggtgcctggattctaccaggatgcgcacagtacgaagaacgttgaggccaccatctccgtcgacagagtcaatcttatgcaagcccacgccgccgatctcgtcagagatgcttccttgaacgaccgagtggagctcacagtccgcggagacgtgggggctaagatccgagtcatgaatttcgattcaccgggtgttcaggttcttctcccttcttttctccccgcattttgctcgctcagcgatctggcctaaccagcgcagtgtgaacacttttgacaaagaaattaccacactttttgagtaaaaaatgcgggtaaaaaaaaaaaaaagtggttgctaagttaaatagattccttacaccactagtcatgctcttgtctgtccccactctgctttccttttggcctttgcttctccttcacttttgatattttttctaggatcattcatccacgtctatgccaccacctaaaaagctattatatgttatatattgaggtgtaaattacgaacaacgacaccatctccttcctttcactggtttatagtgtattgatttaaactaataattttatcaaaaaaaaaatatatatatatataaaaagattcactctgcttgctaatatattgatgcattgcaggtatccgtgaattgcgggataggcattagtcccagaaagcaagctctcatttacaagcaatgtggctttgatggcctcagcgtctaattccaaaactgtaacataataatattattatatatatatttgtactgactactcccaactgcagaggagttgcaaaaaaagatccagccaaactggtaaagaaatgtaacaagatccatccttcccctgccttttttgggaaatttttgtttctactagcaacaatgtttgtttaccatagatactaatcagtagtttactcacgctgcaatcgcttggcctatctaaagtgcatacatttctgttaatcaattagagatatgcactcattttcccacatggacagttacgtcaacactcaagttgaaatgaactgctcctgaattgacatatggttttattactgattttcttgacgagagcaccggcagattcaaaagtagtctcagaatacttagtcttggttaatatgtaactgaaatgacccgagactattctttttggattacatatatgaagataagtgatcagttcctacatcgactatccttttttcaatcctcctatcagtttgtagctttctttttcctccagagcttccgtcagtttaccttgtattgcacactgggaaacctattcacaagtcacaaccaaccaacctctgcccatgaatcaagagaatattgtgtgtatgtatcatatacaatctaactcggcctctcctctcaactcaaatgttaccatctttcttctgacttttattttctacaccatgggcttgaggatgttggacattaacgggctacttaaaaatgttacttggtacaggcccatattgttcacaacggaaacggcaactagacgtagaagaagaggaagaagaagacgatgaaattggaggaaatcgaatcgaatcgaaacatttagggttcctccttccttgaggtaataatgtcaattctttctatgtatctactttggtacataaaacattgtcgctcacataaattttgatccgttgttctctcagagttcaggtcaagctttctttccaatttcgccatgtaagttccttcgtcttgtctagattctgcgttataccaccgttagggatttttctcaccaatgtcctttctttattcttttgctctcttcatttattagatctctagcaatttctctctaaattgagttatccccttaagctatcagatagtattggtattcccgtcttgacacatagtagtaagcacatcctctacagtttagtttgttgggtatttacttaatggcactctccgttttcttgctttacataaaaatcttgaagagctttgtgtgtaacatgggaagcttagcttcatcccttaaacagcctcctactttgacaacaaaaattgctatgtcatagttatgaacgttttattcgttccttagtttgcttatctaacctttgattttccatcctactcgatggttataattacaggccagaagaagatgttgttgatcagaaaagatactttgaggaatcttgcaaaccaaaatgtgtgaagccactacttgaatatcaggtgaatacgacttgagctgtcactggtcataaccttgttttgcattatacgagtcatttgacatagagagagagttgattgctttcggtgctgcttatctatctcacatcacatggcttcttagtgctgctcagttttaacatcttgttgttgtgggtggttcaggcgtgtgtcaagaggatccaagatgatgagtctggccacaaacattgcactgggcaatattttgattactggcattgtgttgacaaatgtgtaagtgtgtgagtgctgtttttctgtatacacctaaagtttcgcgaaactaaaatgacaaagacagctacttggagtctatttttctttccagggttatataaaatgatgtggatgcttaacattactactgcaaaccataactaacacgggctccgtccgtgtgggttttgtttctctggcaaactgcgattgctttgttttcgtactgagtttgtgatgcgtccattaatgtttaatgataagtggagtaataaaaaggaagaatccgattctatcttagcttaggtccattttattcaactgtttggtatgaaatcattgaattaattcaaagcacgttggtgttaaacgtctccagtttcaaagtgcaaacatattaacaaggcacgatgacaaaacggcacgctgtgctttggttttgtgcataaacggcacgctaaccaaatgtgtactgtatataaatacataaatactaataattacaagtcttcagaacagaaaggcaaatttctcaaaggaagcgaagccctagcgtcctctctctgtcttctcgtttctgcgccggtaagctctctctcagattttagatctcatcaagatctaacccttatatctctcacggatcatcatcgatctttcagatctgttttccaattttccctgctgatagcgtcttggtttctctaaatccgttgatttgttttcgtctctagttttttttttttttttttcgtttttacatgcctgagtctagcgtagactttctctgacttgaccctcttttgcagattcgtagtctgttgtgcgcttgcctctcctcttttggattagcatacctctcactcgcatcaggtaagaagtttggttcagatttagtgaatctcattgctttagtttcaaagcttattagctctctgtgtttttgcgttggttattacgttggaatacttaacccttatagcaactactggaattttgctgaaacatagttagtctctatgctttgtttggattgaattgattatgatggaatgcaacatagttatcgctgtgccttgtttggatggaatgttttaccctaatagcaacaactgtgatttagctgaaagtgttttttttattccttctgtattagcattgtgtagtgttctgtattaccatcatgtagatactctctgtgctttggctggactgattgatggaagagctaacattgttttttcttctcttttgtgagatgcacttttggttatcctcataccaaaatgcagattttcagttgctttttctatccaaatggactgcaagaagttcatccagatggtcgaggagaagaaacgaagagttcttgagaagcaagaagctcctttgaaatgggagcagaagctagaggcggctgcgaatgccaaagcagacacagaaactaaagtgaagagatcaaagggccctaagagaaaacaaagggctgcgtctgaatctagctcagaaagtgatagtagctctgaggtgagaagaaagtctagaagatctcacaataagcaccgaagacatgcacactctgattcagatgacagtgataggaggaaagagaagaaatccaggaggcagaaaagaaggtccttgagtccaagcgatgatagcactggtgattatgaaagtgggtcagaggatgagctgaggatgaagataaagcaccatcggaggcacaagtggcatagctcaagaaagacttgcgatgatgacagtaccgaagatgtgagaagaaaacatttaaagcatcacaggcgcagtgaggtggtcacttcaagtgatagtgaggaagagagtggaagaagaaggcgaggcaaatatcacaggcacaacagaggttcagcctcctcgagtggctcggaagaagatagtgggaaaagtatgaagagaaggcaacataaaaggcatcgtttggctgagtcttcaagtgaggaagatggggcaatgagaaggactaggcatcataaacatggcagagattcagcatctgagtctgatggaagaaggtaatcagatgagaaaagagagcactacttcgacaaatgaaaatggaaaatgtctttgtttaattcacatcataagaactgaatcttgtggtaaaccatcagcacatgattactacccagatgttgggacccaaatacgatgaatattgtgttgaattactatggtggcactctgttcttagattttcatttttacatttgtagcaagaatggtacacaaccaattgaactctgaaatgcatgtgcagatgatggtttttattttgattatacctcgtagttaagaggagtgtgttacaaaataagatcaaatcatcttggtttttatactctgaaatgtagtaaactatctttgattaacaccccttccctctgcagcgtcttaatcatatcttcagcttgtagttaccaggattgtggtctcttgctcttgatactctcagctatgcctatgtgttgcacgcgaagatgtatatatatgccaaccggctggtccaatttgaattttcttcattcttctgaatatggaatcacttgtatgtttcatgaaatgcagcccacaaagccatcgcagcatctaaagattagacattcatctcctaaatctgaattatcatgtatcatataatagaaaataaatgcccctccccttaaaccttgttgctgtttttggttgctaaatttgtacatatgaagaagatgaagattcagataaacactttgggtaccaaactgtggtggaaagtgtgatatactctacaagatacatgatttattttcgtctctgaacaaccaagtttctcaccgacctgtgagcttgaccatccatgcaccacccaagtagagccccagaagcggtgttgctaggagcatttgagtgacagggtctgtcgagggtgtgacaacagctgctgcaaccaccgcacctaccaccacatatctccaaattgatagcatttgatctcccgacacaacccctacttgtcccaggagtaactgaatgactggaacctgtaaaccaacaagaagcagccaaaattccaggtgaagatggctaaagcaacgtttaggaacatgtataatatcatattgccacatacctggaaagaaaggcctgtgctgaacataagcactagtacaaactcaaagtactggtcgatagaccacagagattctaccacaccttcagcgtaattcacaaagaaattcaaggctgcaggggttaaaacccagtaggagaaagcaagtccagcatagaagagcaatgaggagccaaatacaattggccccagaaaccttctctcagcccgtgtcagaccgggaaggacaaaagctataatctcatacaggatcactgggctccctagtagaagcccgcaataaccggagacctgcaccgcaacacaagaaaaagaaaatcatctatcttgaatatgatgctatctgtcgtcaatctgatcattacctttaaagttgtgaagaaaaattcgccaggagcaagctggagaaaccgtacaccctgagttttgacgggagcttcaagaaagacaataagatctttggagaaggcgaagcatcccaagattgcagctcctacagccaaaacagagacgaatattctctcccggagctcctcgagatggtcgaaaatagtcatttctttgtcatcagggagctcctctttacggggatacagaaactcatagaccgaacttgatctatcttcagatgaatctgccacagcagcagtgtgtaattcatcactaactaactaactaactatatcaacaacccggggagatgataataaaaatcaatcaagaaagtggagtttctcctaataataaatacctggtggtctgtcttctacagcagagccaacgccgggggtggtctctgttggtgaatcgtcgtcattgagagctgacaccggcccaaagcctttgctccggcgttgcgtgacggagtatcggagtccagcttccctccacgaattgcagaaagttacagcgtaaggacaacgctgctttgtaggcgaacccaagttgcgagtggtgaggcggaaatggtggataagagcagaactagtgcttgtgctgctcatctctcgaagaatcctctctcgtatcgtatgttgttgattttcaattgcaaagagagcttcagagaaggaacgattggttccggtcgagtttcgttgcccacatttgatattttccaaaacaacccaatccttttttttttctccgttaaaccttcttccatcacaaacttgctaacacaatgtaaacgacgtcgttattaggagaaagcaaaggagctttattgggccttttattgctttataaggcccattactacggcccatagagtaagtttatactagtagtgatgatgggtgttcacttcacagttcacacagagggctcgcttggcttgtcagttttcccgccagtccgatgggcaaagagactccggcggagaaatccctaaatctgattcgcgggagactctgtgatcctagttatgtcttcagacctctttccgcttcgtcagatagcaattacaggtctgattgcttcactcacttgtcgcttaatttctcgaaacgaatttgcttttaacctaatagtacaaacaaatttgtcaacacacagtaaattgaagttcattgtatcaacctctatcacggagggatgcaacaactcgatgttgcttctcggccctcgcggctctggcaaagctgctgtatgtcgaaccctgcttccttctactctctatctccgtcattggcgtytgatttcttcttttatttcaaaaaatgggttgatttcaggtcttggatctcgktstaggtgakttattggagcagtttcctgattcagtatcagtagtatgtctgatttcttatacatttggaactatctcctatatctaatctcatcgttatgatcttactaccatctcaatgtgattgcagatcagattgaatggactcttgcatagtgatgataattgtgcctttaaggtctaagagagggagagagcccaccattctcatttcctacacctaatctattcattcactcaccgtcttacattgatttttcaggaaattgccaaacagttgtgcatggaacaccacctactattctccaaaatggtatgacattgttctctccgaatgttctttctctttgctgtgtagccaatgtctcagttgacttgctttctctcttgcacttccaggcatcattcgatgacaattcacaattcattatagccatgttgcggtcagtatttttacctttacataaatgagcctttttgatattcaacgcagacaaactgatagagatatttcagggcatgtggactagcacataagactatcatctttgtgcttgatgaatttgacatgtttgcacaggcaagaattctggtttcttttaacctttgatgaacaaaggaattggacattggtgttttctatccactcaccctattatctgcttatatatatatagggaaagcagcggtgctatacagtktgctggacgatgctatgcaatctgtaacctcacaagctgttgtcgtcggtattagttctcgactggtatgagcatcgctatacagatatatgtgctttgggctttacaaactgtttcttgtatgtatttttatgtttgatgacagctgactttggttcttgttaatactactctggttcaaaatcttataatatgcaatctgtcaccacaggacgccgaccaacttctggagaaaagagtgagatctcgcttttcacacagaaaatttttgtttcttcctccttccagggaagaacttgacgggtaatgagcagcttcttttctgtaatagccagtcaactatttttccaatcaacttatttaactaataggaactatgtttctagtttgtttgtacacctgctgtctctaccagcagactcaggcttccccagtggatatgtttctcggttcaatgataagattaaggttctaatatccaatcccaattactactatgacatgcttagcttttagatgatgttgattcttgttctgaacaactgatactaaccaatttcaaaaaaaaaaaacctattgtgcagaatttaacatcagacacgagatttaaagacatacttaagacattgtttaatgctaattctactgtgaacagtttcctgaagtttatgtaagttcttcgattacaatcatgagatgtttccttaagatatcattttctctgtgttgagtctatctcttgatgttagattctgcgctgtttctttaatgaatttggaatctggcctcctctctcttgagaacttcaaagcagcactttcaagtatgcaaaggcaaccaaagttggaagccgttagaggtataataagctgcggtgttgcatatacattttccttgggaatatctattgacactatctttgttgagcagattgttccgtactggagctttatcttctggtctgtatgaggaggttagaagtgaaggagcaaagctcatacaacttcatcagtgtgatgaaaggtaatctgtaaatttggtttaaaccatggcaccactatgaaaatgacttgagattccatgtgtattccagagtataaggcgatacacgattcttttcatacctcagactactacgcacaaaatgtctgcctaagggtatgtttatagctctcatgagatgccatggtttaaaggtggtggtctaaatggttgacatgacaggcatttgagcacctgagagagcgacaagttatatgctatgcagagaatagaggacagtctcagacaggagagtaccgtttgcagaagcttttgatatcagcctctgagcttcatcagggaatgagatctcatgcttgttgccccgtaagtctctttttcatccataccctcctattcttccccttatttttgtaaacagatttcaactttgtgacatttttccctccgatggaacaggccatccttctcaagttattggaccattgatctctgtgtttttgtcccttgggaataagacaagtctctcaaggccctgtgatatgtatgtttatttcatggtaaaagctacttggtttacaaactgtatctttagtttttgctttgtgtttacgctatatatatataaagggagagtgcatgtcaacacatacccgtgattacacaaacaactttctctactacacacaaacccatttgagtctcaacatcaaacccttcaactcatataattacacatcatgctaacagttaagacccgcacaaattggagatcttaattcaccatatccagatcgactctatctctctcagactctcacttttgtgcttgcaccaacgaagtgtgctccccatctccaccctttctgtgtcatattatgagcatttatctcccttcagctccgtttgatcacaaagagatgcttggagtctatcctttgtcttcccagttttgctctgtctcgcccagaaaaattatggactccataaaaatgccttctttctgataagatttgcttatagaaaatggtttttcatagataataa

SEQ ID NO: 1022 - DNA, 94503 bp, Arabidopsis thaliana
aagcttacctagaactctgaagaaggctgaaaacaactcaatactaaagaaccaacaatagaagccataaccaacctaaacaaccacaaaatccgataacaaaatatcaacaaatattcaaatccgcattgaggcaaaatgggtctaagaaactcaccaaaagtctcaaattgataatggattcggcttttaatttcggtggagctttaaaacgcttatatatacgatatattagggttaaggaacaaggattcgacttgccaaaaacttcccttcagtttcgggaaagataaactggaattctcttctcttccacgtttttgcactttagtcctcaaatttttctctatttacagattccgcctaaatttttgaattgctcagaaatccttgtgaaatcagacagtttcaatacgttcaatttaatccaaaatctgatcctatattttcttttaattttgggtgttataatctacgtggaagaaattgtgagattgcatggtgtcgtgagtaccattgtctcacatcatgatccaaactttacttcacatttttggagtagcttacaccacgtattggatacgaaactacattttagtattgtttatcatccttagacagatggacagtctgaaacgactatacaaacactagaggatatcttgagattatgtgttttggatagtcatcagtcataggagaggtcattgtcattgattgagtttgcttataataatagcttccatgcgagtatcggtaagcaccatacgaggcttgatacggtaggccatgtcgtacacctttatgttgggcagaagctggagaaactactggtattggtcctgagttaatcttaggaaccactgaaaaattgaggctgatcagagataggatgaaaccgtcgaaggcgtgatttagaatttcaggtagacgatcaagtatctattaaagttcaacctatgaaaggcaaagttcgatttggacagtcaggaaagttaaaaccgcgttttataggtccttttatgattcacaagcgtgttggaagtgtagcttaccgcttagatttcctgttccaggaactcctgctgctcctggtggtcgagatgtccttgttccaagaactcctccttatgttcataatggttctcaatttccaccacctcctccaccaaatgctgctccaatggaggatatgtgacaaaggttccaatctttgaatcaaatgtttgctcaaaatgctaccatccagcagactttgttgtagcaactacctcaggcagctgttccacagccggctcagcatgcaaactctcagcctgactattgggtgttgcaagataggttcaaaaaggaagtcagcttgcaaaaatttaaaggttcttttgaccctatggaagctgagaaatgacttgatcttgttaaagaggctgtggggtatttgggagttcctaaggcttttaagttacgaatgattactcgccaacttgctagagatactcaacattggtggagaagcattgttacctcccgtcttggtgtggagttgacttgggaagattttcagggagcgtttatggatctgtacatcctagagtctgtcagatcaaatttgaggatgagatttgaggagctcaagtagaaagataaggcactaagagagtactaagttgagtttgatcatttagcaggctattagcgaaagttcatcgagaatttttctcgaattgcaaaacccctcacacaactactttgcaaaggagctaagtttgtttgtagtgagtcttgtgagcagaggtttagagcattaaagaagaggttaacttctgctctagttttaactattccgagacctggtgtagggtatgtgatgtacaatgatgcttctttatcaaggctgggctgtgtattgatgcaagaaaataaggtgatcgcttatgcatctagacaactacataagcatgaggttaactatcctacacatgaccttgagttggatgtagtagtttttgctcttaagttgtggcgtcagtatctttatggtgaaaatatgcaaatattcacagatcacaagagcctaaagtatttattctcgcagatggagttgaatcttagacaaagaagatggattacattgctaagtgactatgactgtgaaattcttatcatccacgaatggctaatgtggttgttgatgctttgagtagaaagcaagttacagtgacatctcttagatcgcaatggaatttagtagagcagatgagccagtttcacatttctattcgagaggaaaaattagggtttttggccacattgggtattcagtcaaatttactagcacatattcgtgattcttagtggcaagatggtaaattgggtactatttgtgaaaaaactgaggattttcgtcagctagggtataagcttagagatgacacagtgttatcttttaaaggtagagtgtgtgtgcctaacatacctatgttcttggaggagattttgccagaaggacatcaatctgggtatacggtccacctaggcagcactaagatgtatcaaacacttaaactttttttatcattggaatgatatgaagggtgatattgtagagtttgtatctaagtgtttggtatgctagcaggtaaaaattgagcatcagaagcgtagtggtaaactgcaaccatcacctatcccaaattggaaatgggagaaagtttctatggattttgtcacaggactagcagagatctatgtaacactccagtttcaggaatatagtgatgcatgcggagaggtttaaaagaattgatttggccacctatgtcaccaaagtgcacttatcttttcggtcaaacgtctttagagaactccacagttaagcgtgtttgcgctggattagtttcaggatggttgaccttctaggaagtgattgtcggaaccatgcaggtgaggacaaagcatggaaaaaaatcatgtggtgatttgtggggtcgttaacaagcctttaaagcctcctagacacggcgcaccgaccgtctgacaggggtgggcccatgggcctgagagagaacgtgaggcccactgttaagggcggtcgaggcgttacaaaatcagaacgaaaatcccaacaattgtaattaatattgacataatagaaggaagtgaatcgataaagtaaccgaactcaaaaaaaaattattatctatggtcccaaaccatacattttgatgaatgtaacttagaaaaatttgttaaatagatagatagattgaaagatcataactatagattgaaatgattaaaaaatattactaagttactgtcaaaaaaatttatttgtcttttcctttactactaaataaatttttattgtgattttatgcaaatataggaaaagtgaattataattccatactctcagtatagattatttaaatgatatatgctaattattattaaatgtattataaaataactaaatattatatcaatatatatatatatatatatattagttatagaatattgtatatttcactacattcattttacccaagaatcattgttgcagtgtgttactcgacctgttactcgaccacacccattgattggcatcaagctgtgttcgtcgaatatatttactgtttctgttagaatttatgttttctccctgttcacttaggactgttagaaacttcaaaacctgttcttgctttgtttgactctgtgaaatgtgattgcatcttgattgctagcatcacatttacaccaatttagattgacaccttaaatactgcaatgacataatagtaatagtaatgtgatcagaagttatatactcaagttatagatacttgattaccgtaatagttatatacgcatttgtttggtaaacgataactatttacacttgtttgcatatcacgttagtgtactaactatttatacatccaaaatactgtagaaattatgtttaaaggaacatcaaagattttgttttttggtctgccaaatatttcattaaaaacaaaagtttttagaaatttaatccaacccaattttcaaatatacttctcttttaatagtatagggatttattatacctttttggttgcattttagaagttttttaaagatatttttgtgccagtttctatataaaatttatatttaaaaacattgattgatttttttaattcaaatattaaatgatattttggtataagaaaaaggttttcatatgcctactttaagccaaaaatcttgtaaaatgggacataggaaataaatatgttatcttatggttaactttcaaactactcttggtaactgagtaccaaatagttttaaagtacaattttattaaaacactctcggtaagtagggcatgattggttgggctgtaagaaatttttgtagaaataacagattgccatcatcctctcatcgtactgcagaatctggttaatttgtgaaaattgacagattaactttgagattagttagtaacccaaggcttgatgaaactagtactgttttaagcattgcctacctcattttgctcatgtggttccattgcttcttaccggtttggattgctgttgataggactactactactcgcttatcgaaaagtttattactagctcgcactctcattcactcttgtttctttcttggttacactttagagatttattaataaatcttgttttaattcatccttctttgataatcatctttgctttgagattgaattgatgacttgactcaagaatatgttatgcttccctgctttaatactttttttggcatggaaccatgtaataggttatgtttcatgtaaccttaactttcatttgagaaatgaatatttacatttttacccaaaaaagatattttttgaatgttttaaataaaacaatatatatcttatatgtatatttaaaacaaggagtagaagttaaacattatgattattcaataatttaactaattaatactcgtgaacttgtttatttatatttttaaaaattagctgttactaaccaatcacaaagttaatatgtcaattttcacaatttaacaagattcagccatataagttttaatatcaacaactaaataacatgagttttgtttctatgataattaatttggtttttttttttgatgaactaaaaggaattttggattaaatcttgatcgcaatttgccaatcatcataattcttcccatcaaatatttcagaagcaatggaaactccgggattatcactgtttgtaaggtagtaaggtgaatatatgtataatactgtcatgagattcgattactggatttcgagtacgagctcgaggttcacgtgaaccttcaggagaagaatcatcgcgaattgccaatttacgagctgaaacaggaacgcggatcgtgcgatgattagaaattttacgtccatgcgccattaaaaaagctcttattttacggcgggggataaaatttgttcaactttttggtcgatgcaacaaatttctcggtgacgaaaccgaagaaactgttcgaagagaagaagaagcaaagaaaaaaagaagtcaagaatcgtatgaatgattcaccatgttacaagaaaatttgttacgaagaagaagataagaatcttatatattaaagcagatgtcgaaaggcttcacgttcgctctcagaaaatgaactgacggatttggccctcccctccacttaaggtttttaaggataaattagtctttttactaattaatgagataacatattattttaatatgtagaaaataaaaaaaagcgtttaattccctatcaaccctaaatttcctattctccagtgcccctaatcaaacctaaatattaaccctaatcaaacctactcaatcctaagtcgcccaacaaccctaacggacttatattatgcccgtataatttacgccgtcatatgtaaaaccctaaaatcttatgctcaaaattcctataaatataggatctctcctctcaaacacaaacatcgtagcttgattttagtgcatagcaatagcaatatggtttatagttcttttttgtatttcaatcaaggtcttttctatgatgctcttcatagcaatagattttttcgagtcctttttatgttatggtcaattggaaagtaagatctcatagtctttgccaattggtgatgagttgtttacccaaagtttatagtttgttcgattacatgttttggatctatcgtcgctactatatgatataattattttggaatttctttcttttaatgttagtggatcgatcccgtctttaaagtgatggtgtttgtgtatgattttgcaagttggtgtttatgcaacgtcgtaaattggtgcaactaacaaaatctccaaaaaatctgagggtttgtttaatcctgcaaaaaggtagtctcttatctaactaaattttctattttatcatggatttagtttttgctttttttttttctggctgctataaaccctagcgttcgaattgattcacacagatcatataaacacatcatataaacacaaacattgtatgtaagttattgattttgtttatagtttgttcgaattttttgtttatcattggttttgagaagaaatatgcatgaaagtttgtcaatttagctgaaggaacgttattttgttgttgtgcagtcttagacattgaggcggtaggaacattcaacatgtgtcacgcagctctcaagtatcttaagaaagtagcgcctggaagagactcatcaagcggtggcggttcgattattaacataagcgctactttgcactacacagcttctaggtatcaaatacatgtatctgcagccaaggtaatttgattagtctgataaagtcattcagtgtctcgagttttggttcggaaatcaagaactaacttaaaggaacaatagaatgtagcaaaatgtgatcttaggagtttgaaacttgaaacaggttgcagttgatgctaccacaagaaacttggcattggagtggggaactgactatgatattagagtgaacggaattgctacaggtcctattggaggtacaccgggaatgagtaaacttgtacctgaggagattgaaaacaaaaccagagagtacatgcctctttataaacttggagagaagtgggatatcgcaatggctgcactctacttgagctgtgattctggtatgctgagttaaataaagcacactctttagtataaaacatatatagatggttagatgacgtaactcatttcttgatttgtttaacagggaaatatatgagtggactaacaatggtggtagatggaggactgtgtcttagcaaacctcgccatttggccaaagagtggagaagaggtctagggccaggcgaatgattattactatgttttggtgcatattgtacaaagaatgtagtattaaaaccaaaaaagtctttggtgctttggtgcatattaattatacaagaaaattctcacaacgtctacgaggaagcaaaaacgtctaagcctaaccaagatgaagtttcagaccagtctctagctctgaatacgtaattatggtcaaaactcaaacgtatggccgagctagaagaaaagtacaagtcccttgactcaaaatcagcagaagatgttgggaatgtcctgaaatcagttgtactttactctagttaaagttgtaatgtcgaggtttgacatttgtataatattaggtggttataatgtgttgctagagaccgcttataatctatgagtcagaactcattgctaatattatacaaatctacagggtcacacacctaagcaaattggatcaataaaaagatttattgcgctttggcccattattaaccctaattgattagggttaaacgtttggctatatatatgatatattaacaatttttgtgagatacacttttgatcacaagaaccataaaataaagagacaaagagttgtctaaagttttgagattaaatcttaaaggaactagcatttcagatctgatccagtttgtgtgcgtgtggatactagtagaggcacaacacttggggtgctaaaataatctcgagataatatggttcacctttgcgctgcagaatatccaggtatattcaaacccaaagatctaaatttaattctttatttacacagttcctggcaattgaatttgtttttagtatttattaattgttataaaccggtacgtaattccttcagtggtatcagagcctatgtgtttaatattgaatttgaatctagtttaatctatattataatatagataaataattgttatttgtttattatgatgaaatttgtgaaatttaatttgttaaacatggtagaaacgaattcgcctaatagaacatgaccgttgtatttttatgggcagcaaacgaaaccaacttcttccttgtagactatagatttttgtttgaaacccctatatttagaaaattttgttgcctgagaataattatttatgtatttgtaggaggtaatttgacatatcagaccactgtaagaagagagctaacggacctaaatgtcccgaaacggcaagcgtattcagggtgtaagtagtctctgattcatatctctctgatttgatttggtacagtataaaattgtctacttttttttatttttgattgactcgtattgattgtgtggaggttattgtattgattgatgcgaatgtagtagttttttttttttttttttggtcggaaaacgggagaagtctcccgctttattattcataacaaaagaaaaaagaactacaaccgaacaaaacgtaaccttgagaccccattggcatcttccaacaaaatcggattaacaatatccggtggaagattaaaagaatggaaacctaaaggtctttaaaaaacatagttcgctaacccatccgctagacggttagcctccctatacacatgtgacacacggactaaccagtcccttgataaaaagccatagcacaagcgtactaggaacgacagggggtgagagtcactgatccctgaagttaaaaaccccaccacaatctccgagtctacctctagctccaacctcgcgacccgcctctcccaagctatgtaaagtccatagtagaccccccacagttctgccaaaggagctgtacaaatcccaatattaagcacaaagcctccaatccaattaccttcctcatcccgcaacgcaccacctgcagtcgcctctccagggttcccatgcgacgccccatccgtattcagcttgacccagccctcatttggtttcctccatgagacttgtcgctctacctgcacaatctccttcgtattcccggagagctttaagtgagcagctgaaacctcatttgccaaatccttaatgaaccgtaatctatcccgacagcggccaacctctcacaaaacatttccacaacgccacttccaaccccaccaagttgccaatgcaaaaactgtggaccaaacactgcctcccatctcaccgtgttctcccagatttacatacagccactcaagaatagacttctcaaagaaaaggcgttgtttgctcaccgagataagccgtagccatattccttccattgcagggcaatctctgagaacatggataatagactctttcgctcccttacaaacttgacagatggtcgtggtactcaaatgtcgacgatgcctttcttgattcgtcataatggcttgttgtgctactaaccagaggaagagtctcactctctcaggcgcagtcacgctccatactcggtcaaagaatctcttcatatcttgtctcggcgcctcatctctagtaagaaaagaataggtggtgctcactttgaatctcccatcttgactctccccccacgatattctgtctctagctcccgttatatcatctaaaacaaacgattgtaattgtaatctgttataagaagatatatatggagctatcgtcgccatatcccaaccgatcccatttctcctaagatccctagctcgcattcctttccaacccgccggaggctcctgaaccaacaactcagctagaggaatatttgttagccacttatccatccaaaacagaatctcccgaccatctccaatcacccaacttaagcccgggattaccacctctctcatacccaacgctacacttctccaagtcgatgagcagacacttctaactttagtccaagcaccatcccgaacatcttgtactctgtagttacatctcatgattctcgcccataagctatgataatcctgaattagacgccatcctaccttagagagaagagctttattcatatcctgagctttcctaattcctagcccaccttcactcctaggcttacaaactcttttccaggaaataagatgctgcttcctttgagttacagagctgccccataagaaagatctagacactttgtctaacccatccaacgttgatttcggcaaagcaatggtgctcatggtgtgaaccggaatcgacgaaagcactgccttggtgagtgtaactctccccgcaagactaaggaatctgcccttccaaccagccagccttgttgtcaatttttccaagatatcaccgaaagtgtccttattaattctcctctgaaggaccggcattccaaggtattttccaagctctctagttgagctaatcccactttcatcgcttatcaacttccccaagtcccgagacacattttcagagaagaagatcttcgatttctctaggctaactttttgaccagaagcaacacagaaacgttccagaactcgtcttatcacccgaatctgagccacagatgcttccgcaaaaaggattagatcatccgcgaaacagatatgtgaaagctttggtccaccctgagagagactaatgggtttccaatctttccgagcaatagaatgctctataagatggcatagtcactccatgcaaagcacaaaaagatacggtgacagtggatcaccctgacgcaacccccgttttggtctaaacgcttctgttcgctcaccattccacaataaactcattgatggctcagtaacacactgcatgatccatacaatccacttctctggaagcctaactgcccgtagagtatcctccaaaaattcccagcgaatccgatcatatgccttttctaaatccaatttcaagagcatccaacccttacgcccttttttcctcctcatcgaatgaacagcttcttgcataatcactatattatcagctgccaatctacccgaaataaaactagcctgagccggcctgataagcttcgatataacccgcttcaaccgcatcaccaaagttttagtaattgttttgaataaaacattacataaactaatggggcgaaactgtgttatcctttccggtttcagaactttagctatcaacaccacgattgcatcattcgtaccttctggaagtttcccggaagcgaagaagtccaacacaaaccgactaacagaatcacctactatatcccaacaatcctgataaaaaacaggttgaaagccgtcaggccctggagccttatacttccccatgcttcgaattgatgtctcaacctccaagggattaaacggcttgctcaaattagacatgaaaggccccgatccggactgcctaaagtccggacgagttctctcgacccaagccactaagtgactcggccctacccgtttatgaggttctttcctagtctaatccgtttcatatgattccgtgattcaatatatgagacgaatagagtaaacaaacaatcggatactttattgattaagcaaaggattcgatacaacctatgagtttgcatataagctattacaagtcatataatcgatccctagactatccgaactatcaccacccatcatcccggccttgagtctctcgcgcctaagccaagtccttcccacgatcaccattcgttcctgaaagtcatagagccataagtaatctcatttacttaatcatatgcaagtccatgcaatgctctatatgccatacactactcggatccgtggagagaatttagagaggggaagatcgcgcatcagtccggccgattctcggcaggtcagttaagacctgccggtcctccgccgagccgcgtccccacctcagccgatccctacccggaccgagtcttgtgtaggatgcacatgacccggatactacccagccctctagtcgatcctttcaaggatccgactactaactcacatcctagaacccttagactcaaagtctaggatcccttaccttccttctcgaggttaggtcgatccgaccctccttctttattgccggccacagcccggctaccgaatcctaagactatttattctcccaagagggagagagttttaatggtgagtttcttgtgttttgggtgtgttgtggtgagtggaatggtcctgggcgcccttccttatatagggggcgaatgaatgcttcccgaatcaacacatccgttccttgcacctttccgaagagttgcacctttccgaagagttgcgcccttccgaagagttgcacctttccgaagagttgtatctcttcgcccataaccgcccagctagtccgtcacttgtccagctacctcgagctcaaccgtcactcgtccagctacctcgagctcaaccgtcactcgtccagctgcccgagctggactgtcactcgacctgagtaaccgtcactccttccagctgagcttgagctttgggcgaactgacccagctgatttctttacgatcttagcttagcctgcatgatttcccctttgtccgagcttatggccagctccttctcacttgtccgagactccacctatttctctcagaccaagtcctagccaacgatcctattgaggatcgcgggcgttacaagtctccccccttgaattggattcgtcctcgaatccgcatcaagttgatctttacccatcttcttgaaccactccggaaaattggccttcatcttattctcggtttcccaagtgtattcttcacggcctccacaattctacaagacttttaacaaatcccttgattttccccgagtccctttcgacattcggtccatgatccgtaccggccatgcttccaccgtcatgttctcctttaacccgggaggtatatcttccacgctttcttcttgatcacttaaatacttccgtaattgtgacacatggaagacgttgtgaaacacatttagttttggaggaaggtcaagtttgtatgccaccgcccctactcgttcgatcaccttgtacgggccaacataccttgggcttaactttttccttgaggtgaatcgccctgcccctttgtaggtcatcgcctttaagtacaccaaatctcctacttggaattccaattcctttcgacgtttgttggcgtagcttttctgtcgatcttgggcttcctttaacttgatttttaagaacttcattctctccgtggtttcatccacgatcgtaggtccaaacaaccgacgttcgcccacgggcgtccaacacaacggtgttctacaagctcggccatacaacgcctcatagggagacataccaatactagcttgaaaactattattgtatgcaaactctattaaccttagatatttctcccagtttcctccccaatccaagacgcatgctctcaacatgtcctcaagggtttgaatcgttcgttcggactgtccgtccgtctgtgggtggtaggcagtacttaggttcactcgagttcctaaggccttttggaaagcattccaaaactttgacgtgaaccttgtgtctcggtctgacactatactaaccggaatcccatgtaaccgcatgatctcgtctatatacttctcggcaatgatttctgctccatccttatccgagatcgccatgaagtgcgcagacttagtcaatcggtctaccacaacccataccgcattgtgtttggatttgatccccgttggcagtcgagtgacgaagtccatcgttatgtggtcccacttccattccgatataggtaggttttgtaacaacccacttggtacttgatgctccgccttgaccagttgacaagtcgggcacttggccacccatctggccacgtctttcctcattcctacccaatggtagtaccttttaaggtcgcggtacatcttgttcgacccaggatggattgagaacttcgattgatgcgcctctcttaggatctcctcctttaatgccctatcgttcggcacacatactcgaccgttcaccacgattgtaccattgttcgaggtttggtactcggtcttgttgtttagtgtccatccttttatctcttcgtcccgttcctgagccagccggatcctactaagcaagtcggcctgatcagtggctcccaaccctaagggttcaacttctttagacaaggcattcacatgcaatgtccccatcatgttaaccaagtccacttggctccgttccgcctcaacttcctagcgcctcctactcagggcgtcggcgacttggttggccttgcccggatggtacgctatatccaagtcgtaatccgccacaagttccatccaccttcttagccttagattcaactccggctgggtgaatatgtactttaggcttttgtggtcagtatagatttaaactttagcaccatacaagtatgatcgccaaatcttcaaggcaaatactaccgcggccatttccaaatcatgcgtagggtaattcttctcatgtttccgcaattgccttgatgcgtatgcgataacactccccttttgcatcagtacgcatcctagtcccactatggatgcgtccgtataaaccgtatagggctcaccttcctccggtaagaccaataccggtgcattaatcaacatggcctttaactccaggaagcttttctcgcactcatccgaccagttgaatgcggtgtcttttccggtcagtcgagtcaagggttgggccatgctcgcaaaactcattacgaaccttcggtaataccccgctagtccgagaaaactcctaatctcggtggcattccttggtcgtggccactcctttatcgaccgtattttctccggatcaaccgatactccttggtccgagataacatgaccaagaaaaccaacgctcctttgccaaaatgagaatttacttaacttcgcaaatagctcatgttcccttagccgttccagcaccgcccttagatgttcttggtgagcttcccaagatttcgagtgaacaaggatatcgtcaatgaagatgataacaaactcgtctaagaaatcccggaataccccattcatcattttcatgaaggctgctggtgcattggtcaatccgaatggcatgaccacaaactcaaagtggccataccttgtccggaaagccgttttcctcacgtccgttggctctatgggaatttggtgatatcctgaggccaaatcgatttttgaaaaccactgtgcacctccaagttgatccatcaactcatctatccggggtaaaggatatttgtttttcaccgtaactttattcaatccccgatagtcgatgcatagcctaaagctaccatctttctttttcacaaacagaaccggcgcaccccatggtgagctactcggcctgatgaatcctttagccaacaactcctccaattgtttctttagctccgccatttccgccggtgccatccggtacggagctttagatatgggggttgtcccgggctcgagttctatcgtgaacgggtctgaccggtccggtggtacaccactaacggccgcaaacacgtccgagaactcgttgacgatcagaatgtctttcaactccgcactcgcccccacttccttggttgtgatcgtggctaaatatgcctcacaacctttcccgagcatcctttcagcctggattgccgagattaccaagcttcccgaggttgttcttattccttggaattttaacataccctcgtccctctcgaattgtatccgttctcgatgacaatctatgtgacccttgtacttccccaaccagtccatccctaagataacatcatgtttctttagtgggacaatgattaggtccgcgggcatattgacaccgttcactacaaccgagatgccccgaacaagtctggtcggatacattgcctgtcctccggccgctcgtaccattccataatcggtgtttggttctttcctgaacccacctgtttcaaccaattctagactaacaaaacaatgtgtagccccagaatcaaatagagtgtgcgttactacgtcacctactctcaaggtccctacacattcccttagaatgctgagtacctcccctttcccatatgcatgatgcaatgcaaatgcagttattgaaataatgaatagggagttgtgagaacgtaccagtgatcgccctgaagtttccggcatcgttagcttccttcgacaactcataaactcgcggtgccacggcttgccgctttgggggaggcggcagtccatttcccccgcgattgtccctttgtccggcctgcttctccgcagtcaacttagggcactctcgctttagatgtccagtctttccgcaatagaaacaagtccttgtctcttcaccgagaaccttggactgtcctggttccattcttgggcaactttggatcgcatggtccttgcttccacaccggccacatgcacctatggcctttcagcaagttccgctgtggctcttaccacaggtcacgcattccccggtcttagcatcggacttggtgttatccaccttgtcaaatttccttttcttatccgcgggtttggtgggtttgttggtaacctctcaacaacctcatcgacatcctccatagaataaagacgtgagtagtaatcgacagccatcttctcaagttcctgctgttgtgaaacccaactcccatcatccgctttgagcatttcaattctgtttctccgcctcctaacaacagtcatagtatggaaatactttgtgtttcggtctcccaactctacccacttctctcgggatttctgaaaccatagtacttcctcctgctcaaggaccacatcaaattccttaatcaactcctcctccttacttaagagattatcagtttggttaatttccaaaagctcttgaaccaccttaatttcattcatcaaactctccttccttctattcacgtctccaaagacttcacggttccacttttttaatttactctttagagctgccaatgctacaggcgtctctccttccgtattccaagaagcctgaagcaaatccttaaaaccactatgggtaagccaagccgcttcaaaccggaagggtctcctcagcggattactccgcacctctggttccagctgaatataaataggagcgtgatctgaagcgaagaacgggaggtgagtaactgaagcttcctgccactttaaacgtgtttgaggacggcatagcaccctatccaaacgctttgcgacaaaagtactttctacacgacctcgcttccatgtgaatttgttccctttgaatcccatatctatgagagagagctcatttatccattccccgaaagctagtgaatccggcgagagtcctccattccccccgttctttcgtcgagtctgataattgtgttaaaatcacctcctacaatgatcggctcatccacactctgcactatccggctcaacagactccatagtccacttcttctactaaccgaaggagccgcataaaccgccagcagatggatagccgctaacccattccccactttcgcgtgtatgaattgttccgctgactccacaattgaaacatctcccacctctgatttccacaagagccaaatacctccactctgccctcgcgcatctactctgaaagaattttcaaaacccaaattttgataaattctgaccgctttctcaccacccgcatgtgtctcaaacaaagccagaacatctattcgatgtttcttcagcatataccgaattgaacgacggaagttgggtttgttgaccccccggcaattccactttaagcaatccataagatatctgtaaatcaagggcaaacgaatcaccggggcgacctgttatacaagggcagagcttcccgcttcaggcgacaagcttccattcacacctatccctccctccactcgagtcccggctgaaatcaggctcgtcgtatccatttcattctcccggaccgataacagagcactctctgtgattttctccatctcagtcctggtcacaaaaattcctcctcgtctccccatggtacctttctctactcgaagccttttccctgtctcagaccgcactacctcacctttcgttgggccaaagacaagccctttagtgggcctattcgtgttctgcttggccttttgacgattctggtcattgggcttaaagaatccggcccgtctatccttcagcccacctttcagcccaattttccttatctcaagtcctccaccatcgattccctctcgaatcccttccttatcttgactaatactcttcccttgaataaacttacgcagagtattaacattttccttattctgaactcccgacaaatccgcctcacttccctccactggacttgattcgatatccaagttaccaaaactattcgataccagaatattccccgaattttttccttgagtgatttcccgaagattgcgccctacaacgcccgtagggccctctatcccattgaccaccgggacctgcggcggtgccgccttcttcctcgaccttctcaccaccgtaaaaccatcattctccggaactgctccactaaccaccaccggagcactctgagaagcggcattaacttctttctctgcaatagtctgtgggcaggtatggatcaagtgaccatacatgccacatcttgaacaaatattagccaaaccttcatacgagacaaaatatctctcaccattgagtaacaaagttcccttcaacggctttgccaaatctacttcaatacacattctagcaaagcgggctcgctctacatgcagcgttgtcatgtccactttcaccggctttcccaaagacccagctatacccataagaatggacgtgtgatacagagacaacgggatattcatcagacggacccaaattggtgttgttgtgatctcatcgcgtaaagggtcaaattctggagaccaggcttgcacgagaagataactgccaaacgctctccaaggaccacctgtgagtgccgacagatactcatcctctctttcaaatctgatcataaaaaactgacaaggcaggtccacgacgaacatagctccttgtggcttccacatctccctcaacctcctgttcaaattagcaatggagatattccgtcctaaaactttcaccaccatgcactgcttccacatactattcatcacatccaacacttccctaccaatcgttataaccgattcaccatctgctccattcgggaactctacacgcatcctcgaagaaacaaactcatcatccatcaaactctctgggcaaagcctccctcctgcattcgtacccatcactctcgccgcccaagatccccttccatccggcggatctcatggaggccgtacaccctctccgatctctgtcatagtagcatcgtgatcacccgtaaccctagccgtcatcgttacccaactcttctgttcaactatctgaatgtagtagtttagcatgatttgtttgtgctggttagataaattcaacataagatgaattaaattactttgttttccgtcaattgataaactaattcagtgatatttattgataaactaatgatttcttcggtttggtgatacaacattactatttatgatttttgtttatctaatgttataaagaaagccccagcccaaaaaaaacgtatcgtcccatttataaaaaaaaaatcaactggtgggagctaacgctcgcgtcttcttcctcttgacgtgattggaattcgtactcgcaggactattaaaaaatgaaatcccgcataaagataactacttttcactatctgtagatatgtgttttttttgcaatctttattctagcaatatatgagaaacaaagttaatgtttattgttttcattatttgagataatatggaaaaaaaaaatgaaaagaactgaatatcaattgtaaacattttattaattcgctgataaactgattccagtagctccctcaattccaatatgccctgtgttgtgaatagcttgaatctgttcacaaatgttaaaaaaatagattatctatattattaacatatcacgattataagaattttttgactgtgtttaccttgtagaaatgtctcttgcaatgcttagtcttacagattctgaaacacttctttgaacaccacgttcattgtttccttctgtgggttcccttctttgtccacaatgaggattttcaatcctttctttgaagtgacccttgagatagcaacgtagagttgtccatgcgaaaaacatggcctgggaagatagatgccaacgttctttaaagactgtccctggcttttattaatggtcattgcaaacgcaactgttattggaagttgtcttcgacgcattttaaaagggagtttactgtccgagagagatatcaatatcctgggaaggaggactttatgtccaactctatcacctgtaatgatgacagcctcaataattttatcacacatttgtgttatttgcaacctcgtgccattcattaagcctccttttggatctaggtttcttagcaacatcacaggacaaccgactttcaaccttataccatgatttggtaaaccagatacctttagactgttcaagaattctgatgttaacactggattattggtacctccaatgtcagaaggatctacagaatcagaacttaggtataattgttcctcacctacacataatatgacaataaaattaaccgcttatctagtacgaaagccttaaaaacatttaaccatgtttgaatactaaccttcgagttgatcaagcatataattgttgatcatacaaacgtcttcattggttggacataaaatcggtctctcttgaaagaaaaccggatcatttttttctttcaataacttaggatctccataaacttccctgcttattgcttcaattggattatcagcgtacttgattaaaaactcgtcgggtatgttaatcatcacttctccatcatttggtagtgctatcttaccatcaccaacaactaaaatccactctgaaaattcctttaaatccttcgcttcacttggactcaaatcatttgaaaacagccgcatatttttggtcagcttgagaactttgcaatgattccaaatataagaagcattaagagcagccatgcaaatctctgccctaccagcaccaggtataacaggtagtacctgcctgaaatcaccaccaaaaacaactacttttccaccaaaaggttttttcccaacacctcctataatatcagacaaactcctatccaaagattcaaaacaatgcctactcatcatgggagcttcatcccaaataatcaaagacgcttctttcaacaattcggcttgatttgagccacgctcaatattacatacagtgaaatcgtcaggattaattggaataccaaatcgagagtgcgctgtcctcccaccagctaacaatagagaagcaatcccacttgaagcaacgttaagcacaattgaacctctagatcttagtgaagctgaaagtgtcttatatataaaagtttttccagtcccaccaaaaccatagacaaagaatacacctccagtgtcattgtcaactgcctcaatgatctcagaatacacactcttttgctcatctgtcatcttctgcaacgattcttcaaatttatccctctgttcattccgattatagtttctttcgtcaagtatcaaaagattactatcatcatcatcttcttctggtaattgtggcattgtcttgaaagctgttagagatgttccattgcttcgtaagatactgttgatttcctttaaagcaaacatctgtttttgctcatcaaacaatattagttctgcagacgaatataacatgacatggcaacaatcaataatcaaaccaataaaatgtaaagatctatatagaacatatatctgtaaaatacaaaattatggtacctggtcagtcaaagtactctctcctttttctttctatatcttctgataggtgttcccaagttttttcccaaacaacttctggttgagaaaagcttgtagactggagcattacaacaaacaacaacgcaaatagtttccagttgcctagaaactggttcttattatgtcatcaatatactcctggtcatcatctagaaaacccaaagcaaaacatgtctgcttgaaggatttataaaccacaccattaactgtttttagatcatcaaaactctcaggtccagtttgtgtgttgagaaacactcttaaataataaccttcttcataaaaaggtggaacataatttatccttccaatcgtattccctggtcgctttctttgattgaaagtttttgctgtaccatcccaggtaaaatactctggaatctgagtatatgtgagatctttggctgtaggacaccgtttattcaattcaaaccaagccagaaacattgaattttgtagttctgaacgcttcaaaacgtgttgtacctcatcatcacctttaaaaaacagaagttgtttccctggtaggtgaaaggataacctctgaacggatgttgaccggtaatgtataggatttttcagaattctccaaccagcttcacatgctgatacatatctggttaaaaaaacacaaaacatgttagaaaaatatgtctaatctagatatagctactaagtaaaagatatgtttaatacctgcaatcaaagaaatcttgaatttcatcctgaattgtttttccactacttgagcttgtagacttctctttagaatttgtaatcttcgtaggctcatcatgaggctgaacaacaactgctacacgatccatccctttagtgatatacttgaataagtacttgatggatcctgtttagttacaccactcaacattaatatgagccctgtatcgaagcgacaactttttgttataaggaatgacatatccgttatcaaacttaaaaccacacttctccacaaagtgttttgtctttcgtcttctaaggcgatatcacctcattcgtgagattattggtagaggtgatgtgaagattagcagagtttcaacggatgcaaatgttgctggtcctattaccaaacctcttccgcagccgaagcatgagagtcatactgcttcgattggcattagatctataaagatgtgatattatttctagtgggagattttttcttttatgatatgatgttcatattaaaatacatttggatttaatttcaaattaatgaaattcgtttcagtattatttatttatttgataattaaataacagtcccaaaaaattgatatcattcttataggtcatcaagtacgtgacttgatcatgaaaccctgtaagtggaaaatgacatatattattgaagtccctagtcaaggttatgaaaatgggacattaataactgggaatgactagtatgtgaggtgactgatgactaagtttcatggagtcattaatatgtggtattaaagtcaatcacatatatatgtgttagagaacacaatattggattgacccgttatgaggactctacaagattgttatatgagtgtcataagagtttctcatcacaactatagagtatagtcctttgacctgagttcgtcatgatttcttactcatggattagttcgctttgactctttcaaacgtcagccataaaaggtgattatatagacagtgattgggcgcgttatgaattgtttaaggaacagggatggaacaagatggaatttgtccctcccatataacgggagataaatatctttgggcctatcgaagatttgatactgaaaaatgcgtggccgcgctcaaacaaggtgaatgtcagtcgtttgttttatcagtataaattggagttcgataaacatggtctagctgaataaggatgacaatttcttgccttatgctgagatcgagatatagagacaaagggattatgggaatagatgattccagtacaagtgggagattgttgggaatgtcctgaaatcagttgtactttattctagttaaagttgtaatgtcgaggtttgacatttgtataatattacgtggttataatattttgcaagagaccgcttataatctatgagtcagaactcattgctaatattatacaaacctacagggtcatacacttaagcaaattggatcaattaaaagagttattgggcttttgcccattattaaccctaattggttagggttaaacgtttggctgtatatatgatatattagcaacttttgtgagatacacttttgatcacaagaaccctaaaataaagagacaaagagttgtctaaagttttgagtttagatctcaaaggaactagcattccagatctgatctagtttgtgtgcgtgtggataccggtagaggcacaacacttggggtgctaaaataatctcgagataatatgattcacctttccccttcagaatatccaggtatattcaaacgccaagatctagatttgattatttatttacacagtttctggcaattgaattcgttgttacttgttagtatttataaattgttataaatcggtacgaattccttcagatgatgctttagagaaagaggataaacttcggtccgcttttaaccaggttcaagtgcttgagcatgagttaattatatgagaccaaaaaggtaatcctcccttccctttacctttaaatgaaagctttcaccctctccctcatctgcatccaaaccggagcgactttgttcaatcgcttttgcacttttttctctgcctggcaggcttttcatagttcacgacccctgttgagtagggtcggtataggtaaggcaatcgattcaaaagtagactgagagtggaggtttagaataacctaaggcgtactgtagaaggaaagaaaggtaagcaatcccagacccaatagggctacctttcttcgactgagacctatctgcttcattcccgagtttcacttcacttggacacagccaaagaaaaaggggggcttgatccaccgctttcaagtccagttaaattagagaactcctttttagaagaataggatagaatcttccgaatcagtcctactatggttggaccaaggtcatttcgactctctagactttcttgcttctttccatcctgagaagtagatcctttggaccttttctttcctgttgaacgagtggatgttttgaacgagtgttgagcgagtgaaatgccccataagctataagggcgagctatctctttagattctgtgagctgcgattgaactgaacgttccaagtgcatccagcaggaatcgaacctacttgcctctttattaggttgggcgctttaaccattcagccatggatgcaaagagagcgagtgaactaggttttggtattccttctcgagcttcaatttcttccgttataggagattcgagaaaagatggaataggaagacgtgtttccagaacaaacaagatacgggttgagaaggggaagttagcaaagttagacaagattggaatgggcataggaacatgtattgatgtaccagatcggctaatgctcccaggttgatgcgatgtattccaccagttgactgaagactttattattggtatatcgatcggtccagcacgaattgaaatagaagccggttcgacaggaagcttttgaaaacgcagtgcacccaggtaaataagaaacgagatgaatacagaggtcaaacgagcatcccacacccaaaaggtcccccacattggtcttccccgaaaccccccagtaactaaggtaaacaacgtaaaaaaagcacccatttctataccggttccggaagagcgaagataaaggggatgttttgttaataggaacaagaaagtgtttatagccgtggcgatataaacaataatactcatccgagccgcaggaacatgtacatagagaatacgagaatttccaccttgttgaagatctagtggtgctaccccaagacttaaatgaatagccatcgctgttaagaacaaccaagacccaatgagaatttgcgcgtagcttctggtctttgacatcaaaaaagaaggttgtaataacgaaacggacatgtgcaaattttgtcctagctagtggaacaagaaagacatggatctataatacgcaatcaaaggatttcccccaacgaataattccccctcccctgctttgtttgttttcgctctgcttgtgcgtggcactccttgctggcggagcggcgcatagcgaaaaaaagaaaaaaggaaactcaccaccaaaagatcagtccaataatcccactcactggtaaatagcgcaatacttcttcgtgaatctccgctatttgaatatggaacatcataacaacgaaaaggaatgaaacggctatagctcctatatgaactaccgggaagatcatagcgaagaagtcgagacctaacaaaagacgtaaacctgaaatggcggtttagtcgtcggaatcgcttttatttatgtcgtagtcagacagcaattccagtagctccacccaaaacttgtctccgttttttcctaaccgggaataaagatagtagaatcttttcttacgccgatcgatatcgatcatttcatgttcagtcatcacaacatttattgctcgttctatatcccgttcatccggaatatggtaaccttcggatactaagagttcatgtgtttttgctattatttttgccttgattttttcgcatttatcactctctgcttttacttgctccccgatggtatctgtgttttgatcctctacctcgaggttcaagaaaaggcgttttgagccactttccttgtactctttcgaccagaaaggtgaacccctctgctgatcgtgagagtgctcattctcatgagcataatatccttctaaaagaccaccctcagatggatttgtcgggggcattggcgtatttcctcctcctagtcctccggataccaccgggtagaactgagaaatggcacgacttaagtcgtccatccacaagtatcctacagcaaataaagatttacagagaataactgaaataacataaaaccaaatcagttgccattttttggaaagtttgtttataataggaagcgaacaaaaggaatctaaaaggacttttatgctgcaaaagactgggatgggaaacaaaacagaatgtacaaaacggataatacgtgtaaccagcaaaccaaagaccaaaacttcagtacggtccgtgcgccgtttttcttctctaccatgacgaatcaattgattaaacgtgggcattattctctttcctttctttttccccccattttgtgccctatcactttactcccgatccgaagcaccccttttccattcatatagaaatccaatcgtcaaaataaataaaaagagtccatcatggaccaaaatctgcccgagacaaagctgagctgtcaaataagaccaacaagggataagatagggaggctcctctaaagctggaacctcttccaaccccagcacggctcttccccgtcgactcctcgtacgcgtatcacaggggcaaacacgccttcaaaacatctggatcatacaaacttctcattcagtggaaaaaaccttaccaagactagttgcctcaacgaattgatatgcttttgctttttgtgacaccggcgcgaatgctgaatacggaggaatacaatgaaatcagaacaaagcaggtagaccaagctagcttacagaattcgaggaattcaaactcagaataagctcttttattagcacgtttggtagccagaaaggaaagaggttctcattcacagtgccttctccttctgtgatcactgatcaaaaggacattcattcagtaagggattgatcctcaaagtggttcttttagcacaatgaattacttatcttataatgaattacttatcttatatagtagtgtaaccttctcttcgtacaaaaaagcctattctgaaagccgtctttcaatgcctgtaccctagggcgagctaggttcaagggtacgcacctagtagctgcgagcctaagattaaaggcaagttcccttggttcggcacgctttcactcagtatgataggctacggtcagattcgctcggtctaggtatcaccttgatgcgcgtagttattgccttgatccctttcctttgctcgggtcattccattgcctaaaaaagtgagcctggatcttcggagaaaggattttagagctctgtggagaaagtcttgaaatattggatgctttctttcgtggttaggcgggcatggcatcaactctgtataggtgggttggcccggccggccaaagctagatatagatcggttggcactggatctgctggatagaggtagcggcacagacagctacggatggatagaattacgtcagcttgtcgggtcagtagatatgcccaggatccattttgactagaaatgaaatggtacagagaagcgcagtgagcggtagcaaccattgactactcgggccgggccttgcagccagaaaatgggactcgatcagctcagcccattgactcttttatggggaactattagagacctaggaaagtcaagatgccaccggggcgtagaaagaaaaaggcttcttcggcatgatagctctgctctgtcggataatatgagccccttatggaacagctcactccggggtgattctggtttagtcatagaatacagtaaatccatgcgtttgtcttcgccttttcggaagaccaagacagctagacgatagattaaccaaagccataaagagaagatcgatatcgcacagaaatcctggatctatcaaaaaagcccgccaaaggtgtcctcacatgaaatcatgaaaaggatccgagcccatcaaagactctactacatgaaaggatctgaatctatccaaatagctgtggcccatgatccaagggacccgcaaccagtcaatcatgctatccttaccttccaaccaatcggaaaaaattacgttcaattcaggatcgaatacatctttggcttatgagttatgcgttttctcttcttggcactttatgtctgctagtgcataatcatgcttatggaaatagtggaggttgagcagtttccctgatgaagagaactctccttctctaaacaagcttgcctgtgggcgtcgagtaagagcatctgggaattgatcttttacgagacagcccggagttggtctcgtggctaggtctttaaccgaaccggttcggaatagaaagtctcggtcaatgaagtggagtgggctgaaacagaaagttgggtattgtatttttatgctcgcttggccggaatcccctatagtgcttttcgggcgaagtgacggattactttttgagtgactaccctcagtctttcagagcctcgggataagctgttcttgtttcataagcaaatgtggcaacctggtggtatagtgagctctctctctggattaagcttcggtcattgatagagaggaatcacctagcctagcattagactcgactagctagccttccttgggcggattgctttgaatagcgtagttttcttagctccggggactgccttatctacactatgagaaatgttagatgcaaccattatagtatagatatattcttagatgattactatatgtgatttctttcatacagtcttaacaaatatagagatcttcaccataggagactagcttgaactaaatcctccaaccttaaagcagtatgagagaggacggataccagaaagaatcacctcggagccgctatgccactatgagaaacgttatactatagatagacatgagatgatattctataaggaatacaatgtttgaaaagcaagaatagatagagttgaaagaaaggcgctcgtatagagccctcgactatgtatcggacatatggcaggttgggaaagcgcgcttggaaaagaaagactatcctcgaggtaaatgtaaatcaatctatctcgcattgcccaatctgaatgctaaaggctcgtaaccccctaaaaggaaactcaccaccaaaagaaaaaggtaggttaactaacgaaactcaaaactacattttaattcttgctcaccgataatcctttataaaaaatattatacagctgtatacaggattattggtatagctgtccactagccgaaaatcggacaccaaattattgtagactgacgacctgtccttaatagaaccgatctgactctctgaacaatcggaatttcgtacttctgtcggatcctccctatctcctgatcgagcttgtgtaggtagatgttgcctggtagggccgatagtagtacactgtgtgggacggagtaagggcccctctcaactcctacgagtcgtccggcggaaaagactttctgaatggagtaaaagaacttgggatcgtcgatctcttccttcaaaatttggatgagtcgatgtcggtcgatggtgtgaaaacacttcctgatgtcgaattctaaaaaccagcgagagattccccactcttctttgatccgtcttaggaccgagtggcagccttgacccgagcggaaatgcgatgtgtctggaaactcgggatcgtaaatggattcgagtaccattctgatcgcctctttcatgatcttttctataggtagaactactgtgagcggtctaaacttcaacccttctttctttcttcatattgtaaaggggggaaaagctcgttttttgctccccttttttataatcaaaggccccctcctgccgtcgtttcagtgactcatagggcttccctcagttcagtctttttggttcttgaaaatggtcgccacctctcctcttctttcagtcgatggggttcctctccttttagtcgagtaatcaatacctctcccaggaccggaatgattatccctgcccgatgggtctacatccatccctgaatgtcgtcgggtactgttcacttccccgccattcttgtaaccgtcacctgtaatccgcgcgggtgtgtccgcacccccctgagtggacgagaaagaaaggatttctcggagcaaccccccaggttccagacccaggagtcaactttcccgtatgagcattcggtacatgtatcagtccgtgggaagaggtgaaagggtcaccactactgaggatctccccccccccctaatcttagataggtcgtctgagggttcgccgcggttcattgctgtgcttacacacaaggctacccttctccgaaagctacgcgggaccacctaccactagtcttcggccggaggggtttattgcacaaaaacggccgggacgcaggctcccgaagagggaagcccaacgaatgtcagatgcaaagttccgcacctcattaagatcatattggcatactctcccaaaaaaaaaagagcagaccccattgaagacgagagtaaggtacaacaaggccatttctgtccaccgcccttctcacggaaccgtacgtggacgttaccgctcatacagctcccagccagcaagcacagttagccttcctctacaagaaatggaaatgtggatgaatcgaatgaaatcgaggaattcggtttttcttttcagacatgataagtaagagcatccctttcacaaaaacctacggatccccctcctatcctgccacttcagcaccttgtgatctttgagaagatcattacgagccctttcctagaatgtttttgtagattccgaaaattccagagtggatcaggacgagaatgaatccgggaatccagggcatactcatcctggagcttccgctctcctctgggaagggcttttttatggatagagagatgagtcgagggattgattactcgactaaaaggagagggtagcctcccgtttgaccgatttctcggagtcggaagaagatctctcatctgatgaccctgaacaagaaggagctgctctcgatgtgagatcagcagcaaaagaaagaagaaaagggccatgatgatgatcctatgttcgttttcgccctgcccctatgatgcgctcctagctcgcagagcataagtcagcgcaaaggagagatacatcctttaagactgtgaagagaatccttggtttgacctacggactacgtgggaaatacgagatctaggcaagccgctacatgttctcccccttgcccttgaacgatagaagaactacttatcttctcttagatagcagtcgatcggttctatgatctatggtcaatcaataggcccacggatctattcttctatacgataaattgccatctcgtagcaccacagcctgggggtaagactagaagaggagatttgcttggtcttctgtgcggaatctgcttcctaatcagtgtagctcttgggtcagctcacagctaggacgtcatcagttctaaaggattcctcactagggagactctctccttatgggcaagggaggcagattttgatggggagaaggattcggaatatagttacataagtccccttccctctcctcaatatagtttcactcgagtcacgtcagtacctctccttttagtcgctcgtcgagacctcatcaactagttaatacctccggacctctcctttatcagtcgagtttgtgttcacaacctctcgagaaacaagttcgagagttacgtactttcaatgctctctctattccttgctaatcaaggcctgcaagggaactggctacgactataggcgggacgacatgcttttagcttccctgaaataggcgacttgctcgctttggcaggaagtattttttttgaagaattgaacaaaaaaaactgaaatttctgtaaatcattaaaacgggactttctttaaagaaaaatggtctctcaagacggtaccttccatcaagaaggtcctatccatcgtctggcaaagagacgcccaagatttatagcaagttttgacttgagcgctgccaccgatcggtggcccgttccagtcatatatgagcttatggcgtgccttttcggtcaaacgatggcatcgtgcattgtcaatggtgccttagcactcaactcatgctctttgaagtccgttactggacggcatgacgaagttgtgtttgttgcaggtcaacctttgggttattacggctcctgggctctattcgcgttgtcccaccatgctattgtgtggttggcagcattacgagcatatcctcatcagacgagaccatttctcgactacgctttgttaggtgatgacatcgtcattgccgatcgtagtgtggctaaggagtaccgttctctacttgatgctttgcaagtagatatatctgatgccaagtctattgtatctgagacgggttgtcttgagttcgccaagcggttctgggttaagataatgtcgaaggacttatccccagtatctgcgaaagctgtgcttgagagctacttcctcgttggtactcagcagttggcctataagtacaagttaagtcctaagacttgtttaaggttaaataaagctggataccgcgtgctaggacaaatggacactacactaaggccctatcccggcgttttagtcggattcaggcgttatctagtaagcttttagtcggtcctgatcggttaccactcgagtggtggattggaagaggattacctctcagtccctatcttcgtggtgtgttaattgcaaggattcgggatgggatgaagcttaagcagctcacgccccctcccttggagatgttcctttgtggagagccagaagcacatatcgcagaaaacaccgcttatagacattgtatgaacaatggtgtgagtacgtggtatggtttgacttcgttcctcgtcgtgccccttcccacctaggaagagatactaacccgcagctgcacttggtgcaatcacagcagaaaacccttctcctagacattcctcgggggcagaccacaccacctcggaaacaaacaaacagcacatgcagcaacagagacaggcgttcatcgctcacttacctgcatacatcatgacaacttgttcccatctcaccatgcagaggcgcgtagcgagtaacaatccggtccatgtgctggcttggcatggaaggcaaccctttctttttcgcagcgctacgcgcctccacattcagtgaagagatcccggacagggaagtcagaagggcagttactcttcggacctagcggccctgctttagctgcacttggtggttccccgctcgggattttatactggatttttcttttagggttagtgcaaggttggcttgtgcgaagtcgacaggggtggttgagaaacacgttttattgggatggggcagcaggcaatggataccgttcccccaccagagcctgcagttggtaggccaaatccctctgtccaagtgattgagttgaagcttttcagagaaagggtaatttctgagtgaatcaagagaagatgctctaaatgaccagaattaggcgccctatcgctactttgttatctaaggtcccacatcgatcacaaggtttttttttcaacgtctttgattatttactttcacttgcactactatgctatgctaccacggggaagttctaaatggcgaaagagaatcctttcagtccaggcactcagtgcagtccagacgctcaggagaagacggaggttaggaatgctgattggaaccaatacgattgcccagaggagctttataggtatccagagtcccgcacaaggagcagttgagacagatgcggaagaaggtgcggccgagacggttgatagagatgatccggcaggcggagagtttgattgcgacagtccagcctttcatacgagaaatggcggtgaccgtttgccctaaacaaatatctcaagatgtaacacatatgccttctcgtagagcactcccagaagctaccctgaagcctgatcgtgcttggaaaaggcatttcattgaccgaacccgacccatcccaccgagagtgcgaactgctctttattcgcttcatagctgggctttgcattggaacctctgattgagcccgcggagtcgccttactgcttgagtgagtaagccattcaagattgttgagcttggctcacttcagcttcagagctctggctattgcttgcttagaggaggaagcaggcgtgtggtgcttcccgcaatgaagtgtcttcccttagattcctctttatactcaagaagattagaaaaacactctgtggaactgcaagtggcgtattggagactgcacagcaagtggcgtagtggagtgagcgagcatcttatttgcccggatggaatagaggtttatcctattctctgtaaacagaaaaggaagttgtgctcaatgactggaataagctagtaccatagattattagctatggactactccttaagctagaggagacttgtttgtctgggataaattgtcattctagacccgattggaaagattgaattgaaagcaagaacatagacctgacgagaaagacccacattttgaatattaacttatgataatcaaagggagtcgtggttacgggtaaggttaggaagggcgggaaggacttccttactagaagaggatggtaagccatatgtgaagctgaggcaaagacattttatcttgaagatttagcggaaatcaaagtctaaagtgccttactgtgcgaaaacgcatattttactctctggccaagtctggagatagaccaggaaagacatcttcaaacctgcccgctgacactagtactgaagacttacttgaaagtggtactggctagtggactgatggagctggagaacggaatagacatccattagttcccgaagaaggcaggtttgagcaaggaggctcaagagtagcttttcctcttcctccctttcataacactccttccccgtcttactaggcgttaggtcctccattgcattctattctccggagcctaccaacttgcccacctcttaatctccgcccgttaacatataaaaaatcagactcttgtagattcgcctctttctttccgactcgcttcacgactcttttagtctcgttacgcttaataatcaaaataagcggaagccaactcttgaaaatctcaggtttacactgctagatcaaattcatactgaaatgcattaccctacctatctaaaaaaaagagggccctggggagcatgccaccctcaacccacaaactcccattctcctcagtctcccagtattggagacctacttactacatctcgaccgggggcctctccagtctttgcttaacaacttttctatagaaggattcaatccagccgcaggttcccctacggctaccttgttacgacttcaccccagtcgaagatcccagcacggtatgcctcagtcgacgtaatgccgggcattcacctgatggttccccaagcccctgagctcatcaatgaacggattccacctttcacagcgagctgttccgaagttgcgcctgagcacagtgaaatgcctcttacggtcatctatagcgtgctcccagtcgtcatgtagagccaactggagagcacgcttgacatcctctggatccccgagagttactccacgttgatgcaagagaatttgggctttccgtaccatggccgcctccaaattcgcgcaggcgctcgtgatagtctctacctcggcagagatgcggtcgtgctcttgtgcccgagcctccctttcccaagcctgctcctcaggaatcggttgattgaccgacgaggaggtacgcccggaactggccgaatcttcgaccatatcggatgtatacgtgaaccactcagacgaggccccgtcttggtgattcactatcccccccgatgaaccggtaactgaaaatgtgcccataaagacagtaaatacatccgcggagaatttaccaaaacccgccaagatatggctacgtagaagaacgagaaagagggagatttgacaaacaagggctagatagcaccattgtgtcatcctctttcctaaatactgctttaaggatctaaataggcaaattgaaaaaaccaatagaatcaagaagattataagattgaaacgggaaacgctttctgatcctagaaaacgtccgaaaaaacctgctacggaactactgagcatggacaaaaatacgataagtagatacataatttaatttcgagtgtgatcaaaaacctaaaatcagacaattacagagcggccagtgattgagtgatagatttctcgacgtccggagaacgctcgaccgaagaaatgagtaactaacaaggaagattttgttccccaacttgcttgattaacgggcattttcggggactagcccgcttcttcattaaaaaagagggcgattgcccggtccttggaatcattttagatcgtatccccaagcctgcctccactttcttatgtgaaagaggtgcttgctttatgagactgaatggaaaccttctttcttcgatcagaatacgaataagatcaaaaaggccatcattggggcaaacaatgcaatagcttcggttagagcaaagcccaaaatggcataaccaaatgattgtttagccaatgatggatttcgcgccacagaatgaatcaaagaactgaatacgtttccaataccgatagcagctcccgctgaagcaattgtagcagctccggcacctattgattttgcaccttctaacatctcgggttgagaattatactcacgctttgtcattcacttatcttatatcttattgattcctcgtcgattcttaccctcgttcctttgatcttggacatctcacttggaatgcattctttgcgatcttatacccacggagtggtagactgaagaccaactgaatctcgacaaagagaagtacaagcaagtagatcattcgacgtcagagggaatgactcgtagctagggtcccatctctcttcgattattcaatttgatccgtcttcgtcttctcttatgaaattgatagtttgtgagatcgattactcataaatgctgcccttctcttatatacgagagcaccagatacaccatggatggatacatacgatttcacttatcccaaaagtaaagatcttattcgtattctgatcgaggaaagaaggcgagctagttcaactcaatgacaacctctagggccaagcctatggaaagcttttccaatctccttccgcattctttcctttaatatgcttgtatcacataccaataagacataggaggatccgatagatttcaatcacataccaataagacataggagttcgttccgaacagataagatgttagttggctatcaatcttctttagcacgagtcgatccctattcttctatagttggtgagaactatgacttgaacctgctccttacttcaatcttcttttcaattcagatatggatggtaaagtccattcagatatagatggtaaaggaagatcaagttactcggctagaccattatccaaagaatggaaagctaaagcaagtcaaagaatcagtcccataattgaatggcatcgtcctttctttcccccatgaattgctttctctcgtactcatgcgatcccgtccgacccctttctacttgaactcctggttttgatgctgtgacttcccccatgaattgctttttcttcttttcttgctttcctgcgttgcgtacaactccttctcttattagagggctctcacggctcctatggttgaggagcgttgggcccattctaagttggagcgactctccggaagaattcctttgaagaaagatccaagcactcaacttgattggagaagttagcgaaagagtctcgagagcaaggcgttgagcggatcgacttttgctttcccctaataatctgaagggaacgggtgagaatgaagttcaggctaaccacagctcctttcgtttcagtgggggttgcagtctaatgagaaatgagggttgatcatcgatctgtagcgaatcttttctgccaattgactttcttgtccttcgccctctaagccattggttaagttggtgagtctaagtctaaagagtaggggcgtagcgaattgactattgtgatctctttagcttgaaataggcgctggagtctgtctgagtatgtaaaagatgtggtggataggataagaaagaaaccttctacatcagctaattcttcttccacgagggactcaaataaaggaggatcggtttctttcccgttcatcgtatcataggattgggggtctcttcctgtcctgaagaagcagctctttgcctttctgcttcaaagaaagagggggaatgagcagatcaagcctttcccttcatgcactagatggatcacttacaatgaccaatactcctcgtgagaatctaaggcgcttaaggaagcatctcgaatcgggcgtgaaaaagatccatctttgatttatttcacacaatttcgcaatgtcaacttgctcgatgtaggcttgctcccatattctccacggtttaaggcaagattggtgggaaagggatattctcgcatcgattacaatgaaatattctctgtagccgacatatgttccagttcgccaatagtatccatcgttcacagcttctgccccttttttggggggcacccagcagtttactgttaaggacactatcgacttactgtgatatgtctacagtcaaaagctagtactttatgggtagcatctttagggactcagagatcaggaaaacttgatagaaagccctagctctaacttgatagaatgccccagcaatggccatcggagaggtccaacgtaatttattactcttataaaagagggaactcgactgaaaggagagaagataaattccatttacaggctttctaccaatgaccggagaccagaaaggggaatagaagagataagccttgagcggtcagaccaattacgatcgattcgctaaacattcaagattctcgagatgaactgctaaaagaaggaagggcgatagagagaggtttttcactttcaactaagctaaggagattcgggatgggaacccgcactcttttgactgagaggcgtaggagatagggagttccccgtaatccgaaatatgatttagtacagaggccggccgaccccaaagtcctccaagtactcactcctttcaacgtcccaaggggcattaaagacatagagatcttggaaccaaggtgtcctcctatggaaggaataagaccttgaaacaagacccccaaaaaagggtctttatgggacctttgtcaaggtcgttcgctctgggctttgggttcaacgggtcgctttgaaaataaatagtctcatcacatctaaggtgcaaagattgacctcgatgcatgtcaaattttgaatgcctcatgacctatggttcggtcgtggaaaaccaccaaagggtggttggttgagatcttaaggaagaaataccgacccaaagatctggcatgtgtccttgagtcctcttctgccacgtgtcgcagggcagcaaacctataaaaagggatcgtatccgagaaagtactcctgctagcactgagtgtcttctttccactaggctgaaatacggctgatttctcacccgtgcgcacgcatctcgcttctggctccctgaccgatacgacctttctgggtttgttaacatccttccttctccttttgggtatttgctatcttgtggtccctgattcttaggctgaccacgtggtcctcttgcgacgtctgttgggaggtagcatccaaggtccgaaaggcctttattccgacccgacttgcggatccgggtttgggagaacctccttcgccgccggtgagttttctacatcagtctggttttgcttcggacaaagctctatccggtggccatattccccacactcaaaaacatataagatgcaagccttcgtattcgaccctctggatgtcatcattaagacaaaactgggaactctttttgaatttgaaatctacctccacacacacacgtgcatatagacccctagatgaatccactgtgcatagatcagcccggactgctttgaccagtttcttttcttcccaaaaaaatctggttcattaacaaattgaatcgtgatcactggggacgtctcctctcgtttgactcgagttgcctttaagtctcctaatcacatggatataggtgggttaattgttcttcctttcggatgagctaattgaatcagatgaagatatgagatcagttcagtctcattccgtaaagccaaagacgacattccattaaagatagagtgggtcgacctttcaaccaggacggttgggtgcgctaaagcaaaggcgtcttatcaagggcctgccgctcccctctttagttgtgacaagggagtgtgcttatgattctactttgttgctagaccaggtcttaaaacgcaattatgactaggtcgggactgacggggctcgaacccgcagcttccgccttgacagggcggtgctctgaccgattgaactacaatcccagttttaaaattattcttcttgtcaaccttcttctcatacgaaatttcaaaagaaagaagtagagtcgttggaccaacaaccgccaggataaaatctgtgtgagcggggcaaagacacctgtttgttttccgagcgagaaagagataaattggagattgtgtaatattacatccaatcttccttgagagctggaaaaattccatgaagaagagctcaaagtattcgttcccagtcggattctctaattaagatatagcagtcaaccatcaagaaatcatcaactatttcaccggggatgagctctatggctattctattaagtaaggatcaacttaggccttaggcttaagctagaactgctccttctatcacatcggattctagtaaagagatgggccttctcgtctgatctctgcatcaacaggaatgcgggaaaagcttcttctcgccccagagtccctagcagccttaagcccgctacgcccctttagttgaactggttgctatataggtcaattgaatcttagccagtttcttcttactccttttgttctcattcccggccaaccgtgccatgaagagtcgagcaagagcaatcgcagctttatctctgcctttgcagctcccattcctgccttataaaagcttcaatctacaaaagtagaactactgatgacaggtctggcctacaactgacttgctttcagacttactggctgaagagcaaagagatatctattttacagtaaattcctcttagaatagcatcccgctctttataggtttagtaatgctaccttgagcccaacgagtgtaatacctggagcgagtaatagagaggacagaagatatagactttttctttcctttctggcttgaccatgaggccatgactattcaaatcttacaggaagcaaccgctgtaccccgccttctagctcttagacttttagaagggggttcctccggcgccttgttccgttagtttacttttcattttaagtcttgtaagttagttatgtctttcaagggatatcaccatcccccgcacctcttattggtggaagcgcggggcgttgcaaccatcatccttggacccggaatatagagttcttccctggtacctggaggatggagaagagaaggcattgtctttccttgatggaaaactctatggtatagctatcattaacggaggaaattatccttccgcaccttgatctttctagggctattttcactaagccgaatctgtggactgagtggctaactattctaggagtggggcttttctttgtatcgagaaaatcttttgttaacagttcaaactccctggcaccatcccctgaataaggggctgggggaggtttgacaccctcccagatcacttgagcacaaagctttaaaaggagcaatagtggtcctgctaacgaggtactatgcccggttggtggactttccttaccaaagtggcaacacagaggtttggtcagaaagctgataagggtatgacaaccttacggattaggcaatacctaatcttactggttcttcgtcagagccgggcgccgtccatcacgtggcgtttgtccacgggtcaaggagagtagaaccggcggggtctttcttagtgttttgtggtacataccaaaaggtttgtcattttataccgattgatatggctttcaatttgtttaccacattcaccgagaggctccgcttggtctcttggcgcagtgtttttgaagacactcggtcactccggcgtttcctcattcggatcgccttagtggctactgggctcgttagtaaagaatcagcgattgtttgtcacgtcttagcaggcaaagtacttagaatgtacaagacatcgcgggacccttgtttgcgtattattgtaagtctgcctttacttagtatttatttccgacccgactccatcgctaagtcgaatagaaagcaaagaccttggaaagaaaagatctttcacccggattccaggaaaatgagctgccattatgaaccgctaccataccagaccagatttgacagacaagctccgttgcaagagtattccatctatccaaaatcccgcaaacgcttggagttggatccacaacaaaactcaaccgtggtcgtccagcacgataaattttgaacttacaccgaatcgcgaatcccgtgcaattgagattttctagttgaattcattcacaaaaccccgggaattttagatgaatcactccataacgaaaagtgctaaggtcctctcatttactatttgcgtaagttagttttttatataaaagagggcaaaactgtatgaaaaagttgctaaaactcgtcttttttcgttactttgaccgggatgtaaagatgtattttataaccttgtctgatgctgaccacatgcattaggcaactgttcagctattactcacgttagctgcatctcttccgagaccaggcccttttctcactcgtcgatggagaacctcaccctcaggctcaaaaatcgtcgttcttacgctttcgggggtctccctctctacagtgaggttctgtttgaagttatgattgagacaatgagtcacaggtctttcttttattcccttggaaatgaatcaccaagaaaaaggttattcattagcaacaaaaagagtaagacagccctgtcgggctcctgcagttagaagaagagcgcgaccggaaccaagcataaaagattgactgtgatgctacgtgcatacactgatcactacggagaagagaaaagatgtcataaagcatgggggggaccatcgacttcccccaaaaactattgattgggatcgatataacagagtgtgctcgataggaatcactattatgtccccgaatagaatgtatgtcacctttttctttccctttttgaccaacctgccgcgtatagtttagttgtttctttatgcgagggttgatgattctccagtttcggatgcctccggctgggaagaagccctaatcttcgagtcaggagataccttgagaacagtgaaagcggaatcctactttatttagtttaaaagaaggctttgtctcgtcccttcccattgtaattgtaggagggaaagtaaaaggagttattttaaaccaccctgcccctagccctaccatggaataaagatatagccctataacctggttttcagcagatctagaatctactgcccctctttcaacaaacttgcttgctatcccagcgcgtctatccttagttgtcgtgtctagcaagcgagaaaacgtaacgcgctaacgaacgcacttacgtagtaacccctacgcttgctgctggcgctaccttggatacgccaacccagcgagtaagggagtgagtctgtccaaagaagctcttaagaagcggagtttcactcgacaaaaaaggtttggactgaaaccattttcagacggaatcgactgacttctagttgcatcggatctagagatctgttgccagttccgatagaaggaaaggagtaaggtttaggctttacccaatagttgttgaactcgaggttggtaataaactgaagctgctcagtcttctagcatagcggagtgatatatatcgaagaatgaacttagccttcaaccacaaatggggtcctttaggcagccgattgcccgtttgcttccactgacttacgtcgtgaacatttctccaacccgtcaatgaaatgaagagaaaggcaacaggggaacaaggaaccagggaaagaccaacacaacttccttgacttcctaggcttagaaacccattcctataaacgggaaaagcttactaaccttacaactctggaagggattactttcttaccaactgacatggcttacctggcttaccttactaacaactaacaaacattcctgggattacttcctgacagggcttagcttacttactaaccttccttacacggaattacagggaagccaacacccgggatgttccgagtgaaagtagaagtttaaccggaactgtcgaaagattactacagaagaacccataagatgtcccttacatataccgatgtaaacaaagatctgaacgattgagagaaggaagatagagagtatgataggggaaaggatagcagtagagctcttatataccaaattcaaacggttatcctcctaggctagtaaacctagtcggaatgaagagtacgggagaaggaagacagattaggagagtgttcagtggatacaaagagaccaacagttcttcggaagcagaaggaaagaaagcaggagaaacacaaactgaccgagctagcgatgttcctattaggcttggagaactactcggaggatgaaagaaagagacagggaacaaagcacagtatacatcctactagagctgctaaccggtattcctcggtggttccgtcctttaagccagattattaagtaagatatggtttgacccttttcctttttgttttcattttcatctggaaaacacccggaaccagagcatgaaataacctttcttttttgtatgactgagaggaacgcctcaggtcgaatgaatacgaaagggagatcaatcaaagaaacaaaaaaggccatgaatgaagaagttgggcctttcaccctctttctagttactctgggagctgatctgataaatgcacttcaaagggagggaaggctaggtctttcccatcttggtatggccgagcataaaagatttgaaaatcaagtcaaaataagaaaaggtagagagaaaactgaacgaaagcggtagcccccgtcagggcaagagaaataaaaaataaggactcttgttttccgcatacgcatataggctgtgaaaaataagtctactttttttaatagagaaagtgagtgattcgtctactttcttaataaggtaacggaacgaacttcaagtccttcgtaggacgccgccgtttgctaagatgtgcttccacatcgtgagtctttagtgcacaagtcgtcgaatcccttaaaggaaaggtttggggcaggagtatcgacgacaagtcgtgcctgaagttgttcatgcacatcttgaggagctcttgctaagtaaacttatggggacaggcaaaagtaaaagctcgccaccttgcagtgaattccatgacaggttcattatacctttgcttggtttttagtagttcgggcactccaacccttctttgtgtgttgctgaactgcttcctgaactccgagacccttgcttcccaagtcgggatcgactcttcagagaggtggaggtacaaaggaaaaaacactggaaggagaggtagtttactggctagagagagtcagaaagcagtttagtaaggtagtttacaggctttcttcctttcttcaatgcttgagggacttctttaccgtctaacctagctagatctgagctaccttaatccgtttgtaagtaatggagtaagagttacctggattgagacagtctgaagctttcagcccttaggtccaattccagctgctgttgctctctcaggacttcctaggtaaatcgagtatgtgaaaaaaaattgtcaataaattctcacacatagtcaaacaccttatacaataggttatcagactacatcgatagttgcttgaagccaatagtgggtaagtgttagatgaacgaaccctcttgtggatcgctttctcttgcacgttaattaatcgataaattgcgtatgtaaggtctgctggtctgtcaaggagaatcaagattcgacgggacgctagcgccctaacaataacaagagggagtgctaagctagggttcaaatccaatagtagctagaaccagtgaaagggtagttcaccagacccgctcacgataatgcgaatgaaagggcagataagcctattactagttacgacgagaagatcctaacaggccggtttacaacagaaaaagaaaagataaggcttgaagacctattagtcgaggaattggcgttcctcggggatgaaaaggaattgatctgacccaatctattgatccggacgggactacgaaagattgactttcttccttcagcttgaaagcgggaaagaaaggaatagacagaagaaagtattagagaggaataagcgagtgtcagagtagtcctaacctcagttgaccgatgatggttctgctggttcttacttgaatctcttgctttgagaataatacttcaaaaaaatgcttttatcttgcgatgtcaccactcgctttatatatagtataggactagaccaactttcgccaatcttcgaccgctggcgtatatgaagcacgttttctccgtccctacctcccctgcacccggccatggatcaagacttctttctggttctcctccggcacaggaaagtaggttcgtggctctccgtctcctttcttgatgaagtaaggattcatttattttgtgtctagtcgagtacttggaagaaccccttggaatgcttttctattttcattcagcgctacgccccttgtgccaacccttttctcgtctaataaagaaaggagtcccgggccctacctctactgaatggacttctacagctaacgatccctgctaacagccggccttaccttaagttggaacgaacctatctcaacccatccatcttcattcgatcgatatgggatccttattccttatataatatatcagaatcttatctgtttaaccagctgataggcaactacactcccttttgtatgcatgctggtaagactgatagactgtcattctatcccttttcttgaaagagcgtatatgatggttatgaatggaaaaatgcaatgattgatcccacagcgctttatttagcatgctatacagtagtaaggttatatgaaaacagaccatgatatagacaaggggctagatcgtgataagggcattatagaaaaaatccctaattcaggcagtggcccgtcatgactttatctcaaaggatgtaataggagctaatggaagaaggataatgtgatcaatctccagtcctttacaccctcctgactatgccccttgtggtcaactgagtcgtgcagcacatcttttcgtatcttgacttggtactatctccttttctaattcatcctgtaagcaggtttgagcgctttgaccatctataaaaagcgaatcttcctactcctacacctctcctgtgctgtggggcttggctgcgtagaatatctatcttgttcatgtccctgcccgggatttcttccttggctgtagcttcgctccttgggtctactccccgtttttctggaaggttctacctagatgccggaggaacccattcccttcgttgatgttgtagctttcgttgtttagagggcgcatgaatggggcagctaattaattgcatagtagtgctgctgttcctgcaagcacgaagtccgcgctgtagcttctgtcatttcattagtattcctcttctcctccgttgggaataggttgcattaagggaacaggtatgtaggctttagccggcttctccctgtgcttacatggggtttattgcagctatcccctcgcatttgtagctcttgagcagccaagctctaatcaataggttctaaagtcgacttcgtctcgttattctgtgttaggtttgtaaacctaaggtgtacttcccgaggaacgccagttagtcgactaaagggagaggaacgcctatctacggtttaagcagtctaatctcactctctcgtccagaacaacttctttgggtttacttttctgtacatggaggggcggagcggttctgttaggttgttttattggattgcactgggcattcactgcgagctcttccgaggaaccccttgaacaaacaaaaaaaagggtaattagttctgttttaacagaccccttgttccatagctgctccctatctcgctaagctacctaacaaacagtctcgctctatctcgctaacttactgacgacctacctaacttttctctctcaataactctctcgtctagggcatccgcgcctgagaatgctgtaagctccctctcctctctagacaagtgcttgagtcatgacttcgccctctccttttcagtcgagttgctaaagcacctctcgccaagacgtcttttccagtgtcgatcatcttgctttcccgaattcgttagattgccaccagttccagaattgggagaacataggattggtagttgggctctgctcgcttggttggtcattcccttctgtcttggttgatggataggtgagcgcatgcggttacttccgaacgaaccggtcgatggcaagctttagcttagctggctagcggaacagaagatgggttaatgggctcttaaggcttgggattttatccactcgataggaaacgatcttcaaagaagacacctctcccgcttctgtgactcagcttcatcgtacaagggacttttagctcatcattccacttcgactggtaggggttttctattagtgcacttcggtgggaataagtcttcctcttttctttcggaaggagaaaaagatgcttcatttggttccctcggatcggtaaatccgaattcgtgacccaaactctatctagtttagttacatcaaaggtggctgccgaataaaaggggaaactttgcctgccagattgccttcggtaaccctaacccagttatcaaaagaaggcgccggttcggctttcaagagaggggagcgagctacacatagtgaagcgagtattcgatgaacacgaaggctttgatgaaaggaaaattgacatttcaagtaggtaaagtagggcgcttaggctggctgaaaacagataaaggagacatcatgtgcttggacgagttcctccgaggaatgccttagacggatgaatcccgctggtaaatacggcgggataggatccactcttgcagctgaacttctttgtctatttctctataacctcgtatatctttttactgcgcccgagaaagaaaagagcaagggtaagggccccgggagaagccactgactgctacttcctccgctacaactggtggttatggatggagaaaaagaggggagctttcgatttttaggaacttcttctagttagtagcgatgaattagaatgagaggatccatccaaattggggagaaagagacgtatccgacgaaagcaagatctatgataatagattcagtatggattctcttgtaggtaagttttagcttgagcttgatcaggatccaatctgtactatatattttgaaacatttgtgagatgccaaagagagttcgaacaaggttttgaatcaacaggatctaatctactgctacccctcgaaatggaattggtaggaatggaatgccgtgaacccaggattaggcctcgttagctcgcttactcttagtatagcaggtaaccaaccttcttccctttatggtctagctttgatttcactcagaaaagaagaaaatgataggaccttgattctgtcaaaaagtgagtcattttcctcctcaaaaccctataccccgtaagccatctagcccctttttccattacgtaagcagttcgaagtcttcaatgtattacattccttcatccggggaggttttcatagcctaaacagaatggaaatcataggtctctccgtatgtacctttagcgctcagttcggaagtagatttctttcgttccttcagttgcagcaaggacttatttagctctttctttagtctctatggcttggtgagttgtccaaagccaaggggccctacacttaacaagggagccactctgccagagcttcactctaggcctctcacgtcggtagctatccgtagatcactattggacgatcttcatctttctccgaattatactcttctttctatcttgttgcggggaagttcagtcatatagaaggtctaatcacgagcagttccaatcccagcctgcctaggcatcgaagaaaacatatccatatcccatgttatcgcactcgaaaccatgctagctcatgttgttggtatatcaccttcaaccgcagggccggaggcgcctactaactctgtctcgtcccaggctttcaacagcaggcatgtaaccttcaaaagaagcaattgaggatggaagcaatcgacccggactaatggacctctcccagcaacagcctttgatgatcttcctccgcaaagccgttattccactgcaagtcaagattttccttttgatcgtaatcgggattcgaccaagtcaactgcctttcctgaagcagatgaaacggcagatatttgaaacaaaactaaggaaagtaacattccgagtacaaagtttgactaatttgctcagttgcactgtgaaaaggtaccggaaggaagaatgaaagctaaacagcttggagttcccattccgaacggagagagatagattcaacagaggctttcctaggaaaaagagaggggatatattgaaaagagagcagaaatcccattacaagctgtaaaacagagcttacaacagttgtatcgcagtggacagagtaagcaacattcataagaagaagaaaagggtttttttcctaacaagccagcttgtgtcggcagttagcaacaaatgcatgacaaatccattcgcttggcaggagagacaggatgcaacaggtattccgtagagaaggtataaatctatactattattcaaacaaaacaaagaagttctctcttgactcttggtacctgcctcagctgcacctactcgaaagcaaaggaaacaagaaaagcaaggcagctacggaccaatacttcatacatccttcccggacgagacaagaaagggatcttacagacaggaagcaccacccggaacagcaacaactacaacgacgggtaactcgctggaaaaaagaagtcacaactagatcaagacctaaggagacttcgagcacacatcttccctatcacggctcatactaagaaagactctctagtaatgacagagcagctagccgctcaatcgtgccttacctcagtagatgcatacgcacaacccggaaggcactccttccctacaacttgtttacttaggaatcacagctacgccagcaatctatctcatcaagctacgtagaaccaggagaggagtgactcttaactgtgctctagcaacaagccagctagcccttatagtgcccgaagcgagatcggagtaggaagaccatgagcggaaaggcgttcctcgggactgacgtgactcttccacttgaccgatgaggtgaaggagtgagaactcttactataacagaagagaaaaaacaaacagttcccaaggaagaaacagtgaaacacagcaaacaacccgggaaggatctatacactaataggcctactggcgttcctcgaagtactccgggatatacaccagggcaactttgaaagacaagttagcaaccgtactactggtatgaattgagtattgcagactagtgctaagcccatagcaacaagactgctattatcagatagctaggacttattctacagctctttcacacaagggaacgtatggggatatctaaagagaaagtttatagttctgacttcctgccttaaaagcagattcaaagagacaagatccaattccttcagcctattcacagcggatgaagtaatagcattgtacaattagaacttcatacctttttcttgctttcttgttcttaagccagttacatactttattcgcccgaggggttcctccttttagtcgagtatgtaaacaacctgaaactaatgctttttccctttctagctttccaccattaagacttgttgacttcctacgctattcgattcgctggcatgtccggtctcatacgaaggaaaggctggatggtcagtcactcatgaattccttctcgaatcactactggaatatagcttatagaaagagcagcttgaagcaagtggcaatgctagaagggcatttctttcccgcctacttgagtagcgcgttggatctatgcttaggcagcttaatcgagacttcatatacgtagattgccatgtctgtatccgaacgaaaagaccttcctgatgttcttgccctatttaaaccccgggcaatttccaaaagaagagaaaacaaccacctcggaacaaatatcatgcatacataggaacccggcttcgctaacctttcttacttagtcgtgaaacaactgttcccatcgaacgtagagagatagtcaaatgacaaagaaaggaaatcagacctcggaacgcgctgcacagcacggaacagccattacatcagtgatcggcaaacaaagatagatacttaacagcagctacaagcaacaatagctacacccgcctagggaccactccagaagtaagctgcgattaaccagctcacttccctcattcgatagggaagacaacctgcagggatacatgcatgaacaggaatactgctacgcttacctacctgaccattcatgcaacaacttactcacataccaacaagggatatgaattctactgaagctgcaagcaacaggaactagtgccgcttagctacggtagttcgcaggccgttcttcactacctccatacatgcttcacacagaaacaactgctgtgcatacacagaaacaaggcagctatgcacactaactaaccattcctatcgatagaatacaagtaatggcagataggaaggatagtataaggtagggacagatagatagaataatacgtatataatcagaaggctgcttagaggagtgatctagctctctaacctctaactatcactaaactaaacaaagtggaattgaataagagaaagagattcgttggataagttgagaacaaagtggttcacaggtagctcagatggttagagcaaaggactgtaaatccttgtgttagtggttcgattccacaaccacttctatgcgttcctcggacgctaataacgaagcaaactacagaatctcaaatttatgaaaaatatggttcgactgttgttgcccctgctcggagctttggcaggtagtttttgcgcccgttttctaggatcagaaggaagcgctataatgaccactacgcgcgtttcattctcttcgatcttagtcgtaagcttcctattttgctttcattttcattcctttcgtttgaaagggccgcagaaaaagattatctatctctttttggtcttttccatggggttcgtgggatctttgatccggatcgaagtcatccacctagtggggggtctggctttgcccgtgttgggacctttggtcttgaatgcaataggggggcaagcacttccttctaccggcccttccgggtcgggcagttcttccatgtgggaggaagattcctttgaactgggagttctcgaggaatccgactcccccccggcaggggggtcccgaacggaagagggggaaccctcggtaaatcagggcagtcccctcccgtcccaaacggaagagggggaaccctcggtaaatcaagtgccccaggaagctgggcctgcgcttccagctaatccagtccctcccgggggggaggaagctgggccagtagtcccctatccatacaggagggatgaaatgattgggggggatagcgtagaggcgatagaacgccgccttctggcgaaataccccgaaggctctccctctgcggagatcatagagatggcccgaatagaggccgaagatctattcgagatcaaagcccaaatcatccaacggatggctctatatgacccaaccggcgattggatggcgcgtggggctcgggccctcgataatccgaggaccactagtggggaagagtccttggagcgtctttatgatatatggaaggacctccaagaaaccgggcccctctcggacgagttttctcgtttacaagagaaagtattcctcaagaaaggcggccctggggggggaccctatcgcataaggtctgcaagcctttcgggatgggcttttgcttctttctttatttttcgatatgccgcttcttcgccagcaaggagcgagaaaacaaagtgggctgtaatgatgtcagaatttgcaccaatttctatctatttagtgattagtctgctagtttctttgatcctactcggtgttccttttccatttgcttccaatagttctacctacccagaaaaattgtcggcctacgaatgtggtttcgatccttccggtgatgccagaagtcgtttcgatatacgattttatcttgtttcaattttatttttaatccctgatctggaagtaacctttttctttccttgggcagtacctcccaacaagattgatctgtttggattttggtccatgatggcctttttatttattttgacgattggatttctatatgaatggaaaaggggtgcttcggatcgggagtaaagtgatagggcacaaaatggggggaaaaagaaaggaaagagaataatgcccacgtttaatcaattgattcgtcatggtagagaagaaaaacggcgcacggaccgtactcgagctttggataaatgtccccagaaaacaggagtatgcccgcgtgtttcaacgagaacaccgaaaaaacctaattccgctccacgtaagatagccaaagtacggttgagcaatcgacatgatatatttgctcacatcccgggcgaaggtcataattcgcaggaacattctacggtgttaataagaggaggtagagtgaaagattcgccaggtgtaaaatcccattgtattcgaggagtaaaggatttgatgggaattccgggtcgaagaagaggcagatcaaaatatggtgcagaaaaacccaaatcgatatgaatggaagatgcctctggaactagtatcggtcagtcggtggaacaatcacaacgttacgccccaaaataaaactatatggagccgttacgaatgaccataatggagtctactacactagccaagaaagagtgcatttgactcacttcgcccgtggaggtggcagaggaagcctaaggcatgcccgggctagtgtaactgatctcgctactcaatccatatcgtcagttatatggttgcttcatccaagagagggtaagaaggttcgaaatcatcaatgagagcaggctatcgcttcctccttaccctctcatcgactgctggtagttggctgacttggttgatggctttatgtcatatgtgtgccaagttaggaaggttagaccgactaattgaaaggctttttcgttgagaatagtttgaagttcccttctttgtagcattgtaagttatttccttctttagcttatgaattttttttagggaaaagaatgagaaaagtgacagtggaaggagggaaagctccttattttacccgttctaaaagaagctcgattaagcaggaagatctttggtctcctgttctctagcttagtcagttagtggtatccgtcggtcggttagcagatttgcagatagaaaaggctagccagcctaagctgatcccgaggaaaggggctataggattgcccacgacaagcattggatttattttttgatgatctccgactcctaagtcttccgcgtgccttattccaccctcaaaaaacgattttcgtagtttatcagcccgtcttgcctcacacttctacttcaggagcttgccttgagggtacgatgacgatcttagtccgaataactgcttcagggtgggaatgaatagaaggccggtgctaaacgcccaatgctatttatacgaaaagactgatcgaaccaatgaagtaaggctttttaacactactttcaaaggtagaggcaaaaagcccactttttagcgacatgatagcatgaactcttcccccgatgtaaacatttcctgcctaacagatttgtagacgtccaggaagcttaagatcttaacaagaaagatataaggcgatggcgtcgccaattgcatgaaagaaaggccttttaggggagttggctcgtgtgtggagtgaattcctctgtcctgtgtgcggaaggcatatgaagtagtccagtaaggattcaagtcaggttgtatttggattttgcaactcggaaattatcatagattgatgatcctttccttaccctactgcctatcaacattaaaaatatgcaaaatagcccttatataaatataaccaacccgatctacgagtggatattgccttttttttcatcggcgatctttcatagagttgccgaagccagaaaatctgctaatgcaatccgcagaattacatcagatcaaggtgtggatctatttcgaacaagtgatatccaagaagaagccattcgttacttctccaacctgtttcagttttcaccggtgaaccacactcgagcctctatctcatcccttcgctctcttatcgacttcatcagatgctccaactagatgcaagcgaatcttctgcaacaggttaactacggaggagattccaaattgtcttttcagcatgccgctcgacaaatcccctggctcggatggttttccagctgacttttacagattaacttgggatattgttggcccggactttgttgttcaaactaaaagaaagaacgctaataaaataaaggtccgatctgatgtttacgatttgttgtggttaatcttcccaattgactaagtgcaagttagaacatggtagcttctgattcacggccaatgagactccgcttgcgagctgaactctttttggcatcattcgcagtgagagaagagagcatacgcagtgaagaagggagtggagcttatatttcaaagtatattaaaggtattctaaaatcaagattatcccgacgtgagcagtcacgctggaatataatagatgatacaacttctatggctttctttgaagaatttgcgtctcttaatccagtttttcatactttcttattttacgggaggagagacggagaagatctttcttttcacattgttgggttttttcgtctatcgatacggggttacatattctttttatgggaaagcttttagctaccgaaaaggatccgagcaagctcatcttctagaatcaaatcacatcgaagaaaggtagcactggaagggcagagtactcaatttttttatctttgtgcaagtaatgatcgtgtcagcatcttttggttaactgattcagttaccgatcaatctggccctaggttccctagctccaacgcggaaggactctcatttcgtccagatctttgctttgcggcatctccaactgtaagctctgatggaccaacacttatgcatgcgatttcaagtcttcataaatgaaaaagttcgagtcattacacaagcaaaggatagctataacgagaaaaaggtattttattttgctaatcccaaggggaatgtgaaatgtggaatgaatcaggaaatagccctttgatttatcaaaaatacagaagtagtagtcttcccgggtctcactgttcggataactttccttttaatcctactgcataggcaagatctcatccttcggcgaatcatgtggggctcagaagagtgctccctacgacggtaaatcggggcaaaagaccctttcttcgacgacgtggacacggggagggagcaggcgaagcgtgtcgttcgtaatggaaagaaagagaccactagttcgcctctttgttggaccgccggcgcgaacacagtggtctctgatcaggaccaggaaccaattcgaatttggatcttgacatgttggtggtttttaaccgtaggcatcttgccaggaagttggtgggcttatcatgaattaggtcggggtggctggtggtttcgggatcccgtagaaaatgcttcttttatgcctcgggtattagccacagctcgtattcattctgtaattttaccccttcttcattcttggacctcgtttcttaatattgtgacttttccatgctgtgtctcaggaaccttttcaatacggtccggattgctagctcccgttcatagttttgctacagatgatacacgaggaatctttttatggtggttcttccttctaatgaccggcatatctatgattcttttctaccagatgaagcagcaggcatcggtccgtagaacgtataaaaaagagatggttgtggcgcgaagtactcttgtgcatctacgtcactcggctcgcgcgcaaccccgccccgttatgttatggaagaattgaacttcttgctgggctggttattcagagccagcaattggctgccggatttcgtcctgcaatgaggcagatcgcttcggggggtcactgtggcgtggctgaatgtagagcagtccgcccctacagcgtttgatcagtagattatttagaacttcggaagatggtcaaggtacgaagtgacaagccactgcgctagatgcgcatgtggtcgtagtagtcggctcgtcgctacttttatccaaagaataaggcctacaagctctctgtttggagacagaacaacgttataagttctgagtcgtatgaaaactagcggtttgggggaaatagcgatttatcaataacatagaataaacaagcttgcttggcagactggaagataaaggcaagcagcaacatagagtaccttgacctgctcgctggggacataaggattgacatgtgccgagacagctgtcccgcggattaaggaatccgcaaaggctaatgccataagacgagcaagactaaagaaagagaagatcggtcctcgtccactcggaaagctttttctcatcatagggggacggagacggttagtcagcattccactaccaacgagcagcaaactccttgcgactctaattgagaaaaacccaacaacggccaccctccctaggtgtaagataatagggcttgatgcctagcggcttccttttacgggttgtccgatctcaaaggtttacaccttttaggaatgaatgttccacgagtcgttatgctttgattgtcgtctttcgaatgaaggatttgtctagctaataaacatcatccttcagtccgcgccggcattccagaacgaattcttatcgcttagcacaagcgctaaccctgacaaggccctacatcgcatatgcagttggagtggttagtcgattcatgcaaaatccaaagaaacctcactttcgacgaatattgaggtacatgaaaggaagacttgactatggtcttctgtataagaaaggagaacagtgtaagatagttggctattgtgacgccgactatgctggtgatcacgacacgcgtcgatcaacaactggaaacgtgttcaggcttggtttaggagcagtttgtctttgaaaagtaagcggtgttttagccgtaacccttgttggaagagaataccacgtaggagtgaaaactcccctgctcatctatcttcattccaaaggcgaacatttcaattgagtgactgtaactgctatctatagtttacagtcagtagttcttaaccaaccgcccagctttataaagctttaagagggaatagggagtaagggggaccttcgcttcattatcaaattgacctggaccctctttcttctcctgctgcagattttgccctgcgcggattctggagcttcttctttagtctaggatttcaaataataatcaaatcaaaagaagcggctgggcgagaacaagaagcggtcgtcgtacgccggccggtagctctactaagcgaagaaccgctcgctgccttttcttcgcgaataaccatgtggagtggaggtagcctaggagaagagaagcaagctacccttcgcctacctcccatctataagcggcaatggtaagagctggtaagcatggtaactgtatcggctaaggggtcggcgctccgcgttctatctaggttccgctctgacctttccccacctcacatagaagaaggggaagcccttcaatagaagaacccgtgtgagtgggaggattgaatcattcattcatcggatacgtcttttcccgtgatccatttcatgtcaactctaattagttatcaaaaggcctaccttacaaagggaaacggccgcatcggcccgcttcgtcaccgtcggttcccgcaaccaagcctttctcttattctttctttcagaagggcttgcggttcattacaccaaaggctttcagtgaactattgaagctatcgagagagtaccaaatgctgacggtgacgaaggttaccgactttcggtggacgcggagccaacgagttcagtcgaagagcgtaacgagtctaaggttacagaagcgttcgccaactttgataggtatagcattgcgagcaaatagagagcagagagcttaccctttctttctatgagagtcgcgagcttgttgtagtcggtcctaaagaaccttgctgcttacttgctatattcccgcgttcttgcacggcttgcgcgtaaccccgccctgcttctcccttccccctcccccccttaccgtccaaaactcagaggccgtatggagtatagccaagtggtaaggcaccggtttttggtaccggcatgcaaaggttcgaatccttttactccagattatgaacacccgatcggatctgtcaagaacgagctgacgacggaagctctcattaattagttgatgaggggaagcgactgacagcagtccctgagctaagccttggaaatcttaatgccataatgcctttaaaatcctcctagccattatcctactgcaataattcttgctaagaagaacgcccatgttgtggcaattccacccattaatagtaatggaactctgtgcaaagtttcctccagtaatatgagttaccaccccttgatcacttatactacccctcacactgatcgtacttccggcaaacataactagttcttcgagtaagattgggttgaagcggaaggatattcgctttattagctaaggctgattgaattgctaactgaacttaactagtctaattccattattctgaccctgcaggctttgatcttttttattctcatcgaaatcggaagatttgaaagcggaaagaagattctagccttccttccatattaaaagatcaaggaagacgagcaagaaaacggatgcgcgttagcgcaacggctttcgctaacgttgttcaatccgttgcttgttcccttgacctttcattcacactctgattgacgctacccggtccactcaaagcttgaaggatgaagaggccgacctctgtttttgaacaagttggtcaaggttcgttatcttaagcattcctgttggaacgactagctggaaaggcactaacgctttgccgagttatgatagggggatgaggagaacagacagagatggtcatacagacttctttatcagaccgactgctgatcgccttcaaacgactcttccagtcgctgacctacctcgaggagtgactctttatatggtgtttagctgagggaaagaaggtgttatggcctgcccgagaaggagattaaggctctttttatggcagtggagaagtggatgaggatgaagtgttctcactatggtgattcggtgaagagggcgttaagcctagtgaattcttgttgagatttggtagaccttgcgaatgtagctacttctgactatgttccccctcctaatccttctaccactactgagcataaaactctatctgtatgtgaggatgagtacactaaattccttcagtatcaagcagcaagtaatctgttcctactgcatcgccctacctttctagggccttgagttgggatacggttctagttccaaacccctctattcattcgtttgtagccgtgggtcacattcattcctgctgtttgtcggtagtcttctcggtttatcctatgtaataagaggtaaaagtagtaggagcgagaccgttgtagctagagcagtcaatccctttatcgataaagtggtaatgaagggtctgtagtaagcaaacccagtagctgctcttagtaagaccagtcacagggatatataaaaccagagaaaggctgacttctatttcaactgaaacaggcttggctggaagatcttttattaagtcagactggctagaagcgctatagactgaccgttagaagtcattgatagggatgttgaacactatcaattacttctctttagtaccggtataacatcgactactaaaagtagaagggaagaaaggttatccagccacttcttttggtccgggataggaggcttgttgaatcagacgaaataggacatcggtgccggtactcgattcgaagcatggctggacgccgcactcctggcacctaaaggtgcttttttcgcgtactctttttttgtgatttcccggtagggagggatgtttttagtacagatcttttaagcgaaccactagaaggagtctttgattgaggatcatctgagatggatgagccatctcctttccattgccagtcaagcctgccattcaacaagccctgttgtggtcatcagactttattataaaataagtaacggaaaataatccattgctccgttgactctttcaagcaagggcttccttgtctcagaggccccttcaaccggcttcaaaactcgctattctgctgacgattttagcctttatatatcaccccgaatggagtactcaagttgaaccgggcggacctttggaagggtctgttcgagaacttcacaacttcactctagggccaacctcgaagggtttcctctctttatgaaatagaacagcagccaaccaccgaggttcctcactagatatataggactggtaccttcggtctcttgcgacactccgagcaatgttgccgctctgttcgcttctttttcaatgacggtaacagaccaaccttcaatggcagataattatcaatttgacttaggaggttccgatgcaaaggccacacctgtggttgattgcctccgccacctctctacagtcagtttaaaattccactctcacctgttggtgcttaaactttcagcagcccaaaaaacactcaaaagctccgcttcgaaagcagttgttgttggcataaaggctcttcgtcaagtcgaaccacaccgaggaggcacttgttaaccaccggatggagcaagttcgtgaacaataagaagctaatcgctggtgattctgttgtatttatgaggaaatcggctgatgagatgtttattggtgtaaggcgagcaccaatctctagtaacgtcggaggaacaagcttctacggcggagatgagtactgtagttattatcagagcaatggaggcgttgctaaggaagacgacggaagtgcgaagaaggggtttaggaggactgggaaagggaaattgacggctgaagctgtctctgaggcgattaatagagcagctcagggtttgccgtttgaggtggtttattatcctacggctggatggtcggactttgtggtgaaggcagaagatgttgaggcttccatggctatattctggactcctggtactagagtgaagatggccatggagactaaggactcttcgcggattacttggtttcaggggattgtcttctatacatatcaggaaactggtccatggcgtggatctccttggaaacagcttcaggtataagatccccttcactattcccttaatattcctctgatgttgagctgatgggaaaatatataaatctggttattcgaatgctaatttgggtttggaatgtgaggttccagttgtgtcaagtttggattgctgtgttggggggattcgtggtttgaaatcgaaatatgttgattggaagcagtattagttagttcattttcaaatgaatgccatatcccttagttttgttgtttgagattcatcttcaacaaagatacattggaaaaagaagtcggaagatcttggtcttagtattgtttgtgttgcactcagatacagtaaatcgctacaatctctcttctctcttctcctatccctccgcttgcttccgttttcaatctctcctttctctcagacattacggtctctttctctctctctctttctgagcggtgatcatgctctgtacattctagtatatgttgatgatcttagaatcacatggtccaatcctcttcatattgatgacatagtatgcatcaaaaatgccatcttttctataaagtatctggctcaatcttggtcaaaaagtgagtagaacttctgcttctatctttctcaaaacattactgatctattggtcaaggctggcatggaaataacctctcccttctcccatagtcacttctgggtcctctttgtctgctctgctgttgtaagttccactttgctgctaatcctcatctctatcgtagctagagcattcttggtggttgctagcataaccagacctgacatagcttactcagtgaactttcacaatttctgatgagaccttagatagaaaagaaggtttagattaaagtttctattccttcctattaaacgctttcaaaagattgttgagatatcttctctgaattgtctgcacttgacaccttcctctcaacttgctcttgttttagtgatgctgattggccttcgtgggaatttatagatcactctcaggatattggctttttcttgggagatcctacgggaaaagaaggaaagaagtcaaaataagagagtaagagcctaggttagaagtcagtttcagttctcttaggtctctttccacatatacaaactgagagttcagtctcatatagcatgaggggacatggcttggtaatcgattcaaattggacatagataatctttcaatttctcatattatatatgataatataggcgtggaaaatttattggggttataaaaaaaaaaagaatcctcgtctttacagtcttatcaattgtgataagaaagcgctcttagttcagttcggtagaacgtgggtctccaaaacccaatgtcgtaggttcaaatcctacagagcgtgattccgttgctcttgttaggtcgaaaattagactgaactcaaataattgaacagtaatctgaatttgatctctcgccagaattgatttaaccaatagacatatatattatctttcttacttctgaccagtggtgctctatacatattggtgaatttagatatgaaaatgaaatctcctttatttagaggaccactggtcaacagttccacagaaaatccaattcatatcctaacgcgagagaaattgagacatcagaccagtggtacaaactcaacagagaaagtaatactacctaatatacttcatagttatatcaaaaacctaaacttagatttcacatcaccatatggatcaactggtaataatgaagtattaagcatacttcgtagtaggtttaaacaaagcattttcccatcatctggattaaagtgtttggatactactggtgattttctcatcaaaaatgttttacataaaagatatgaaagtgttcagaagaatatctcaaatgcattatcatcctccataaattctcgcactgcagtcttcttttgtatactgttcagtataacagtgttaatggaaatagctcctggacctcttttgaagaaaccttcattattattttcagataatttaccaaatgtattgcaatatacacgagatgtgtatgtgaatcatgtttgtataatacacaaaagtttaagtccatgtgagtgcgaggagcctctcaatcaaattattagagatatgtttccgcaaaccacttttgacccacttgaactacagaaaccttcacccagtaaagtgaaaactataacctacatgcttggtactattcttcttgtaattacattaatggataagactggatacactcaattagttaaaatgtagatagaatgaaatacacattaacctccttctccatttactgttctttgattctaacctccttctccatttcccgttctgtcctagttctttgtttctaacattcttagcttaccgagataagcaattccctacctagaaaaagatgatcaaaggcattgaggatcaagctatccttcttttgctgttgaattgaattgaattatgttttggtaaggacatcagtattgatcctcgtctgatatagagactttcaggttttctagatcagctattatcctttgaaactcattaacgtcctcaaactaaggaaagaagtgctcagtgagctttaaatgattgaattggactttcggtcagaagtgagcctaagctttgttgtgagctgtctcgtttccctgtactcgcattcgcttacatcaaaccaatcaagctaggattcttgtgggattgactcctggtaaggaaccgtctttacatctctaacttgttggctcgttaggaagggaagttaaagcttgcctgtaaggggaaggcaagctctctaagcaagctgttttcatgcctatactagctttctttgtttgacaggttgggggaatacccaattcaaagagatcaagcttacactgcacagatttgaccttattaagaaagtttccgggaaggggtagaagatgctagatgtttccctagggtcttgactagttcctacttccttgcttccagtgtagaaggtgtagctggcatactggagtcaatatcttagttcagttgttgcctccggttgtcatactggaatgagtcaatatcttagtatcgtctgtaatgtggaagaagtagctagatgtcttccctgtggttctctgctagtggatacttctctctagcggtgtatcgggtgttggcacttcggttgttgccagtcctgtcatttcctagaatatgtgttagtataggctggaatatgtaagtattgtctagaagttccctgttggtcccttactagtctgctcttctttgttccagtgagttctgtcatgaagtgtagctcatgttaggattacccgggaagcgagcttgtcgacgacgacgggtaagccgtgtgagcggttaagggttgcttgttgctcagctgtctttagtcaatatcttatgaatgttccggtccagggaataatgtgaatgtagctagagtgttcctaaggtgcgtgcatactagggcttcttcctctagttaccgttgtagctgaaccagcacttgcagctgtatattctgggcgaggagcgtaagcgacatggcatatttgtgaaagaatctcccttctcttcgttcggactagccatgaataaccagttggttgcttccagtggaggaacccctgttcatgcatggcggggcccgggatcccttgctgctgcggtaaaagagtcttccttcttctgggcggaatgtgtatgagtaggcgtgaagtaggcgaagcagtcctcccgttgatacgtgggataggagaaggggtctaccactttatatcactaagttccccctctccgtcttgcaggtattgtttctgggttgtgtctgcttcccgctgtgcagcttccacttcctttctttgttctctgggaataagtagcatgaagagttcatctgttgtccgtaggtccctggctgagttatcatgtgtagctaagtacgatctgcgttctgctgtcagttaataatctcctcctctctttgttcggatgggaactattgtatctgttgttaacccttgtatctggctacgccgcccttagaagcagagtagccagtccagtaggtgtagttagttatctgttcaagtaggtaggaggaacccagcttctcctatctcataggaggaacccgtagaatcaatatcttttctttctttccacagaaggtcagcggtcatactcttcgtactgttgttagctgttcctgttccagacgaagtaaggtagccggctcagtctcttactcggagaggaacgcctactactcgactaataggagaggaacgcctactactcgactaataggagaggaacgcctttgacttctttctctttcgaaaaaaaggaatgtagttagcctaatcactgggatgatgattggatcagtttagctactctgttaaggtctacatcaggaggttcaactaagcccgcaggtatatttggcaggcacctgaagcgagttgactctagctaggaagttcttctctggcctgtcacctgagttagaggctaggctccgaagccttcagttctttagtctccctgagagttgttagagaaggcagcattggtcgagagagtgtgagcgaagcgtagtagcgctgctataccgagaaaagtaatcaaacctaaatctaggaaatacagctgggtgtgctcatgttggctaggtagcagggccagacaatccctttactttcactttcgtgtgtgcgtactattaagagttacgtgtgtgcgtactattaagagttaggagtataccagcacagagagaggagtgtgcttcaggtagagcacagaggaggataacagttaggagagttaggaaggagtaacccagcactgtgctagagaaagcagaggagtaccgagaaaaagcagcagtgtgctgtacagagaacagaggaaaaaaaagttcgcagcaaaagataaaacagagacggaaccttccccccttcatgctgtacaaaagcggccagcacaaggtcaaggcgaagacggagcagcactacctggagatgatcctggcgaagaacgaaccattaccattctaaggagggggaagcactactatatatctctttcttaagaagctatttctaagttccactttccattaaccgaagtctaatgatcgcctggcattagcgccatcctaccgtctcgtttatgagcttgcatcttgtacttctcctgcctctgaaggaccggaccaatgatagaccatgggaaacaggaaattgaccaatgatagttactcggaaactgggaataggttcggggtctagctatttaccatagtaagctatccttaagggcttcgatcggtccatatcaagaaagtcattccgcttacggctagcgagcactttcttttggtgaatatccggcgaatgaaataaccattgtaaaagctagagatgaatgcccagcactctcggactgatcatcttgctgcaagaaagcttcaggtcattgctggttcgtatgatccagcttccagtacaaaggcaatgtactaagaaagccaaacttggacaggggcccttacgtatctaagacatagttcgtggcatacgatcgaagaaagctgggcggaaagctcggacaccaacctcaaaaggcggtgttgaccctgttacagtacagggaagatccgtttagccaaaacgagaagatcttccatagtctagttagggggtggatttttttcattcctcaatgggtgctgcttttgactgctatctcgtatcgatctagtattgcggcttacgctagattgacacctttccttgaatacgaataaacgtgagagccaaccccataggtatgacccaggagggccaaaagtggcatttcttgcttcttaaaaagctgattgtgaagagggtctgccctttgaatctcctcgagccgggtctagtcagtctttttccctcgccctggggaatcgtagctctgtctctgcctattatgctggtacctaagaaggaatggggcgaccgaccccatgttactaatcgaaaacgttcgtttcgagacccccatgtgtcctttgatgctgactgagctaccgaagcgatgttcgttaggattgcaagacacgtcgttttagtcgggcaatatccgatgtcggaagaacaagaactgaataggctcgcagacctggtaccttaaagtcttcaccgtttgagaacacccgaatccgagtggcttagcaagagactctaagacagatcatccgcgccggaatcccctaacttcatttttggtattcccttttcgggttctagagtcgacaagcccataagacgataccgatgcccagagaccgaacacagacttatctttcccatatggctctataagacatccatggaatctttccacccccaacatctctattctttctattccgaatggcgcccagtatttttaagtatggttgtatacttttcctgcctggaactcctgaattaattctttttctataggaaggaactcaagcaatccggcatccccggcagctatgcaattacttaattcagtctacaataatttggtgtccgattttcggctagtggacagctataccaataatcctgtatacagctgtataatattttttataaaggattatcggtgagcaagaattaaaatgtagttttgagtttcgttagttaacctacctttttcttttggtggtgagtttccttttagggggttacgagcctttagcattcagattgggcaatgcgagatagattgatttacatttacctcgaggatagtctttcttttccaagcgcgctttcccaacctgccatatgtccgatacatagtcgagggctctatacgagcgcctttctttcaactctatctattcttgcttttcaaacattgtattccttatagaatatcatctcatgtctatctatagtataacgtttctcatagtggcatagcggctccgaggtgattctttctggtatccgtcctctctcatactgctttaaggttggaggatttagttcaagctagtctcctatggtgaagatctctatatttgttaagactgtatgaaagaaatcacatatagtaatcatctaagaatatatctatactataatggttgcatctaacatttctcatagtgtagataaggcagtccccggagctaagaaaactacgctattcaaagcaatccgcccaaggaaggctagctagtcgagtctaatgctaggctaggtgattcctctctatcaatgaccgaagcttaatccagagagagagctcactataccaccaggttgccacatttgcttatgaaacaagaacagcttatcccgaggctctgaaagactgagggtagtcactcaaaaagtaatccgtcacttcgcccgaaaagcactataggggattccggccaagcgagcataaaaatacaatacccaactttctgtttcagcccactccacttcattgaccgagactttctatttcgaaccggttcggttaaagacctagccacgagaccaactccgggctgtctcgtaaaagatcaattcccagatgctcttactcgacgcccacaggcaagcttgtttagagaaggagagttctcttcatcagggaaactgctcaacctccactatttccataagcatgattatgcactagcagacataaagtgccaagaagagaaaacgcataactcataagccaaagatgtattcgatcctgaattgaacgtaattttttccgattggttggaaggtaaggatagcatgattgactggttgcgggtcccttggatcatgggccacagctatttggatagattcagatcctttcatgtagtagagtctttgatgggctcggatccttttcatgatttcatgtgaggacacctttggcgggcttttttgatagatccaggatttctgtgcgatatcgatcttctctttatggctttggttaatctatcgtctagctgtcttggtcttccgaaaaggcgaagacaaacgcatggatttactttattctatgactaaaccagaatcaccccggagtgagctgttccataaggggctcatattatccgacagagcagagctatcatgccgaagaagcctttttctttctacgccccggtggcatcttgactttcctaggtctctaatagttccccataaaagagtcaatgggctgagctgatcgagtcccattttctggctgcaaggcccggcccgagtagtcaatggttgctaccgctcactgcgcttctctgtaccatttcatttctagtcaaaatggatgctgggcatatctactgacccgacaagctgacgtaattctatccatccgtagctgtctgtgccgctacctctatccagcagatccagtgccaaccgatctatatctagctttggccggccgggccaacccacctatacagagttgatgccatgcccgcctaaccacgaaagaaagcatccaatatttcaagactttctccacagagctctaaaatcctttctccgaagatccaggctcactttttcaggcaatggaatgacccgagcaaaggaaagggatcaaggcaataactacgcgcatcaaggtgatacctagaccgagcgaatctgaccgtagcctatcatactgagtgaaagcgtgccgaaccaagggaacttgcctttaatcttaggctcgcagctactaggtgcgtacccttgaacctagcccgccctagggtacaggcattgaaagacggctttcagaataggcttttttgtacgaagagaaggttacactactatataagataagtaattcattataagataagtaattcattgtgctaaaagaaccactttgaggatcaatcccttactgaatgaatgtccttttgatcagtgatcacagaaggagaaggcactgtgaatgagaacctctttcctttctggctaccaaacgtgctaataaaagagcttattctgagtttgaattcctcgaattctgtaagctagcttggtctacctgctttgttctgatttcattgtattcctccgtattcagcattcgcgccggtgtcacaaaaagcaaaagcatatcaattcgttgaggcaactagtcttggtaaggttttttccactgaatgagaagtttgtatgatccagatgttttgaaggcgtgtttgcccctgtgatacgcgtacgaggagtcgacggggaagagccgtgctggggttggaagaggttccagctttagaggagcctccctatcttatcccttgttggtcttatttgacagctcagctttgtctcgggcagattttggtccatgatggactctttttatttattttgacgattggatttctatatgaatggaaaaggggtgcttcggatcgggagtaaagtgatagggcacaaaatggggggaaaaagaaaggaaagagaataatgcccacgtttaatcaattgattcgtcatggtagagaagaaaaacggcgcacggaccgtactgaagttttggtctttggtttgctggttacacgtattatccgttttgtacattctgttttgtttcccatcccagtcttttgcagcataaaagtccttttagattccttttgttcgcttcctattataaacaaactttccaaaaaatggcaactgatttggttttatgttatttcagttattctctgtaaatctttatttgctgtaggatacttgtggatggacgacttaagtcgtgccatttctcagttctacccggtggtatccggaggactaggaggaggaaatacgccaatgcccccgacaaatccatctgagggtggtcttttagaaggatattatgctcatgagaatgagcactctcacgatcagcagaggggttcacctttctggtcgaaagagtacaaggaaagtggctcaaaacgccttttcttgaacctcgaggtagaggatcaaaacacagataccatcggggagcaagtaaaagcagagagtgataaatgcgaaaaaatcaaggcaaaaataatagcaaaaacacatgaactcttagtatccgaaggttaccatattccggatgaacgggatatagaacgagcaataaatgttgtgatgactgaacatgaaatgatcgatatcgatcggcgtaagaaaagattctactatctttattcccggttaggaaaaaacggagacaagttttgggtggagctactggaattgctgtctgactacgacataaataaaagcgattccgacgactaaaccgccatttcaggtttacgtcttttgttaggtctcgacttcttcgctatgatcttcccggtagttcatataggagctatagccgtttcattccttttcgttgttatgatgttccatattcaaatagcggagattcacgaagaagtattgcgctatttaccagtgagtgggattattggactgatcttttggtggtgagtttccttttttctttttttcgctatgcgccgctccgccagcaaggagtgccacgcacaagcagagcgaaaacaaacaaagcaggggagggggaattattcgttgggggaaatcctttgattgcgtattatagatccatgtctttcttgttccactagctaggacaaaatttgcacatgtccgtttcgttattacaaccttcttttttgatgtcaaagaccagaagctacgcgcaaattctcattgggtcttggttgttcttaacagcgatggctattcatttaagtcttggggtagcaccactagatcttcaacaaggtggaaattctcgtattctctatgtacatgttcctgcggctcggatgagtattattgtttatatcgccacggctataaacactttcttgttcctattaacaaaacatcccctttatcttcgctcttccggaaccggtatagaaatgggtgctttttttacgttgtttaccttagttactggggggtttcggggaagaccaatgtgggggaccttttgggtgtgggatgctcgtttgacctctgtattcatctcgtttcttatttacctgggtgcactgcgttttcaaaagcttcctgtcgaaccggcttctatttcaattcgtgctggaccgatcgatataccaataataaagtcttcagtcaactggtggaatacatcgcatcaacctgggagcattagccgatctggtacatcaatacatgttcctatgcccattccaatcttgtctaactttgctaacttccccttctcaacccgtatcttgtttgttctggaaacacgtcttcctattccatcttttctcgaatctcctataacggaagaaattgaagctcgagaaggaataccaaaacctagttcactcgctctctttgcatccatggctgaatggttaaagcgcccaacctaataaagaggcaagtaggttcgattcctgctggatgcacttggaacgttcagttcaatcgcagctcacagaatctaaagagatagctcgcccttatagcttatggggcatttcactcgctcaacactcgttcaaaacatccactcgttcaacaggaaagaaaaggtccaaaggatctacttctcaggatggaaagaagcaagaaagtctagagagtcgaaatgaccttggtccaaccatagtaggactgattcggaagattctatcctattcttctaaaaaggagttctctaatttaactggacttgaaagcggtggatcaagcccccctttttctttggctgtgtccaagtgaagtgaaactcgggaatgaagcagataggtctcagtcgaagaaaggtagccctattgggtctgggattgcttacctttctttccttctacagtacgccttaggttattctaaacctccactctcagtctacttttgaatcgattgccttacctataccgaccctactcaacaggggccgtgaactatgaaaagcctgccaggcagagaaaaaagtgcaaaagcgattgaacaaagtcgctccggtttggatgcagatgagggagagggtgaaagctttcatttaaaggtaaagggaagggaggaggacaagtagatcttatcctgcgtgcagtaagtatgaagaagagagccaggtcactagctaggtaagggtctacgattgctctgcctaccataaataattttaattgagcctatactctttggaaattactgaaagagaggcctaggattgctcacagatctgcttaaaggaacttaagataagtgctggacatgctttgttgaggggctcaaccaatcaatagcttcgcttacttccccagagtcttttgcctacttattgaccactgactcctagatcagctaacgactcttttgaaagcatacagatccccaatgacaatatcgtcacccgtgggattgggggctatgagttgaactatgcctgcaatccgttgacatgggtactattcttcagggactatcccacatcgacgacaactactctcttttctgtaaaagattgctgcttaaaaagaagtctgactcttcttatatcaatcccccttccttctggaatacgacagctactactttgattgaaaaattagaacgactgctgatgtgtaagcgggaggcatactttgatgtatcaagcgctacgcactaacttctgcgtccttcttcagacagaatatccttgctcccatctattggaaaatccactcagagactcaatagttgataatagttgaatagctcctccggtagccggactgtcattcccacttttttctgaccttccggttctgaatccgtaggacacttctctgttctcatgtatacctacacgagatctcgaacttgaaacgaaacatcactctcctctttattttacctttctctctatccaggggccaaactcacactttcaggagctatagcatacatggagccagcagggagagccttcttgaatagcaaaagccttaagcttcagactagttctaaccccgatccttcttcggcggatctgtccttgcctctttcctgatacaaaaacttgcttttcattttatatagatggaaaagttagcaatcctattttccttcgtaagagcacatcttacatcgcaaactttctctttatataccgacgatttctatcaaaatggcatcaatctcacaatgtggtttgagcaattctatgaccagcaaagactagaattcccttgtcatgaggtagtcttaggttcatgaatttttcgggattaaacaatgctaacttccttgctactagctgcttcttaaagtgtgtttgacacccaccagatccaatgaaactcacaagcttatcttcgtcagtggagttaacttgatcaatccacaacctcaaaactatacccatcagctttaccaacaacaaccaatccgtaagtaattctagagactgcccttgtagctttatctagttctggttgaacgagaactttataattaagcctactaatcatacctccaaccccccaacacagggaaaattctggggttccaaagctggcaggctaggttcccgtttcttcctcttcttaaccttctttcccttcacagctctaatgcctcgccagagctctttgacgaactcacttttcagcacaagttcttccaggatcaaaggatgccaaaaatcagatcttattaacttcctcgtggctgatctcgttggtcccatcttctccgcttgtttcagctgcaagcggaaacgtgtttatgaggaagatccttgacaatctaagatccttaccgtcttcctgattccctgtaaacccaattcatgaagctctcccattagcttcagaactctatcacgactgtaaaccttccctacccagtcccactgagcttgttcaggcgataatccacccggctcccacacatggttagctcgtccaggatcgcaaggtcgttcactcgctacacgagcgctcttcagcgacatactatcgtaaccaagatcaagcagaaattcccatgtccgaggtctagaacacaagggcaaagtaggagatcggaaacgcataccatatctcgcagaaggtcgtgtagagccatcgctagatctaaccttggacgagtgagctctgtcacgcttccctggttttcttgcccgagccctgcggtagttgcgcttgccaagaaaccttttcggaccgcgagatcgtcttgcccgaggagtcgcaaaagctccagatgcaggaaatcccttctgagttggaccgctcaccacctgctcgatgaatttcccaagcgacggatctgggtcttcctcagcttcaggatcggcggatctcttcatcgtcgtcatgcgatggaaaaaaacatctgctccacccgagcgagaatccgcctgatcagcgctatatcgttactatccaaacccattgtcgaaatcgtcgttggatacccacagtcagaagaccgaaggctctgataccatctgataagacccgagatggatcttctcggtagaatagagaaagagatgaaaatatagaagaaattgggagaaagcttggctgattcgagacgccactcttccatctttacatagcagcccctcttttttccgtataaccagattccaggttctttccctatcgggcttgttgtaacacagttcttaactccggatcagcttcaacttgagatagtaattctgctgcatcgaaagagggaggaggtgcgaatacaagttccaacagacgctcaggttgcactcgtcttgacaacgcatcagcagccttattttcagttcccggcttatactcaatgagaaaatcgaagcctaacagtttggtagcccatcctctgttgttccttggtgacaaacctttgttccagcaagtgctttagactcttctggtctgtgcgtatcgtgaaacgttgccctgatgtctccaacgttggactgccaagactattgctaagagctctcgttcgtacactgatttcaagctccccttttcagaaaacccttggctgagatacgcaacaggcctgttcccttgtaataaaacagctccaattccatttcccgacgcgggtcacaaaaggtagcttcaaatctggcaaggctagaacaggaagcgtcgtcactgctcctttgagagccttgaaagctagtgctgccatttctgtccattttaaactgttctttttgagtaactcggtcaacggtctcacaattttcccataattcttaacgaatctcctgtagtaccccgtcaagcccaagaagcctcgcaattctgttgtgttctttggttctggccaacccaccattgcttctaacttagctggatcagctgacaccccttcgcccgatataatatgtctatgtcccaaatatgcaatctgtggttgtccaaaagcacacttctttctgtttgcataaaactggtgttgttcccaaatctggagcaccattcccaagtgattcatgtgttcctccgtgcccttgctatagactagtatgtcatcaaaaaataccaacacaaacttccctgcggaaaatatcgttcatcacggattggaatgttgctggtgcgttggtaagcccaaatggcatgaccaggaactcatagtgcccttcgtgagttcgaaaggcagttttcttcacgtctgtggctcgtacacgtatttggtggtacccggatttgagatcgagtttggagaatacagaagctccttgtaactcatccaacagttcctcgatcacgggaattgggtacctgtctggtaccgtgagcttgtaaaaggctcggtaatccacgcgccgtaggccatcctccgtccttcttttggacgagcaaaactggacttgaatatggactgatgctcggctggatgatccgtgcttctaacatctccctaaccaatttttcaatctcgtccttctgagtatatgtataccggtaaggacggatgttaactggttctgctccttccttaaggttgatagcatgttccctgccacattttgggggtaatccttgcggcatctcaaacacgttttcatgccattccaacaactgtttcacttgagcatcctcaggaaaattttgagtcttaattcctcctgcaaaacagtgcggtgagctctaggagataataagccttccttccctctttgactaccgaattgagagagatttgagctcgcaccagtgacggatcgcctgctaaggtgacccactgatcttccctacggaaactcaaggtgtgtcttccccaattcattctggtgtcacccagagtagccaaccacgcataacccagcactatatccatggttacaggaagaagtccgcacgtatctgcacatcttggaccgttagctctactccgctgcatttcccggcacttggaacgacttgaccatttccaatagaaaccccaaatccacgagtttctgtgatttgcagaccacaccgatgtgctacactctctgctatgaaattgcttgtagcccctgaatcaattaaaacaatgacttcttgtcctgcaatttgtcctctcatcctcatggatctctcagttgttaaacctgccatcgaccgcaaagacaaccagagtaattcctttacttcatcctcatctgattcttctatctttttccctgtttcagcttcatcagcctcatccaactcatctccttcatccacagccatatactttaattctctgcccttacatctgtgaccaggattccacttgtcaccacaacgaaaacaaagccccttgctctttctatcctgatcaaacggtttccggtatggttccattttacgttctggggatcgggcgggcccggtgaagaagcattggatcccagagatggaatgggaaatggagatgttgaagaggcgggttgattagttctggttggagggctacgaactccttctcattgttccgctcctcttctcttctttaatggttgaccaggcactgaaggtcgatcatctgtgttcacctggtatggatataattgaagagtggaggtaaagggctcctgtcatccggcaatgcaagacccactccagatcgatgcctcttggtcagaccatttccgtatactgagattgacgacatagcgagaacaccgagatcattccgtaagagggtattgcagtggttattgaattgtcaacaatcctctcttcacatttgctagaaagaattttgagggcttctttggagagtgaatagctattctttttctcacatctcgatttccgccttctttggaaagataagagactttgctgctctcctcccaccttcaactaaggtagtcgcttagctaactaaaaaagcatcctctaacgagcacaccactgtatattttttttatttagataccctcaaagcaaaggtgaggaatagggctagctaacaagtaaacgagagacgtaagtgaacgaagttggcatcttctagctaagcaagcaaataaacaacttctctttgttgcgaagtgagccaggtaagcaaggaagtaatagaaagactctcaagtgtagctctatctaaacgcttcagcaaacccttgcgagcccaagtcaacttcggaccaacgaacttcatgtcatagagactagaggaatggaaccaactcaaacgacacggccgattaccactagctgagccaccccggctatctgaactacacagaatggaatgaaagtccccccacctattagccaaggatcagatatcatagatgccaagctactcaactgctcccagagagcacgccgcaaagtagcattaggactagcatagactgccgttacccaggacagaaaagcattattccgataaacactaaaatgaacatactggcgatgaacaatcttcacctccaactcagctttccaaagaagccaaatccccccagaaaaccctctatctccaagcccctttactaggttgggcaagcttggatgcccttactcccacaacaagttgctggtcgggatcgtgaaactctcgctcgaaaagtaagctggtccttgtttggtcataaggataatcgttcttattaggttaggggcggccggtccgggggttacccgcgattggtaatggcataagcagaagagggatagggggacaaggttacgcgctgggtagcgcagcgcatctgtttcgggtacagaggcgacgagggcgaagcaggccacccaacccaacaggtcagggttgggccggccataggttcgaatcctgccacctttcttgtggatcatcctgtggttaccggatgatgggaataacgaagcagaaatcttgaaatgagcacgaaatgtcaatatcaatatatgaattctttcattattcgttatttccgggtcttttcgttgcattcacttacaacaagaaacaaccaccagcgtttggtgcagcacctgcattttggtgcattcttctttctttccttggtctttcgttctgtcatattcctaataacttatccaattacaacgtattaaccgctaatgcacctttcttttatcaaatctcaggaacatggtctaatcatgagggtagtattttattatggtgtcggatcccaaatttttatggattttttctttgttaccggggtcgaccccagagccataatgtcttaaaacaaggaggccatagggaaagtcttttttttttttttgtctcgaacttcgtgaagaactcaattttatctctccctcgttacgaacaagaaagtggtttgaaaaaccagttgtacactcccttcgttctacgaacccttgttgattctgaacttcgttcgcgaaggaaccggacttttgacggaccagcccttttttatgcgccgctttatcctgaaaggaaaattaaaaatcctctggacgcttggcgctcccgtggttcgcgagaaggaaaaaggactcatcctttgttgcatctggcacgagatgataaagagagagcttcgtctatcgatgaacagcgaattgacggagctcttggcattgctttgtttttctctcctttcctatcagcgagttccgatccttttgttcgaaatttctttgtttgtaccgaaccgcttgcagaatcaaatcctgttccacaagatcctatatcagctatacatcctccttgcatttatgccggggacgtcgccagtgcggagggctttggcttatgtagatcaaaaatgatgaatgggattgtggcactccactcgccgccaatgcggaaggatgccgccgaaaagaatggaacgctgcttcgctctgctggatgcgtcggatcccgtataacaagcgagctttttaccctaaaattcaaacatgtgggcgcaaaatgctatcctgctctattgttacgtagcaatagaagcccgctcatgctgcttcggcggcgctttttcgccttctcttcgttctgggcaggagcgagaagccactcgactaaaaggtactgacgtaactctcaactaaaaaaaggagaggaaccctaatgactcgactaaaaggagaggaaccctaatgactcgactaaaaggagaggaaccctaatgactcgactaaaaggagaggaaccctagtgactcgactgaaaaggagaggataggagcgctagtggacacggggagggaaagaagactggaaccgtgcatctttgcttagcatggttcgacaaaagaaagaggtggaaaatggaccgagaaaataatgctttgtgaacccaattgctttgacaaaaatatatgaagaatcagtgctattgaggaacattttatagaaagaaaagaaaaagaagcaatagtaaagagagaagaaagcaagacttagaaagaagacaataagtaagagaactacgatttacttgattcccaaaggggtacgtaggcagccaaggacgaatcctggtccagttctttgctagtaagtgaggaaaatatatcacactttttttgaaaaaagttcgtagttaatctacctcggacgtacccatggcgtgtggggttcgcgtggggaaccgagtaaccaaagtcacgatcagtctaaggttgaaatctggatggtctttttgccagacgcgctggttcgagtccagctcgtgacaaaaggctaccctttctcttaagagaatatcgatatcctcaaaaatgagaaatggaaagcagcttcacatcacaagtgaggaagccaccggtgatcagctcaatgatcgtatacgctcaatagaatatgtacgcgcgggcgaaagaattaatgctgcttctgcccgcccctgcttctaagcctttgtcaccctcgccgcctattcattggattaaaggagcggtctgtataacatgagagaggaaacactagacgggaggatcaatttatagcacatgacagtagcatgacggaaggaatgacaagactaagcgaaatgccacctgaaaggacgaaaagaagagactgaagcaaaagccgaaaagaaaagcgtgactggactgaaggaatggagggaagctcttattaacggccaaagctaaactccgcttagcctggacagggacaaccaaagcaggaacttagagactcctagtaatacatcatacctactaaatcagtctattggggctataggtgttcccccggggaaaataaccaatggagttgattacgttgtgagtaaccgaggaaaggcgtaacattccatagttaagggtcgttcattagccctactagtcaagcacgggaagctaactttctatcaacaaagctagcggggtttccgggccttgttttggtccaatgtgaaaagctacatccgaggaatcgtatgattcagatacctgacgaaataaagagagaaaagatcgggatagctgggatgacctatttcaagatcagatgatccaccagcttgtctgcttgtgaggttgaggatttgactgttatgatctcttggcccgtgcctccgtagtgtagtgtaagttcttagaccaagattcgaaaccttgtctttcccgcttcccttcgcaggaaattttttacagaaagtagcgacactgataccttagaactaacaagtaccaggcctagaccggggagtcggaactaataacagcttttataaactccaaatccaactcttccaactccaagttgaacgcaggaaactctacctacaaccctcaattccggaggttggcagctcatcaactacgagaaaaatgtgatcgcaatcaagcacataacattgaatctcgtgcaagacattctttagctaagtctatagcagctgattcaatagcggatgtggtcttgttgaaggctttttgacttctattgagagcaaagtccttacttaccagaccgggctacttgaataagcagaaagaaaaaatgtcacgaacccaactcctaggtcactaggaagaagaatggagggaaatagaagaggtcctgtaaagaagctttcattcgatgcttctgattcaactcccagacaaacaaggaagtatgcgcgaagatagggttagtccctgcggcaggcattatccgggaacgattatccaggaacttacagaaggttggcgtgacacgcctaaatccacaacgcttcaggcgaagagatatatctttccgctttagcggcttgaacccttcgatcaagagataccttaaataaaatcaactaagtagctgacctcttagacgttcgtgggtattcaaattcatacataatcttctccgacatgagatagagtgagagggcctggcctattccatagaacaaactcagcaaatcttgatccgtattccacctcagatggtagaaggggcaactcagccttgtctttttctttgggctaggaacccaggagaatgttcaaagcgataagagaacaggtcttttcagagaagctcttgccgctcttctgttagagctctttagtcccattcctaacaacaggggactagctacagggaacaagggaacaagggaacaagctacacaggcactagcaactgggaacaagggaaacaccaactcccaacttccctagcccaaccttctcaacttccctagcttgcctggcccaaccttcccttcctttcctcacatccctaaccaactgacctaatccaccttcccctaacccaccttcttctttactaaacagagaaccagacccaccttcctctccatgttcttctacttccctctcaaataccgctttcttcatctacagttcttccactacctcaaaaccactcctctcaccccatgcttaccagatcaaaggctggcataaacaaactaaatcccaagtatagtctcactattactaccactattaaaaaagaaccaaaatctgttatttttgcccttaaggatccaggatggtgtcaagcaatgcaggaagaacttgatgctctctctcggaacaagacttggatacttgttccacctccagttaatcagaatattcttggttgtaaatgggtcttcaaaaccaaattacattctgatggtactcttgatcgcctaaaggctcgcttggttgctaaagggtttcatcaagaagaaggtatttactttgttgagacctacagtccggttgtgaggacagccactattcgtactatcttgaatgttgcacaacagttagaggttggccaatcaatcaattggatgttcaaaatgcatttctccatgggtatcttcaagaaaaagtttatatgcatcaatctcctggttttacgaatcctattcatccatcccatgtgtgtctgttgaaaaaggctctctacggattgaaacaggcgcctcgtgcttggttcgacaagtttagcgattttcgattttcttctggagtttgggtttgtctgcagctcagctgatccttctctgttcacgtatcacaacaattctgatgtcatgtatctgcttctctacgtggatgatattcttctcacgggcagttccaacactctgctcaatatgttgatctttcagctcagctccaccttctcaatgaaagaccttggaccagtccactattttctgggaattcagatcaaaactcatccttcgggtctgtttctatcccaaaccaagtatgctgaacagattctgaacaatgcagggatgttagattgcaaacctatgtctactcctctgccccttaagctcaactcctctgtttccactgctaagtatccggatccttcagactttcgcagcattgtaggtgctctccaatacttaactctcactcgaccagacataagttatgccgtgaacattgtctgtcagcgaatgcatgagcctacactcgctgattttgatctcctgaagcgtgtccttcgctatgttaaaggcaccatctttcatgggctgtatattcacaaaaatagcaagctcaatgttcaggccttctgtgatagtgactgggcaggatgtacatccacgaggaggtctacaactggattctgtacgtttctcggatgcaatattatctcctggtccgcaaaacgccagcctacagtgtctcgttcttctacggaaacggaatatcgagcccttgcactaacggctgcggagctcacttggtcatctgcttcgagatctcgggatccctcagcaatgaacactaactgaaagcggccgagaatgagtacctatcccttacgggaatcgaacccgtgtcttcgacatgaaaagacgatgtcctaaccactggacgaaagggaccaaaaggccattcttcatatacctcagctccgagaatagaagtggttgtggattcgaaccactgacacaaggatttacagtcctttgctctaaccagctgagctgaaccacttttccaaaagtctcttcttttcttcatcgaagagcgccctaccttaccacttgactagtaagggaaaagccctttactaatctaattaatagggaaaacttcttcgtcaagctttggagcagctctttcaattgacgactaatctcccaacatgctcaagaaccgagagccgcccagggactggacggccatagggagcttacttatgaagataggccggtcaaacaaaaaaacgcgcaacgggctccccgctcctagtcactaagtagtgctcttctcatttcgcccgcccgtttcacttccgcgccggaggaaatgggattcgaacccatgatacaatcttcttgtatgtcgatttagcaaaccaatgccttaagccactcagccatccctccaagttgttgatcggaattttttgtgcggttggttgcccgaagggggctatctgacccgatcaacttcgtaagccgtagcgcgctagcgcgcgtactcttcctctatctatgagcgagacaggcgttcatcatccagaaagatgcactgacgtcgtcccattgaatgaagatctgggcgaagtccgttggaattagccttgataaaaggtagctttttatttgacccctttcccttttttttgagagcaagcgcctaaaggaaggaaaataagaaaaaaaaagaggacgaagcaaactcgacaaaacacatcttttttttctatacgaaatttgttcgaccgggaatctcttggtgcgcttcgatactgttagcattcgcagtctgataagtggtggatttatgagggccccccatagctttttagaaccttggttattttacctaaaacgaaaagaaatcaacctaagattctgggagcggcgtcagtgactgactccttttatgcaattcgaaattataatgatggtcacaagtcactcaactcacttctttctctttcctcacacgtacttctatagcttgcttgatgactactctgaaagactgattgattctgatggatgatccatacgcgcgtgtacagttctttttgaatggcgaaatggctctcctggagtgagaaggcagatcgatgaggcacaagagtgctagttggactgaggtgggtgaaagattcaattcattctccatcttcaccgttaagcttcttgactagactttttgatctttctctgtctgacgctcgtcatctcatatcatcagataaaacgactattaatttcaagtcagtcagaatttgcgggatcttgactgtgaggagcaagaaaagaaagaagaactcatcaggcaagaaggggacttttcactctttcggagatgtaatagaagatgcagacttcgggcattcaaatgacttcctgttctggaatgtcaagccattagtagtagatgtcggcatttcctaaagaaagctgtttgagtagcaggaggacccgcggagcgctaatgaataatcgaaggcggattaagagaagagagctgttagcgtagatgaaagttgcgggttagtgctccaatatcctcagtagatagaggtagaagaagagctataacagtatacatagtaggtagcgagatcaaatcaaacctagtgcgtcactatcatcttacgcaccgatcggtctatctgatcaggttcagtatccaatcctgtgtagggcgggggagctgctagttcgctaggaaaatagaaaaagaatatagaaaatctataatcagtcaattgcaattggagaagaaagttagatatacttctcgctaatccttcttcttttgatcagcctagcatctccctcgtgcttatttattctttaacttttacctactgcaagacacatgcccatcccaagagcgctatgagttcatagagtggagaattcttcatggttcatccttttttcatgcaaggctagtacagatggtgagaatgctctggaagaaggtgtcccagtccgtaggggcactttcaatcaacccggtgggcgctcagtgactcgactgaaacgagaaggtacttaattggtccaacggaattctgctttatcatgaaagttatcgaccgaggaattccatttcggtagcaggcttctaaatacgctgcttgcccgaaccaaggaccttcacattctaatcaaagggaagatgctaagggtaccgataacttctgattatggattctatccaaggatcgggttctatctatgattggtgcgacgaatgcgatgactcttggttaaggccttgccttccctcatcgatcaaaatggccagtcacaattgttgcgccctgtctccctgccctgagtacgtcctggaaagcgaattcttaagcttggcccctctctttatttgaaatgctttagtgagattcacatctcgggaatattcttcgatacgagctactgtacctttatcttataagaacccttctctacaaccttcactattttattagtttctagtaagtaagtctcctgatgctacccagaagctccctcctgattctcgttgttaggtattttacttaggaaagagcagcactaatgggatatttttattaatggtattctgctaccctctccttttagtcgagtaatcaatccctctcctcatcaacaagtggaagagtcacgtcagtgcctaaaggtcagttttaaactccgagactgcagctccagcagaatccttccttggttcagattccttccctgccttgggatgccttactttctttaagggaaaagacagtatgatggtggtttttttccctgacttctgttttagtcgatcgagtagtaacccactagttattcaagcagttttctttcccctatccctttagctttagtcggccgagcaggttctaaccttttcttttggtcgagtaccttcgttcctcttccgagtggtcgagtaactcaagttcctcctctactaattagttgagccattcaggccacccgatccctgtccctaccggaagcctactgtctgactcttagcctagctacttagattagactgagcgaaactctgcagctgcttagttaagttctgctactgactctctttcagttgaggtggaatcaaacccttctttggcttaggaaaaaaaccacctctacttgttagtcttgctttttttcaattcttttggtcgaggagtaagcctcaccccaaaccgacactctttaacttaattacttttcttccggcggggcattttctttccttgcgtggatatcttttactagtgaaagcggcatcccaactgtcgaatgattgctaatcctcatttccaaaaagcataactcctatccgttgcatcagcctccatctggttccttcatttcagtcttagtccagcttgtaactaactccaaaccctctttctttcgagcgatgggatttgtgacgaaagcaaggaaaactcttagttgttgaatgcgagtcattacataggtggaattttataagcttctttaggcccggctagcccgtagagtcttaggggtttttccacttttcctgacgcaaggtcggggtctttacgaataggacaaatatacaccaaccctttgaaggatgaggttccagttcgccattcctattatttataggcttccagtctcctcagaagtccgctcttctatcttcgcagaattcacttgggtctcttactaaccttcgcatctagggcatgatgtctttatttaagatgtcaatcgtcttgttattttcaataaatttttccaggcctctctacgggattggaagaaggagaggagaaggagagagtgaaaggagataagtagatgttatcacagacggagatgccagtgagaatactgaacagacaacagctgaggatacacagcctaagctttttgaccataaaccatccaataataaagagaagatgtggaagggtgaaagatagtgtactaacgagaaaggtgaaaagctagggaaatttctgttcaagtttcagcttgatagctatatctttcctttcttaactgggttttttaacttcacatatagcccatcagcttgtgacttcgcacactctcagtttcgagattgggaatcgacaaaactgccctttcttaacttaattataaagggtagcttagctggttagatttactgaaggtaattcaatcgctgaacgttgataatagctttcgagaagagatccttactctccagctagttaaaacttccccgattagtaatgctctcaccctggggacatatctcacctttgtcagcaaaacagtagaaccatcttcatttctcagtctcacacttcctattccctttactgttgacatggtgtcatttgccatctttacttgtttcactaccagcatctgataaacttacaaaccattctcttcttccgaaagaacaacctgtgtcaagtatccagacttccctttgttaggaatccctaattgaaagtgagaagggacctacactagtatataaaggacatgggcctctccactcattgccaattggtttttagttggaagcccatgaacactcacatggtatcaagagccatggagggttctcttaagtcttatccttttccttccaatatcaatattactagttgtgtctccattaaactcaacgatcagaactatcttttatacgacgaaggaagggtgcgattgagtctgctgaacttgggcgagagatgtgacttcgttcctttcctttcagtcgagttatttaaacctctccagagctctggtgtctacgagaagcttcatgagtcaaacaattgaggaagccgatacttatactttggtagagaatctcgcataaagcaatgggagtcatggctcggattatgatcggactacaaggaaaaacaatgatgaatctcatcatgccatccaagagctgaatgcaaaaatggataagatattgaagcgtgaccaaaagaaaagatgacggtaaactcttgt

SEQ ID NO: 1023 - DNA, 82189 bp, Arabidopsis thaliana
gatcttcttcttgaccacctcctgaaatagaaattttagggattctcttagcctacaatgtatatatggaaataaagtatcaaagaacaaattcactataaatgtaattacagggaactaaaagttgccagagcagatttcaatcaaaccaaaaacaaaatcattataaggaagtaaaaaacaccatgagcatcacttttgcattgattattggtctcttaggaaaaaaagtcagaagctttcaagcattagcgatcttacgagtcaaaaaggctctgcaaaaaccgtaacaaaacccctaacaccaaaactccaaaatcaaaattcaccataaatgtcattacatggaactagaagttaccaaaacagatttcaatcaaaccaaaaacaaagtctttctcgatataaggaagtgaaaaaggaaaaaccaccaagatcatcactttttcactatttcttgttctcttaggaaaaatttgggaactttcaagcattagcgaacttatgggtcaaaaaggctctaaaaaacactagcataaaccctaataacaaaaaccctgacaacaaaatcagacagaaagaagagaaacaaacagagaaacggcattgaatgtaagaaaggaaaaatgggtaagacctagaagaccaatgcgagatcgacgaggagatgctgctatagtcttagattttttgagaagacagtagtaacgcaggcaaaagttcggaaagttcttcttcagtacctttttagtaaatggaaaacaagagagacgaagaagcaaaccgggtttagtggaatttttttacttaaaaacaatttatttcggtttggttctctcttgttggaccgtgtttgttggaaaggcccaggaagtcgaaaagcccaaaataaaattaaataaaatggctttatgatcatatgcgagtatgtgactgtattgagaaaacattacaagatctcaaccaaccataagttcagacttcagactaatctcattatcataagtgtaagtaatcttgaaaatgtgaacattgttaccttttagatccatcgagtaggcatccagaaaattgttgcctttagatcaatcgactatggatcttacttcatttgttgccttttagatattttaggtagctaaaatttgggttaagatagttggctactaatagtactgtaagtacatatataaaggtatgtttgtacgataacttatataataagtctatgatccagaaacttgactgcaaaagagttataagcactaatcaataatctactcttcttgtaaattagatttgttggaaaacaaacaaacatgatctcgaaatttgaactccatctgagatttgattaaatacactggattacaacaaggagaaaagagagaaaaactttaaaagatctctctaatcctaattaaactcactttacataacttttatgcaattaattattgccataataaaacaaaaattagtgttaattaaggaagaaacgtaggaatggtagtagaagagtgttggtgatgttgatgacgatgagcttgatctttcatctccgccgtagaagcatgaccacaccggtcacatctcaccggcgtaagaatcctgcgacaagaaggacaagaagacctagaaactagccatttgtcaatacactccacgtggaaagaatgaccacaaagaggaagcactcttatttcttcaccgtcggcgaagtcagtgaggcaaatagcacattccgtcgagtctccctcttcagcggcggcgccggaggttgattccgcggcggtgaaagtggatcttggaagagactgaagagctttctttttcaagcctttgttcggtgacggcgaatctcctccggctgtaaaccgccggagccaagcgcatcgtacgacggcggcgagaccagcaacgcagataagagcgcaaagaagagccgacaagatcaccaccatgtcggattccgctgcgatcatctcctccgacggttgtggtggtggcgccgccgtctcaagtaatcttgacggtcgagtcattgctttttgagctttggagacttttctttctttgtgtgagtttgaagacaagaaaatgtgtggagtgatgaagataagaaagaatcttgatccacgttataatagagacacataaaggatacatacattatgatatacatctttacttatataataatattgcaaacaaataagatatttgtaatatttaatatcaaatctgtatgataataataatacacgcagaaaagtttggatgaagggaaacaaaattagtaagtattattatttggttgtttattcgaagttattggctgaattagtgtttacatgcaatttgcatctcctatttagagtattgttgtttcgtgtggacacatattctgtttaaaaacaaacattttgctcttaatggagatgcatctatctatctccaacttcttagatcacaaaccatttttttcttaggattataaataaataaaaaagtttattttcttttcttgggtgtgtgtatgttcaatttttgttatgaaattctcttatgactagtcaactgatgttgagatcatgatgacttattttgattttattctatatattaaaaatatttgttgtatgttatttaaaattcagatagtgagagagatgattatattttttgaaattggaaggaaacttggagtaaataatataagaagaaaagatgggtcggtggaggttggctttataggttctgttttgacgaacacattatcaaaaggtataagtaagctcttttctcacctaaacggctaaacctaccttcgattagaccattttatttttaattctcttacatttatttaaaaatattttggataatatgattttctatcataataaataaaaatagatggaaaaagacaaatgagagatcaaattgtggaaatagtatgttattttttaataacaccggccaatattagcttattgcacttttatttcttaaaatatttttaaacattctagtttcttaatatcagtttttttttttgaccagccatttaaccgaccattattagtatatacgatttatttttaagctagaacctcgaaattcacattttgcttctaatgtatttggtttttgtttaaatcgtcttttaatatattttggatcttgtaagttttgtttttgtaagcctaggtgagatctggattctaaatctattaccgaaaacagaatctttgaaagtggatcaacgtgtccataaatttggtagcgatgcatatattataaatctaaatactgtaggatacaatttgacacgtaatgtattggtgaattttaataggaattattaaaccgcaggtacacgtctattctatatacttttgatattcgtcactttaaatatgaagttcacacctcaaccacttgactcttttatgactaaatcaagctctaaaccgtgtctaaaccgtgtctaaaccatatataaagtcaatctcaaattctcaataatcattctctttacttataagtttataccaaaccatattggttcaaacatatattaattgtcacttggaaccaataccctcaacataaacttttaattactagaccatgcatgatgatttttttaataagaatatctatcaaaatatattggtttgatatatgtacctttaaaactaaatgatacattagacactataagatataatatattagcatctttttgaaaatgtcgtcacttgtttataaactgataatgttttcctcttctgttagcattttgggtagctcataacattctataggaaaagaaagaaatacaactttaaccaactctagtttgtgactttagcagtataaggacacccgaaatggaatctccttagctaaaatgcttttttaaacgtctctttatctgaatgcaagacatgtgaatcttactaaaatacaaagcaaaagacaaaactaaaataaacgaaaatcaataatggatgaaagaaaaaaaagccgttttagccaaagttttttggtttcagctttaattggtcttggacagaagagtttatgtaacgttaatagcttttaaattgttatttgaaatgttttcatatgttatgctttcggagaaattctatcaaattgagtttctattaaatctccttaattatgaaaactgggtgcacatgtgcttgtctgtctcttcgactttatttttttttgttaattaaccaatctttattgttgttgtgtttaaagtgaaaatgccttttagttttaagttatctgtgaagtaccaatcacagggattttgtaaggaagccttttatcatcttttagatatcaaaatgatatttgtatatcccatgtgctcccctctctgtgcatagcctatccatcaactatctcaattatttagcaccattataatttcatatataatgcccagtcccaaaaatatagacaataaagcaaagcgaaaattatgttttttttttttcctatcataatactgaatttttatgtttctctatcttcaacaaaaactttaaaaaaaaaaaaaaaactttactagatagaataagacgctaattaattgatcatttgtaaacaatgaaattagtattgatgctttctctgtttattttcatttttgtctgtttatgtagtttaatgcaaatttttgattttcttctgaaaattagtgtacatatatatattttagcgtcactgtaatcttatttcaattataaatatctggtaggggatgttattattttatgtatctatagatagagttataaagatagaaatgttatgaagattctattgttattcaattaagttttttaaaaaattctaccaaagtttaatgttattagtttctgtatttataaaaaaattgtactcttaactttttcataaaatctaaatttattggattcataattttgtacggtcaataatatttgtgtgttttcaaataaaatgcaaataattcattctgtcattatgaattaaaatattcagttatttttttattaattctacaatcccgattctataaaatattctctgagttcttttaaaaaaaaaaaaaaacagaaaaaaatcgagttgagcttcgcaatgagactccgctaccctatggtttttttgtcaaagcggaaccgcatgatggaggcccacgttttctccttaagagatgtttgatatgaacacaaattcagtcacaagtgctaaatgcaaaatcgtacacgaacaagagaaatctgtagacaatgaaacatggtttgggaaaaaggtcaagaaatacagtagtgggcaactcttttcccgagcaaaaaaagttttaaagcattattaataaaaatagaattaattgtctgaataaccctaaaaaataagaaacttatacaaacaggcatttgcgtaatgacttatagaaataggtacttttgttcttgcgaaatgacggatttaccctcattcatctacaataataatagctgagacttttgagaacgacatccatggtgaactcaggcaatagaaacgacggtgtgtttttttaactcagcctctgcatttttgttgtttctattatctacaaataaataataaaatcaaacgaaagcaaagagaacgagaaacagagtgattcaaagtggaagattcacagataattcacaatgaatatcatttccgatttcgattttgcaaaataaaaaaaaaaggaggaaaaaagctatgaagaagtctatgctattactaattcctaccatataattttcaaattgggtttaaaattgaagatgaattagagactgttattcaatttgtaaggagtaacataacaaattagagttcaagttaaatattttgggaaaaattaattgatttggtaagtggctaagattggagtccttgggtttcatagatactatctttttagggtatagatttcttctatgagaacttgtttaatgggaaccatcaacatgattaaactagattttaagtttctagaaaaaaatgaagaaagaagaagaacacgatggagaagaagaaacatgaagaaaaagtaaaacacaagggcaaatctgtcaattcgcgtgtatgaaagttccttttttcaaagcccaacatgaaagtggctatattcaaatatttttcataaaaagtacctatatcaacaataaccccataaaaatattctaataacacaatgttcttgttttggcaaaaatgtaggataataataaggataatttgcaggccacaccctttgaccatgttttattttcagggattggcaaagtcaaatgtggttttcacgttttgtcttttcagctgaaatttgaccattttacccttgctgctacagttgagaaactattgaatgtacggtttagttagtcaggtttagttaggtacactgttccggtttagttggagatatttttgtttcactttgaggagtgcggctgtacagttagaagggagattttttcttttaaaaactaaatgacatcaacatttaatggcccaaaaagtttagacgtgactcttgtcacaattaatgcaaaatcatcattacatgttataatattataaaattattgataataattgttgagttaaagatgaacccagaaacaaacattaattgctaacgtacattgatgttgaagatgtgttgatcttgtttatttacgaagtttggggtcaagacaagcattatcgtgtaagtaatgaagttttaaagattttttttgttataatacactatgatcttcattgtgttcgaaatcaattttgtttttttataaaaaaatccagaatttttttatttctaattttgttggttgaaatggtaaatgtgtagatatttatgtttataagtgcgtataacgaatttctatttgtttttgtcgatataatcatgttttcagttgcatttattgggtttctcctgaatttatgaagcagttgggtaatggataatctcgtatttactatggtcggtgagtggagatacaaagaagaaaaatggaaatttgaaccagaggaaaacatgtttggtcgctgtgtacgtgttaaggaaaacatgacgtacacggaatttgtatgtacactaagcgagactttcagtttgaagtccatagatcaatcccataattagttactggatacgggagagatgttagtgatgatagatactaaacgccctcctgtctacattgacagtcaagtgagggtgggatacgattttttttattcgtggtgggtatccttctctcaacttgtttgtctctttcattacaaccgtcaagacactcgggaataatgtctctaggactcatggtgacgatgctgaaagtgaccgtgtgtgtgatagtgttttaaatgttgatgaaaataatgaggccatagattagtaagacgagattgaagacgataaaacagatgaggatgaagatggggggacaacgaagatggtgatgggtatgatgattatcagggtgacgatggatctatgggggaagtaccatcgatcctactattgatggtagtgaaagtagtggcgaagattatgattacaacaagtggaacgatgaaattgtagaagaatatggaatagggaatgttgaggagaacgtcattctcacacagctgattgttcaacatccaagggaattcagtcttctgttggcagagtgtacgtacacaagtcagcgtgtacctggcggagataacatttctcacccgggtgaccgtacaccagctgtgactccaagaagtatgtgtcaacatggtttgtaccaatgtacgtacactatagattggagagtgtttttaagaacagaaaagtcatacaacaaacaatgtcttatctcgcaatcaaacaatctttttgctacaagcaacctaggtcatatcctacaagattggtgatggtatgcgttgatgatacttgtccatgacatttgactgctcaagtcgtcaagaattcagaatatttcaaaatcacatcgtatgaacgtcttagaatatatctcgcccactgccaatattggtttaatattgtaccaataaaattttcttaataatttaatttacaaacaaagatgtacgtatattattacacatgtacatacattaatttaccaacaaaaatatacgtacattattacacatatacgtacataattttcaatatgaggaacaaatattatttcaccatctatatctatttaattattatgtatgtatggagattattgagatataagaatacgtaataaaatagcttgacttattagaaatcgtaccatatacgttcgactaaataattttgtgtacgtacactgtaaattgaatatacgtacacagaagaaatttaatgaagggtataattataattttccagtcatcttcaacctgtgtatccttttctgcaaacctaattttgcggccatctttagcagttttctcaaaatctcattttttatacgttttaattactatttatatataaatcttgtaaacctagagtatctttagtttaaaaagctaaattgtttgaatctgtgatttttttttgcattttgttcatctctgaaaacaagaaatttcttcctcaattttggagttcaatggagagatgtcgaaatatgaagaagtggataatgaagtttgaacttctttctacttctctttcaaatctctccatctctttcttttcctctttttcttcttctttggtttcttcgtttcagtttttttttcttttttttttaaaactgaaccgtagaaactaaaccgaaaccaactgctgtggggtggttgatcctattaagggtattttggtctaaaaaccattcaaaagacaaatggtgaaaaccacatctcactttgctaaatcatgagagcaattctttttttagccacttctgtgaaaatttctttaataataatctatgagttttgctcaagataatttatagaagattggaaaagcaataaaagtacaatataataatgcaacatgttggagatactttataaaagtttatgattatcttttaagttaagaatcagtgagaatatgcaaaagtttccacgagaaaatgcaatatgttttcggtcatgaatgaaacaatggaaatgtcaaaaggaaaaaccctaattaagggtagggtaatgtgctagtcaagattttacttcttcaccacggcagtgatttacaaaagtattagacaaataaaccggccctaaaccctaagcgagtgatcactttggaatttaattaacgacttaatgatcagatagattaaaattcgttataaaatcagacaacatttactacatcttggtccccttaagattcggttttaacttctgccaaaatatctcctaagtctcctaagtctcatgagtgttgtccataatccttcttgatccactacgttaagaggaaccgggtctctgaaatctgcttttgtgcttagctcctcaaaagcgtttacaaggttctccagccttgcaacaaactcgatgagaagggaagcaaacgtagctaaagacaaagaactcgcgctttcgtatactttatatactgtctcatttaccacagaaccaccaatgaaggacacacttggccatgtctcacggtttcttaacatcatactctctgttgattcccatatctgagattcatcattaccactagctggattctgattgttgctgctactgttggtatcccaaatctgacttaaggatttgatcactttggtctcgtgagcttcttcttcatattcttctgcttcagctttctctttagtagctgcccagctttctgagttcacaagaaggtaggatttactgtctattttcatctgtagctcctctgctgcacgttgaacgtcatttagaatctctcccgggcctagattctccattttctccactttttctccaatcaaacgcagaacttttgcgccttcattgccaactctttgaagctcatgacgaaatgcctgtcgtttctctggagctgcctgtcatataacaaagccccattaatttgtaagaggaataaaatgttcttatatcatgcatgtaagtgtaaccaaattaacaccaaacatttttatttgtctattaactaagggcatctccattggggggtctctaatatagagactctccattaacatataagaaaaaataaaagaggggagaactcttggatactgatgcgggtaatactaaacaatcatattctacacacaagcaaaatccatcaacttgtaacatgaaatagtaataataaggaacctgtatctctgaaagtatgcaaccatgtatcgccatgacggtgaaagcacaatgccttactgcaccactaagtttgacatagtttttccagggatggttaaacgttctgtaaggtccatgtggaggctcccatatggcaaaatcgagctgcgaaaaaagaggaatttcttaaatctcaatgctattaacatgcaaattctttagttgtctcaacttcaaacatatgtaccagagattcttcctgatttgtagattgaatagcggacctgtacccactgtataatggatcatcagatgtttggtacgtgagaatcttcgagggtactctctcatattccacacattgcaagtagccatttacacatcctaattgtttaatcaaccaaaacctgaaatatcagttcaaacccgaaaaggaaacaagggacaagtacataaaatgccaaaacctgaaaaccccgaaactaaactaaaccataaaccagattgcccaccatttccttttcaccgtagagttcatattaataagaaacaaattccaataactttatgttaaaattcataatcaaactaattgtaacatttatttcttaaaccatttgtattcaagatcttcatttcatatatatacacatctataatatgattttacattttacgaattggattggtccatcataaaaaaattccatctttgttttcaaggaccattgaagtaatatttgtttaccttctagggaatttgccacactcttgaaattattggccaccagtttatggagatcctccccggcccatattggaaatatgaatatattcacaaccaaacatgtggttgcaccaacaacaataaacaaaaacctgtaatacgccgtgctgaagaagtctccggtattgttccccgaaaccagaacaatacagaatgtcaacaagaacaccctgaatgcgtattcatatggcttcatggccgggtggagttttgaataactagcaatgaaacctggtaggtcaagttcaaagcgaaaatgttactatttatcttcaaaacctcatgtagaagacaagaagacaaggaaatgcggcaacctgctaggaaaatgcaggttatgatgatggtttgctcgaaatctcttgataaaacagagagcctcgcgatgccaagagcgagccctccagcagatactgtgcctatcgctctgttgaatcctttgaccaaagttgctcctgaaattaaactttgagttagggaaatgaatttaagtcgcccaaagaaaaattatatcaaagctcacaggctacgagaaatttgagcgaataaacgagcaaataaagattaaaatgtgataagcattatgcatatgtcataaataagaattagacaaaacaaattcatgtgataaaaaagcagacacaaaattcaaaaaattattatccaaaaaagaataaactatagttgtatcaatttattaatcttattataactcagcataaagtaactatcaaatcaattcagtatacactaaatactaaacccatagttggataaaatgtatttatgaatttaattttatttaatttttaaaattgtttataaagtattttcaaaacttcataactactgaagtattttcaaaaatacataaaattatttatgaagtatttatgcatttatgaagtattttcaaaatatttatagttggataaaatgtactcaccaagtcaaaacttataaatttaaattaacttaatttttaaattttaaaaactcgagggaaatgaaaattaacaaattgttaaaactaagataattgattaatggcggaatatggaactgcctagtgctgctgattaggacctgcttaatactgtttaattaaaagtaaacaagcaaaccgtttttactccaacgcttaagatcatctccattgccttacctctcatgtgtgtctgaaagactaatcataggaaaaattaaagacattctctttttggatgtctaaaatatctttcctaaaacattttagacatccgaaaagaagaatgtttttaattttaatcacggttagtctatttttaccatggttggtcttggagacatcaatgagagattatgcaatggaaatgttcggagagataatcatgaacaagaaactagaaaagtccaatcaaacaagaaacatgctcgcccaaattgaatgaatagtaagaatcaagaacgaatgaagtacgtaccaacggaatactcgaaaaccacgacgacagtaaggatgccccatacagagtatttactagcatcatgcaacggctctttgaggaaaataacaacggagcagagggcaagagccattcccatcttcaccgcgaagaagatccttcgacgatcggaatgtcccaactcgcacaggtttgtgatcttgcggaaacacatatctgagtattcattctgcgagagaagcctctctctgctttgctgatgaaatggacccattttttcccctaaattactctgaagagaacctttgttgtgtacattaaatagaaagaaacttttcatttgtgtcaatggattaatctatacgtacgttgcaattactttcttttcccattattccattaatgcaatacttcaccacatcatctctaaaaaactttgtaagtttttgaattttacctttttcggttccttatgtgtggacctgtgagtgggtggacccaattatgaagaggttatttattacgcgggtattttatacctaaagtttaggaaaatgtcaaaacaaaagttgcatggttagtgttggctcgtgagtaatgtgacttgtgactttgacattttgaaagcgttacaatttattacatatctatccaccgctcgctcaccattcttcctttcaaggtcaagcctacccgctcttcagttgatatttttcctatagattcttttttgggtctgattagtaattcggtatccggcttactgttttaatgatttacaatacaaaagcgattaaaagcattatcagaaccgtcattctctttttagacttcgaatggtaaccgaaccgtaccgtgcaatgtataatctataaaaacctttcatttaatgaattttttagggaagttgtactgttttaagttattcgtagacacgtttatcttgattaatgaaacacttagcatgtatagtacaaagatacacatgcatgtgaaatggacaagttattaaaaaatcattaacctactgtaaaagttatttgtaagaaatttatgccctcgttttgcttgattaatgatatacttcttctgcaagcagatgactagtgatcagtgtaaaaactagatgatccctcgtttaatctcttgtccaatttatctattcatgctttaatcgcttccgcattttaattcattaaaagtttcgctctacacaattttctatttatctaatcaacaaaaagaaaagtttacagaaaatatcgtggagagtagatctccatgagttaaacgaatactctcatagagacaatacatcaatccttagaaagccactcaaacgcagtacatgtatagcccatatgggcctttatgcatcaaacgtaatgcccatcgaaaatacgatgaattaactaaaagagacttttaagacaaccgtcacctaagccttcactttcccgaatgttcccaagaagaagttgtcacctattgacaacaggtggtggttacaccctttcagacctcatcactaagtgttcatgagtttatagtttaagagtttttggtttttgttttttaaagtgtttttttttttgtgtttttcttttttacattgttcgtttatgttatgttgttattcagtttttcataaatattcaaagtttctcattagattgattgattatgagaatgccaatgcaatgatgtttagaccagttggccaatgggaggcagccaaaattttaagcagctgataagatgtgttacaaaacaaaaaggcttgctcaatcatgtggcctataattaacttcttaattaaactgtggtttgctaccactcatctcaattcgactttagtttaatattggttaagtagaaaactgaaaaatcaaacaaacgttatgatttatctatataagagaagattggtttagaggtaaacgtgatttttttttttgaaaaccctaatgaatttagggttttggggtatgaaatctatataagagaagattgtaccgtttcttactttgggagaaacggtacaaaatgatgatgccagacaaccaagttttggggtatgaaatctatgagcttagctctgattcatggaggtttcttgatgtcctccctccgactgctttccatcatctgctaatggtttgtctttgaagggatcggaaatgcttattggcttaaaaggtactgcttacacagttttgattttacaaccgagagatttatatgaacattttactgcttaaacatttttgtcttccgccatttctgaaccgtgattatatggctctatcagttgatagagaagaaaaactctcactgttacatcggattgatgaatcgaagatggagatatatgtaaccaagaaagtacgtagatactgatgaagttgctttgttgtggagcaaattctctacagtggatttacccattggtggtaatggtttcgagctttacacgagtctattaattgacgaggagaagaaagtggccttatgttgtaacagatatttgagaaccagctggaaaatcgtttcgagctttacacgagtcttttaacctttttactaaactgattcttaatatttgtccctcattttcttcagcctattttaattaatatggtcatcaatacattactttatcgccacggcattgatttacaatagcattagataaatgaaaccaaaaaaaaaaaaactctggagtgacacatctttactacgatggttctttacttggcgcaggcttaactcgaaaagaagtctttacttggcgcaggctacaccttcacaatcctgactagtctcaccggtcttgagatgattcattactcggagcaggcttgacgaaagagaactctttagaatcagtttcagtgtcacggctagtctcaccggtattggtcttatttggttcaactttcacaacaagctcgaagcttggaggagatttgggaggagtcaaagcttcattatctgtgtcgagatccgatgtttcagggtcaagtccttcgtatctcatcgaatgtggtgtggttttgtaacgctgcaatgaacgtacagacgaagtagacctaactgtcgatgccgtagggctcgcacttccatctccacctagtctcttagtagtggctttcacacctttcttcttcttcactgccattctccatttcttgagtgcttttgacgtttgttcatcgaataccgattttttcatccgagaacccatctaaaagtcacagagctttcttagtttacatatttaaacagatatgttcagtttcagtagcatatgaactaaggaaatttacctgagttacgagtgcgtaaagaggaagtgtgatgtagctgcaaagacacaatactcctaaactgcaagagaaaaaaggaaacaagattagtatatgatcatgttgtgtagagaatttcaagattagataacacttacgcaatcgctacttttacaagtgcaatcttgaaattaggatggtagcaagaatctgatccaaaggaatactgcattacatcaatggatgtaaacagaggattagctactcttgtaaccaagaaaatgcattaaaaagcaaaggaaaatctaaagtgttacccatatccagaagaaataagtgatctgaaatgcgttctgcaaaataaaaacacgatttaagaaaataatcgaaacagaaaagagaggatttgttattgtgttgtgagattttctctgtttattaagtacctgaaacaaggcgaaatgcatgagatggagaatcaaatggggacgaccgaaccagaaatactcatcgttgccttgtacaagcggcattccttgaactaccgcatgtctatctgtgataccaagagccatccttgtcataatcgcttgaagctttgtccctacagctaaaatgatcttgaaaacaaaaaaacaaaactagtttgtcaaaaactgtgagtccttaaagatattattatttggaagatttcaacgaattacgtgaaagataacttacaataaccggtattgcagtgccgatgaacatcatcttgaagcctgaaataccaagcaagaagattagaatactgtccattgaacaatgttttatacacttagatactcaccgtcaatatttaggaggaggaatagcacaaaagatccccacaagacagggctgcaataagacactatcattagtgttgaaagaaaattattcaatgtaagtaagagagtgttataagtttacctgactccaacgactaccttgaaatcatcctccaacgatcttttaatgtatttttggaagttaaattgacttcctggagctaaatgaaccttcataaaccacaacaaagagactcagcaagatcaatactatatactaaattgacaaatggacccataagttgaaaaaactcacagcgatgaaaccatttctcaatgtcaaatagtcagttctcccaacggatctgaaaaactgtctgaaaaagcatccctgaaacatattgtattaacccaaagtgagaaccaggttaaaaacagttcccaactgtatttttgatatgtgtaatgtgtgttacattatctagagctgactaagaagagaatagaagcaagagggtgatgattcttacaacatagaaaaagaatggaatccgggtccagaaactggtgtgcgctctcacaaaagatgtttcatgagttagcctgaatctggaagtgtctataaaaagcaagaacacacagaacacagagtcactaaccagtgccaaagacaccccaaagatttcgaagagaaactataagaccagatttaagatagagaagactcaaaggtcaaaggtagtgcataagtatacctgttgaaaactcgtaattatgggatgatgtctcattctcccaatgcttccatccgcgaatctgaaaacaccgattatctttaatacaaccaaactttccggaaacgaaaccgagatgttgaactataaatttgaaatggtaaagtaccttcaaccttccaagcatcatagttaagaagctgtaaagaacgtggaaaatggctaagaagaatataaggatgtgcaactgatggagtgcctcggcagagataagctctacataaccctaaaccatcattaacatcacacgcattgtatcatttctcacaatcttcggatcagcaagacaaatatgtgactgaatgaaaaaacagaactctcacctccttcgtgcatttagtgggagatgcttcacctccagataaaaatctgtgctcaaacgacaagagtctcctgtgactttcaccattgtcatcatcctcctttttcaagttaggagcaggacacgggagcatcgtacgagcaacatgtgaagggatacaaatatccaaaatgtaggtttgtccaaatgtcagaagcaaagagatgaatccaagaaccatcagctctgcaacacaaaagaaacaattcacatcacgaacttaatgttctgtcaaagcctttggctaagtaagcacacatgttcaaaattccaagtaatcagaagaaattttcacctgctttgatcttctccaaagcgtcaagaagagctgtcttgtgccgatcccatagaacctattaatcaagaacaacttcttcacttcaagacaaatttgccaattccaacattaacataaacacaaaatctcagacaaagacagtcccttttcacaaatcaaacagaacccatctccaatataccctcaaattcaacacaaacaacaaaagtacaaagatttagcaaaaacccagaaaaaaaagaacacacctttccaactttgtgaagaagtttttcaagaagaacagaaacaacgatgaagaaagtacaaacagcagcaacagcccaagtcggagtttgattaagctgtttatgtaccactttcttctcatcctccgccgtaaccaccgtcactcctccaccgagaagacaccagagacagagacaaatcaaccgccgaagcaaagaaccgtcgatgattcccataactccgcgttattttagtttggctgtacctgcttcgttaacttaatactgtagaagtttgacagagtgatgagctgtctttaattcacatttgcggaaactcttactataggtttcttggtggtttcacgcggttacaagaaaaagactcgaactttgtacctatttcgagaaacttagatcaaatggaataagaagaagacgcaaaagtgaaatctgtctactgggaaattgtagattcctaaatctttagattgatgatgattaatctttttctctttcttttggttttacgataaaatgactaaactctttatttattgtcatttatggtttttaggacagaggaagaagaaagagagaggagagtgcgaattaaagcgcgtgagatagttttttaaaaaaggttgaaagcagtgaattgtggctttgattgagaaactgtgattgtctttgacttaagcaatatcaatatttggaaactataagaaaatggatgttttgatacatacatttttagtagtttttgtattcgaatatgtaactaaatttcgtaactttggattcttagaaatttgattgcatatcgaaattaataaaatagttatttaaaaaaaaaacaatctagggaaaaatgatgtgtgtgttaaatgatacctctatttataggaaaaatatgtatacaattatataatttaggaaagaaatattttttttttcaattgaaatactcaatgcacttaatacagaataaatatttttattttttgataggaatagagaataaatatttatatataagactaaatatttgaataaatgtctttggtaaaaagaagtatataatgaatccaaaaatgaaaaaaagatgttgatgaacaaaattatggacttgccacataacaacaatgactctcttttaatatataaactatttgtattaagttaatttttattgaaaaatatcatagttaacaagttcttaaattcttaaaaatgttttactcgtatgtcaaatgattcatcaaactattttaattcctttcttctaccacatatgatagagcaatttccacctttagaccttgatcatgtctgacatacatacttttaacatatgtgacgcatcacataactactagataggctaagattgacatcatgctacagccatcgaaaatatgtaaaggagtcataactaacgcgattcgatctagcatctagccattacataataatataataaataaatccgtgttagataatcttttttatacaattttttctcatttatacttttaaatcaggactggtataaagttttttaaagatatgaaataagacctaattttttgaacagtagaaaaataagatcaaaatatgatagggaatctcacttctaaggaatctcaaaattgatggctttgattaattgtattttgcacaatctatgttatataacttcaacaaaatcgaaagttttttcccttaatacagtatgttttgctagttgatctacaatttaatttactttcgatacttatgagcaatgaatactaggttcgattcataacacaaaattgtccagaaatttaagcggttaactggagttgtaagctttttcagaatagtacaaaattgtataaaagatttgtaagagaaaattgtacaaaaaaaggtaagagtaaaaaaatttgtaccgtatttgataaaacttttgtggttgataactgtcaaaactattcaaagtggtacctctttgataagggcatcaccctaacactattttagtgttgaaataacactttatttggtgtaaatttagcattaatttttttcccttctctaaccacaacaccaaaaatcacactaaatataatatcctctatcattatattactaaattaaaaattatccttttttacttattaattaatataaataaaaatcaaaaatcaaaattgtacaaataaattacatcatactattagtctatgccgaccagaaatagtcaattaatatttcaaagtttaatatgagcttcttgatctttaatttgtttatgtcgagttaaaagttctatgtttttaatgattaattaaaaaatttatgtattgttaatcaatttcgtacttattttaatattttttctaattataattcagatatttaaaactaaaaaatacaaaaataattttgatacattgttttttagttacaaaacttaattagattattaaataacaatacaaattatattttatctactataattagataatttttttaaatatataataaaatgaaaaggaaaaaagaataagttttttaattatgcagttgttacagtcacacaccaaaaataccatttggttggagacaaaaaattaacattgccacgttaaaatagcgttttgcctttccgttggacataacctaatggttaccatttaaacctactatatggaatttcttgaagagcattttaaaatcttatgtcgttaatattaagaatactcatttaatctcttcattcaggtcataattgtattactttatggctacgaacagcataaagatagcagaaagttagactgttagagactgggaaagactattggtgttctcctttaaatcctttcttttttttttgctttctatgctttattagtttatttgatatcactttctaatttgtttcacattctgtctagaacataaatctttagcatattttggctttctttttcatatttcttaatcaaaatctaaaacctctttctgacaaaatgattatattgttagtatattcaaatcagttaaacatacataattattttccaaccaaaaaaattattgatattggtacactttattttgtctattcctgcggatttgtggatgtcttatattgaaagttttggtaatgaaaaaggcaatgttgcttttgtctttcttcacctaaccaaataaagtaaaacaaagcattgcatgttgataattacgtcaacctcattttgataataggacatttctaaatttctatacctgcctactgatacgactatatggatacgagtctgagtgtatgactatgagagaaatatatatatatatatatatatatagtggtaaaatctgattattgttttatagaaaatgaggggacattgatgaagagtaaaataaatgaccaaatagaaactggattttttttttattgcataaacttgtttttttttttttcaaaatggatctttatttgaaagttgaaaccctttcttttaacaataattcgtaaacttaattttttgctatcgatcttgtttaactttgagtagtatttgaaactttgaatactgaaatgctttcatattgtccctttggagacatccaataaagaataaatcttttcatatatatttcgtaaatatttatggaactcaatattaatttaaatgtattaaatgtgatactgactgatttgactaaaatgagttttagattttttgttatttataaaaattgataaaatacctgctgttgtaagtagaaactttagatcttgcaagcttgcatttgtattgggtacgaaaataaacaattgcgaacgcatgaccccatgctactttaggcccatatggacaatgtccagatagattaacagcaaagaacgaggcgtccattacattcagtcaatattaacccatactgggcctccaatgggcctccaatataggtaacacattttgagaaaaagaatttgcgaaaatttattaattgtcgatttgtttgtttttctctttttttttttttgtgaaccaaattccataagttgttttgattcgaaccaatcttgatgatactcagttttggtctgtaaatcattcctcttcaaaagaaaatattcaaataagaaaacataaggttcaactttttctagaagaaccgagtaaactgcctcacgggtcaagattaacacatattttgttttcatcttaagtgatacgataatatatttttgatttcactactctataaatgaaaaatgtactctatagtgaatggttaaaaatgtaacaaaataagaatcaaaccaggatgatacggattgtcttatactaacggtttagaacttgtatatttttgagttttaaaggatcccaaattgaggaatatactatagcatggagattatttatgctaataaatggaattcttatttatatcatggcacaaacgatatacaggggtgaaagtatgaatttcataactttttacaaatacattattctaaatgagtaatgctgtataattctaacattttaagaaaatctactagtaaaagctccttaaattttataacttgtgactcattgagaataagaatattaaattacatttgtaaatatgttttgagtaaagatttgggttttagtaccaacataaaagcaacgcaaaataaaaggcttctctctcttatctctctatatcttttagagagaagaagcgactacaacttcttccggcaacgatcagtttgtgttggccgttttttatctggcatcgtttggttttcttaactacgatgaccgactctcttctagcattggtggcttaatcagcatcattggctggctcttttctggcatctctcggctttttcagcgaggttggccagcttttgtctaacatcgatcggttctcgcgacgatggctagctctagtttctcttacggtgcttttggtgccgttgtttgtttttagttttcatctcgttggatctgtgttggtggtggtgtttgtggcgattttcgatcataagtgtctgtgttgtgattctcactttcactcatgttttgtgaattaaaacaatttagaagttgagagagagatgcataaactctgtttttcttagaattttcccataattctttcttacacacacatacatccttatagcaaaacataaagtaaaacacaaaatactagcttctgacacctacacgatgacacctacacgattacactgttgcaggctgctcccactactagcatgcttactctagattatagcttagttttccaagtaaacaaaagcaactagattcaaaccaacttctttcacatgtaactacttgttctctctttgacttcttcagtatggtttgaaagcaaaataggcattattcaacactccctcttgccattttgcaactcaaaccaagcttttctcgaaatccttcaaagctctgtcttcccaatgctttagttagtatgtcagccaactgttcttcacttctgcagtataacagtttgatatccccatttctttctgcttcccttacgacatgatacttgatctgaatgtgttttgtccttctatgctggacaggattcttaccaatggcatagctgactggctatcgcagtaaataggtactccctcttgagtggtgaacttcaagtcttctaacaatcgctttaaccacattgattgatttgttgctgcacacaacgccatatattccgcctctgcagtggactgagcaatggtctcttgcttgctggtttgccatgtgaacacagctgatccaatactaaaacaatatcctgtagttgatttcagatcttctctgcaacctccctaatcactgtctgagtgaccaatcagctttggctccatagttgaagtgaacctcattcccatatcaattgttccattaatgtacctaagaaccctcttagcttccttaaagtgtttgatttttggttcctttaggtacctagacaagtatgatgcaaaaaacattaagttaggacgagtgcttgttaggtataacaaaccccctaccagacttctgtaaacttttgagtcggccagactctcatcttcttcttgatcttttctttgaggcaacagtggtgtactcatgatcttgctgtcttccatgttgaactttttcaacagttttctcgcatagcactcttgagatagaaaaattccttcaagactttgcacaatttccattcccagaaagtagttaagtaatcccaaatcagacatttcaaactcattcttcatcgcagtcttaaattcttccaccatttcctcatcatcacctgttacaatgagatcatccacatatatgcacaccaccaatagctttcccagaacttctttagtatatagagcatgatcattgtcacttcttgtgaagttctctcgctggaagaattcatcaattcgactataccaggctctcggtgcctgtttcagaccgtacaaagctttgtgtagacgcagaacatgatcttcttttccttcttcctcaaatccaagaggttgttctgcgtatatctcctcttcaagagtaccatttagaaatgcagacttgacgtctaattggaacaatttccatttcctctgagctgcaacaacaagaatcaacctgattgtttcatgtctagagacaggagcaaatgtctctagatagtcaaccccatgttgctgagtaaacccttttgctacaagtcttgccttgtgtttcaccacattcccttctgcatcagttttcagcctgaatatccacttaacgcctaccacatttttgtttgttggtcttttcaccagctcccacgttttgttcttctcgatcattaatatttattcttccattgcttgtgtccattcctcatgttttgcagcctcttcaaatactgcaggctcttctgcaccagtatagcagctttcacatgctccttagtattaaacatctgcaaatggagcagtgaggagaatgtcattaatcgatctggttttcttgtttggctgacttgtgctgcctccaggactgtcaaaattcagattcaagggacttggtaaaacgtttcttctccctctagcttcattatctcttgagttctgctcatctgcttgttggtctcctctgtcttctggttcacgtgacatatcataatgtttgattacttccttcttttcccagtcccatttactgtcttcatcaaagatgacatctctggaaatgtctatcttgttttctttcaacaggtacactctgtaaccttttgtttgagagctgtatccgacaaatatagctctttttgacttgtcatcccatttcctcctcttttcatcaggtatgtggacatagcatatgctcccgaacactttcatgtgacttacagacggttttgagtcactccaagcttctagaggtgtcttgttcttcagggttcttgttggtgttctattttgagcataggctgcaacatgaacagcttcagcccataattttaatggcagatcttttgctttaatcatggctcttgccatctccactaaactcctgtttcttctttctgagacttcattttgttgtggagagtatgctgcagtaagttgcctctcaatgccattcccttctagaaactctgaaaattctttcgaaagatactctgttcctctatctattctaagcttcttgattctgcaatttgcattattctcaacaagattcttaaatttcttgaaagtctgaaatacctccgattttgctttcaggaagtagacccaaaccattcttgtagcatcatcaatgaaagtaagtatgtacctgctaccattgatagatgagttttgcataggtccacacacatcactgtgaatgagctcaagcttgtgttttgctcttgtttctgattcttttggaaatggatcacgactgtgtttgcttaagatgcagctttcacactttccttcttccacgttaaacttaggcaagccagttaccatttcttttgactgcaggatcttaaggtttgagtgtcctgtatgcccaagtcgcttgtgccataactctgttgcttcatctttagccaccattgctgtttcttcgtttgaaagccaccttaggtgaaaactcttgttcaccatctctacttctccaattttctttcttgcactatcatgaatggtgcagtagttgttttttaatgtgacttgatatccgttgatgatcatttgaggaacactcaacaaatttttcccaagtttaggtacaaggagaacatcacgtatgcctcttttatctttccttgtcataacctcaatatctccttttccttcactcatcattacagctccatttccaactcttattggaactttgaagtctctgttgatttttgtgaacagcttctcatttggtgtcatgtgatttgtgcatccactgtcgatcaaccaagtgtttcctccacttggttctttaatctcttgtcttgcaataaacacaagatttttcttcacttcttctgctgtctctgtagccattcccagtttgctcttttgtgagccttttctttctttcttggtgtccctcttggtcaccggcgttttcatcccgagatcttgagccatttcgtttggttccagtaatcagcgtagctctgataccatgttgtgattctcactttcactcatgttttgtgaattaaaacgatttagaagttgagagagagatgcataaactctgtttttcttagaattttcccataattctttcttacacacacatacatccttatagcaaaacataaagtaaaacacaaaatactagcttctgacacctacacgatgacacctacacgattacactgttgcaggctgctcccactacaagcatgcttactctagattatagcttagttttccaagtaaacaaaagcaactagattcaaaccaacttctttcacatgtaactacttgttctctctttgacttcttcagtatggtttgaaagcaaaataggcattattcaacagtctgctttctaattaatcctttgagattgcagtttacgaaaattatccaagggattcataattttagttgaagatataaagcaatttccttagcagattacaattacctttagctgttacttgtctgtttagcttcgattggtctagtaaacagttttggtttggattaatcatatttcttattctctgttaccgttttgttggatctcaaatttctttgatgattctagcaagtggttgagtttaattgatctgtattttatccattaagctgttttgcagtagcaggtgaaaaacaaacgaattcactgtgttgaatttcattcaccggaataatcagaggctacgacggcgaaggatgacgatggaaatcttttgattactcatcatacacgtgttgataacatgtggctttgaaaggaattatctgatcaaatcttcttcttcaatattgagtttgagttgggatttagtttgttttcgtaactggttatgttgtagggcttttttagcccatgtttgtaatgcttacctcaataaaatatgaacttgtgagaaaaaaaaaaagatttgggttttagttaaaagaggagaaagaaatgtttaaaatgatgagctaaattttaaataagttgtaagattaagcaacaaatgagacttgtagaaattgcaaaagttgggacctaaatcttgagaagccactagaataaggaccttattttattaatgttgtggcccttgagaaaaataatattgggtaagaaaataaacaacttatagttttcaaaaacacaaaaacacaaaaccctcaatagttggaagagggctccccaagaccgtattcgcgtccagaatcgtaacattttcgataagattaaaaaaacctgcaaaatctggtccgcacgtttttagcaacacaacaaagtatgacgagaagttccacgatttttgcaggtatagtacattcgcttttcgccacctcattgccttggattcatacactggatcggtttaatcttcttctctgtttttccatgtcaactattatatagtcattgtatttgtatttattttctatatattgcaccgaaaaaagcaagagagggatatggttcacatgaactatgtaggaggtgaataaattagacacatgtattcttaatttcaggatcacatgaattgtgatagttcggtgctcagtagaacttataaaaaagcacaacacttattctttttgtcggatatgataatccgcttttgattttttttaaatatatggagttttcgatagtccaaaaaaaagtttcatgcttaggcagacaaaaactttaatctttgtgtgtggacgacatatttgttttaacttgctagtgaatttttctttaatctacctttgttttgtatatatatctaaccattataattatgtatatgttagctgattccaaacgatatcataagttctaatgagtaatgattggtcaatttatcttgttgtaaattgttcaatatacgtgacgtggtccacttctatcctccaagactccagctacacaaagacacagtaacacaaacgcatacgcatatgcatgtgtcgtgtctttgtgtgtgtatgttgtatatattaatatattatctaaactataccattttcatgaaatttataatatattttctcaaatgatttaagaagataatgatatgtttacgagagtaaaaaaattaatgatcttccagtaatcaataaatatagtaaattgatatcagatcttgttgccaactatagaattgaacaaaatacaaaactgtcatcgccatgttatattatcgtaaagccagcttatatatccttccccattggtgttttttatttttactttgtttggtgaatattaaagcgcttaaaacacgttccaacagaataattgtttgacctttttagtttatctgatttttaatatcaattcttaaaaacatctcctcaatctttgcgtaatttgtcttttcctaatgcatcggatagagatagattcttctgagttcttgcatggttcaggtactttctattcgtttcttaatacgtgttctttcttttcggatgaaacataattcatcgatcgatcgatatgtataagtctgataaaaacttgatcgttgcttttgatcattactagtaaaacatctcaataaatcacataacatgtttcacgttttgaatcggtttttcagccttgttgtttcagatttgattgatacgaattttaatcattattattgcaaaaattcatatttaaatttgagatgtttttataatatacatgcttaagattcataccaataattaagttcaataatctagatatggtttagaaactttagatatatagagatgctgatgacatgatgaaggtgatgatcgattgatcgtttattcatttgtcatatatatgagttgtaggaaaaacatcttatgaatttagatccattaaatacgcttatatgcatgtgtgcatgttcaatgtgtagataagttctattctgaataaattgacgaataacaattattgatttcaatttcgttttgagtgtgcatgtcatgtgtctgagatatgggaaaatgaaaaggaaacttccctatatataccgaaacaatagactatcaactttgatctatatatacaaattgtagaaaagccttggatctaactgatatttccttatgtgagatacacattaatgtcttttgttttgcttcttaagattaacgtgttatatattatctctttattttaaaacatgttgaccaaaataatttatgtcttacgtgttgcatatgaaatagatccaatcgaatcagcctcccatatcttgaatctttgatatttggggtctaccattgatatgatttactttgttaattacttgatgttaatatttcattttttcttaagaaattgtaaactaattctttacatatatgcatggcaattaacttagtcaacaggttcaacattttataatgtatccagaatcccagatagtacctgtcctgataaaaccttttcaggatctcatgatatttcttaaaatataacagcttagtgattttaaataacataaaaattagccgacaaaaagaaaatatcataatataattctgaaaataactaataatttactcttttcaagtaattattcaaaataaatttagaaaactaattcaatgtatttcctcattgtcactcttttatttccctctacaaaattatatatatgaagtagttttttttaaaatagagccccataactaacattaggggtccatatatttgcattgtaatttataaacacgtgtagaacattataattatttaaaataaaatttagaacaataacttaatgtatttcctcctcgttagttttcctttttttccctctacaaaattacatatatggaatagttgttctttacttcttttaagtagagccccttaactaacacattaggggtccatatatttgcattataatttataaacacgtgtagaacctggcactgaagtctgatgaatatatatccatttgttttcacaactaccctagctttttgtatcatcggttactttttttttatcacaagaaatttctcgattttgattttgatttttcaatgttgtgaagttgagaagttcaacatgttttggacagatgtttttgaacagtaaattagtattttaaacatgtgaatctatttgcaaacgtaatgacgtgtcgtctgaccatttcttgaatgttagttaattttttagctctagttttgattaatctaccaattaggtcattcatttcagtttaagtcaaatcaacaattaggctcgtcctaacgttttcatttagccaaaacaaaaaaaaagatttcaacagtataaataattcgtccttatcaaaaaattaataaataaaaaagatatacatcattacttacgtaattgtttgtattttgatagttttcgataatttctatgtgacggtttttaaaataaaaataaatgttgaataacaaaaaatagtagtacaatagaatactgaattggtttgtgtagggtcaaaccaacaaatatggaaagaaaagtattatttagttacaacgtgaaaacacaggttcgtgctactactccaatgatacgggtctcaaaatactcaaaactctggcatgtctcaattccacaaattattgtttaatcattctgcttcttctgtaagtttatatataaatgtgtatatactcaacgtaaatatttgcttacctcgtatattttctctcttctcaggcttattaattctctgcagataactgcagaagaaagaagaaagaagaagaagaagagattagagcttgagccataatatataatcccttgatcattagtctaaagaaccacataaaaagatgggattctggtcgttgttggaggtggcttctatgccggttattcaagttcttttcatgagtcttgtgggagctttcatggcctctgatcgttgcaagctcttccctgttgaagcccgtaattccatgaacaaggtaaaccaattcaatgatccttgactctttgaaaaaaaacctatcaaacattcgagatgtgtttttattgactttagcaaaaaaagatgtgttttaatgaactcaaattttgtttaggtggtgtttgtactatttgcaccggctctcatgtttgccaatctagctcagacggttacacttgaagacatcatctcatggtaagaattctcctatcaatttttttcttacccttgtttggatcatggtaacttagtaaagacggtgaaaaataaatcttccgactatataggtggtttatgccggtgaacatgggacttacatttctaatcggaggacttcttgggtggttggttgttaagattttgaaaccacctccttatcttgaaggtcttattgttgcaacttgttctgcaggtaaatgccacatattatgtggaccctgtcaacgtcatcatcatagtacctatattacgttagatttatctttgttttgttctcatggagaaactcaattttgcttaataggaaatatggggaacctaccaatcatacttgtcccagcaatctgcgatgaggacaaaagtccttttggtaaccgaagtgtatgtagaaccgtcgggctctcttacgcgtctttctccatggcggtacgttatgttaacgctataaaagtatattggtatgagatgtggagaaaggagaagcaaattgaatttctttttactggtaattgtgcagctagggggtttctacatatggacatacacattccggctgattaaagggtccgcaatgaaagttcaagccatagaagaatctgagaaaatagcaattaaatcatccaatagtgacttagaagctgatcataagacccatctcctcggtgcaccggaagacaaggaaaacaaagtggtaaaggaaaagacagggttttggagaaaaggagtagacttcctccatgagatattggaggagcttcttgcaccacctacacttggtgcagtaagttcaatataccgactagcattgaggaatataccaagagtgaaatgagtaactaatgttacatgtttgatgctttcagattatcggtttcattttcggtgcagtaagatggctcagaaatcttatcataggtgatgatgctcctttacgaatagtacaaagcactgcaaaacttcttgggtagttaccaaaatcttgtcatgaattacctcctgaccatttgcatcttaagttactaactttaccgattatgcagagatgggaccattccctgtatgactattatactagggggaaacctcatacaaggtaaatccctcaatacacagctcaggtttcactatcaatcccaaaaaaaaagaaacttacaaacttactgttgttcaaatcgaccaggtttacgttcttcggcagtcaaaccgatggttgtacttggaatagtctgtgttcggtacatagctatgccaattatcggtataggcattgtactaacagctgcaaatctcggatttcttccagctgatcctttgtttcagtatgttttgatgcttcagttcaccctcccgcctgccatgaatatcggttagtcataaatcatcaactgaggtcacacaaatctagaaataacaatactaacgaggaaagaaaaattgttacttacaggtaccatgacacagctgtacaatgttgctcaagacgaatgctcagtgctcatgctttggacctacttggtcgcgatactggccctcactgtatggtccaccatcttccttcacttgttagtctaaagaacctgcaactctgtatgagcacaagaagattctatctctctactactacagagaccgaagctctgtcaagggatcttaccattctttttgtctatcacataaaatttgatcataacttgatagatttttctggttgcatgcgtacctttctgcaaatcttcatttttctccatatcccgatttgtaaacgccaatattgtatcaagtattacatcaagtttaatgaaaaagcatatgaaaacagaggattaaaagtgatgcacctcccaaaattggcatccatctatagataatgaattgacgacacaatgtctttgacttcgataatgaacacagaggaaagctgttgacaatcggtccgtgccacacaagggaaagtgaaactacaaggtttaagagttttacaagagagtgagttggagtttcggtcggttaggctgaggctctactacctccatgtggatcttcactgtttgcaagacactgtaagataaacttccatccatcttaacaatcttttgcttctcctcatcaacataccaatcaccagctcctttctctccctttcctgttaaataaacagggccttcgattccatacctgcataatccataacgtttccagtgtaagaaaatataatgtgctaataataggaaaaagaacaagaatagccaatcctttggtaagtacacttttcccctaaaattgccaattgcaaaacagtgagatatggtggctctgggaatggagataataaacaaggataaggaggatcggctacacttgctaatgaatttatattataagcaaagaatggagaacatacttggggacaaatactataaaaccattggatcttatcttcacaactctcgcctcttcatctgtgggtctgcaacagaaacacacataattttctcttagtctttaccagtccatgccttaaaatcaagtaagattcatgaagaatatacaatccataccgggttctgaagtaaatgagaacgtacagctctactgaagctcgacctgccatctgggcattcctatgtcgatagttcaaatctgaaacaagtcaatgaattagaacctacaactctaagactcaggtgcattagtaaaaggaaaatcattatccctaatctttaagaaaaattcgttcgaattttagacatcttttccttgacaaagatatgaccaaacaagaccttaatttccaaaacaaatcaggaagtgaccaaaagactcctcagtttgcaaattttgtctgaacactcaaaattctggaaataataaaactcttaaataatccacaggaggtaagcgaactcttactatcagcaacactagtaagttgaggtctgtcttggaacaccgttggaagcttgtatattcctaatgacgcagcaagtaacctgtgcacaaagacatctagaaccagggaaagaagtaagattagagcagctaacaggtgaaaagagggaagacagagcagttatcacttaccggcatatctacggataggggatgtaaaatgagtatacaggggtgctgcaagcccataatgatgatattcgggaggactgagatccccactacagaagtacacagcctgcgtagtaataaatttaaaatgttaaatatggcgatatcctgtcaaaatcaccagcaatattactactcagtcatcacggaagcatcacctgcgtcatgcacctagttgccaatatcctgatcaacttgttgaaatatggatcctcaccctgatgaattacgaatttgttaatattgagcgaataaaaagaacgtaatttgaaacaaggaagtaagttacttatatagcatcaaagaaagtgacaattgcatttgattatgaatagaaagaaaccagggaggtactcagtggctgccatatagacagtgcagacaaaaagaaatactcaccacagctcggtccagtgaatcagccaaagctttagatgaagagacatctaaggtaagcccaatagctgcagcagtacgcagtagtggttcaagcatttctcttgttggagtaggatgacgcctgcatgaagaacgaaaccagagatatgatgaactactattgataataaaagtgaacagaaattcaataattgcctgtaaaaactaaacacatcctcaacagctacttgggatcccataatattcattatgctaaatatgcacaaaattatataatctaaccacctatggccaaatttcacgagaagactaaacaattcatgaaccagtgtatatatgcatctttagcaacagttgaaagctaatttgtcacatctcagaaaaaataaaatccgttttacgcagaggaacccatcaacaaatacagaatgattgcaatctttgagaaacagaccaccgatgtaagaaaaagctaccttcaagaagaaaagaactatcacaaactttaccttaatagtgaacaagaagggaatagtttcaggatctgtccagcgacggaaacatttgcagcaagcatgaattcctcaaccatttggtttgcttcgagaatctgatacatacctgcgcaaaacagagtcatgatgacaaatgaaaaacagatgaataaattgaatacatctttcagaaggatagaggtggttgtatttcatgggtgtttgggtgaaaaagactaagaaaacatcgttcgtattcatcaagaagaaacaaattttgctcagataacataccaatgttaagaggatcatgattctccggatcaatatcaaatttgacttccgcagaagcaagagttaaggctcccctatcgatacgcctttgcctcattatctacaggtttcaagagcaaaaaacaggtcaaaatgttgtgttctttctatgatttctggaacatatggcaacttgtgagaggaggtgtctcaaacctttgccaaggtattcatattcctcagatctgtagtcagggagtctgtcaatcggctacaagaaattaattacatttgtcaatcttcggcataaagtaaaagagggaatcttaaacaactctacaatacaaaataatgggataaaaattcatgaaattagaaagattaaattttctacaataattttttgacaatccttgctaccatttttctcactgtcaaatgactagagagcataaaatcaaataatttattgtagtagcaaaggtaagcaaacaagccaatgaccctctaactctatggtaaaatagaatgtacctgtcatccatccgagcctgagcttcaatataggacaatgctgcagaagacttgataatactctttgtgaatctcgttgagataatctcagcgtcagggctcatttcctaaatatatgaattatgcttaagctaaccgtttaccaatttgctaatatgcctcgcaatgacaattgaaaatggataaagcatacccaaataaccgagaatgcaagcctttccacatcagctctaagagagcaaatatctacaagcaatatcatgtttcatgagtgcatagaaattccaacacaaagggaatgtatttctgtaagaagatattaccttcagttaaaggtttgggaagcatgtcaatacggcgctcaacaaggtagacagatgtgcctctttttgatgcctcatcatccaaaggagtaccagggtgaacaaaattcgttacatcagcaatgtctaatcaaacatggtcaaggataagcatcatatatattcactcccaagacaagaagagaatacaacggaactagctacaaattctggaagataccgattcactaaaaggcataaagcagatcacctcaaaagcacttctcgtactagataattatgataaaagcgaactatgaagctaaaaggtaatatgagccatttcaatgctttggttaaatatatcccacaaactgatttttaactcattgactattgacatgtcctaaattgaaagcacagtcatatttatgagaatctgaggactctaggatacggactccaagttcaaagttcccgtttggaagcgatgtacagtgcaatgcatcatcaatatccttgcaacctgttagcaccaaataaagttaatctgcttgtgcacaactaactgcagactctgggagacatttaaatttggcttgaatcatatatactttataaaatgtaaagctctagatacatacccggagggtccacactaaagacaagcaaatgtcgtaagtcttgcctaacaggattggatacgtcttcagaggatacagaccaaggtaagggtggcaagcatgccagaacttgagaagagaacggcgagtagtcaacatcattctctatcaacacaacctgcagcattcacaagaaagagtattgatgttatattcaattatctaaatcagttacttctctgaagaaaggaaaccaatatacttttcctactcttgcccacctaactcctactagaatagaatcgaataaattaatatgatcccttacctctgtttcagtttccttgtcacctattttgccgattggtcgtacgtaatgaccagaaggatatcgagattgacggtcccaggaatcaactgccactactatcctcatatccaaaaggttctgcagctgtcgagtattaatgcggatcttgggaattctgcgatctttagagacaaataaagcatgtgccgttccaccactaccagcaggtagtgacatcggttcaagagatccacaatagctgcatgaaaacatacaaattaggaaccgtcatccagaaaccatggcttgaaacagaagacaaacttaaggaaaagtaaagcataattgcacagacaaaggacactgaatcaagagtactaaagataatcgtccagtcacatatgtagtcaccagaaacaggtacctctaatgagaatgtattaacaagtctgttaacatgatctcatatgatatatcaatgtctcaattagaaaaaaaaacaagcaagaaggtaagggtaatcaagtaatgaactcacgagtgccaatttctacggataacaccgactacacggcctgatggacgaacaggggctgcatttttatccccagaagtttcatgggataaatttgaggttctaggagcatcatcaacattgtcgggagccaaatgaacagtatcatcctcttcatcatctgcatttgaatttgatatttggaagaaagataagtttaacacaacgtcatgcaaggaaataactgctgtaaaatatatgtagatattgaaagagaccttcttcagctatagataatgccttctcatcttgccattgatcccgaggcaagagttcgactgcaacaatatcaccatcaaaagccctgttcatgttgctgcgcccatagataattatctcttcaccaatgctctcgcttccaacataagcttcgtaaggattgaaacgattgacccggagttttccttgatgatatattccacggtgtaagccagcagtaatctcagacatgggcttatgctgcaggcaggaaaaaaaacaaaattggagataaaagttgtttgatggcagtatcaagttacccaaagctgagactgaaaaacaaatgtgtttatctccattacctcttggtatataagtttcctcttcgaaggtctagaatcatctgcatcttccatagttatgtcttcattggttggttgggcaagcagatccagcaattcaggttgtccaagtgatttaacataagcctcaactgatacagaaacattcattgataaacttcaacatcatgtagcaagacacacaaacagtcatgcaaaaccaagcttcgacaacttctatgaaaaatatagatgattcacatacttgtctccgcagatattccctcttcagtggccttccgtttattttccctatcattagttacaagcaacacctgagatgtatcccctagatgcttctggtaccatagagtagcgacgcgaatagctgaattccagataaatttaaaattttaataacagatgcttaccaagagaagtatgtaagttcatcatcaagaaagtaacatgatgttaacaaacaaagaaggtgattgaatagtaaataaaacctctatcgttgtggtcatttgcactctctttctccatggcttgcacataagtatccctgtgaagagtttagtaaacgcgagaaaacaacgataaggacacggagaaaagcgtttctatagcttagtaggttccagtaaggagagcatctaatcaatataaccgaacagaaattccaaaatcattgaattctttatgttcttttgtccacctaaaatctggttaatctaaaagctaaaagttcgaacaaggtcttcttacttgtggacatgattggagaaaacatagaattgtctcgctggattgctgcagagaagtctgattctattgtaaaccgatctattcctgttcttaacttcgtccaacaccacagacagaacaacaacagtgtctatagccttattttccaacaaatcaatctaccagaaacaaacaaaatattacattagtaatacccacaagctcaaaacttttagcttatgtaatcaaattaaagaaaaattacttggtgaagaacgacgttggtatcaacaacgattatcttagaggaagacaaacgagcagctgaagaatcacaagacttgcaagagaaagctccacagtatatgtcatctcgtagataaacctctcttacttgctgtcgcagacaaagagttaaaagttacaataacgaacaaaaaaactcggaaggaagaagaagaagaagcatagagagattgaagagaaaccttttggattcttcctcctctggttttcttattgaaaactttgctctgcaacatcttcaatttcttgctggaaaacttttcgatttcgccggtgaagaagatttcagtcgtcagaacggaagagaggaagaagctttttaaagcctttaaatttaaacctaagccagccaacttgactactaaaattttcaattctatagctccttattcgttcatggttaacgaaacgatgacggttaaaaccggtttagttactttttctctaaccggctcaatctgattaaaccgaagtaaacacagcaatacagctagtaaactcggtattactcttgatggaaaaaggtcaaaaacactctttttattttaaccaaaactaaccaatttttgcaagataatattgcatacctaagatcatttaccttgatctcatagaaatttttttaatgatgcatctccaattataccgatacaatttctagtaaataaatcagtgttcaataaagtgggataggcgtcgtctaggacgcctaggcactaaacgcttttataccgttttgactttttcaaaatcggttctattaatcagtgagatagatttggcagactatgtaaacattaagcggattagactctcattaggtgggttaggctaggcggatctaatcgtctcttaatattttttaaaaatttcaaaaatatattttaaataattttaaggacacctatactttttattattttattttattttactaaaatgttaaattttaaatttatttttaaaaatttgataatttccgttttttataatagtttttgcaacagttcagataatagtatataaatatatatcgttttattctaaaaccgattaaaccggctaaaattgtctaggcctcgactaagcgttctatgcgctaagcggagggtcaccgccagctaagcgcctaacattttcttaaacactgaaataaacacaaaattatatgataagaagtacgattaaaccaaaaataatcgtcacaatttttgccactatgtctaatgtatatgtgattgttttacctttaacaaaagaaaatgtgatttatttacctttaacaatatgaaaatttgttttttttaacacaattagtaattttagtgatattttcactcgaatttgttgatagcaaaaggtgtttagaagaccaaaaagcttaacgcatattggctcggctcggccgaataagttagctggacagtacggtggggcacacgaagatccttaaaccgcagcctcagacaaaccttactcgaagcaaaacagtgtttggttcgttcgtgggggtttaaaaaaaaaaaaaaaacttttgtatttttttccattaaaatatttttttgttaagaagattcaaaaggagaacgcgttagacacactaagggtgggggcaagggaggagaaactcgccggacagagacggagatccctaaaccgcagcctcagactaaagcttcgcatcttatctccgatccatcgttgacttcactcttaggtaaattcgaaaaccctttctcttatcttttatctcccaattcttaaattcgatgattgactcgtcctcctctgttttttcacagctgatcatcatcatcatctctatctctgttcggattctccataattgatccggaccatgccgccgagatgtcctttcctccgccatcttttcttcttactactattactctcaccatggatcatgtctccttgcggcggcgctgccgacgatgtgacgtatccgatcgttccatctagtcccggccgcagatcaattttgcagattcgtcggtgagtttcttccatcctctgcatgtttaaaaatacttagttagtatttgattctggtgacactgttttaggtatcattagcattgtaaacgtgatggactagtgattaggttttggtggtggcaagaattggtttgattacattttgatagatgtttttgattcttctctatgtggttactggttgtgatgttatctgtcttctactcagtgaaccaccaacagagccaaatacgaaacttgttgttgatcgtgatgggaaggtgtttttaaagcagcaaccgaaagaaacaccatactggtccttttcaacaggatcaccaatgcactcgttatatcaggctcctgctaataacaacacagaaaatgctactgagataactcgtcctcacataattgttgaatatctgaacaactcaaaggcggctactactgtcgatggctatcataattgggtatgaagcatctctctctttacttcattattactggactttgtttatcttaactttgtttcggcacatattcactgcagacagttcaggagttttttaggcagaagccacttgtaacagatgatggtgtgactcttggatcagaaacaactagtgcctatttggttgatggtagatcagggaggctgattcatgtttacaaatcaactggagatactaagattactaatgctctcgtgaagcccgctagcactgaagattttgtgaatgaacctcttcttatcaggcgaacagattccaaacttgagcattttagtaaaaccactgggaagcttgtctggaatttgacggtttctcacttcagagctgctttactatgtgatcctgttttcaattctggctatgacctcggtcctaaacttcaaactggaatttatatgccattgttatgtggatcacaaattgacgttcgtggcccagaaattgttatcagggtgctccatgatcagccaatgaatgtgaaaatgctaccctccccttccctaaatcacttcgagagcgaaaacagcatcatgccttttggaaaagccagagagtcaagaaagttacaagagcaacataagcagaaatatacatatttgtttggacaatggtcaccagtaaagttattggcccctttagtgcttctaggtgttgttgtctctgttttcattaaaaagttttcgtcgaggggcagtgatgttagtttgaaagctggaccttccaaaaagaagaagaaccgtaaatccgcgaaggatacaaataggcagtcagttcctcgtggccaggatcagttcgagctcattgaaggaggtcaaatgttactaggcttcaataactttcaaagtggtgcaactgatgggagaaagatcggtaagttgtttctgtcaagtaaagaaattgcaaagggaagtaacggaactgtggtgtttgagggtatttacgaaggccggcctgtagctgtaaaacgccttgttcgatctcatcatgaggttgctttcaaagagattcaaaacctcattgcatcagaccaacacacaaacatcattcggtggtatggtgtggagtatgatcaagattttgtatacctttctctagagcgttgcacctgcagtttagatgatctaatcaaatcctatttagagttttctatgacaaaagtattggaaaacaacgattctactgaaggagtggctgcttataagatccaacttgattctttggagggagttatcaaaggaaacaacttttggaaagtggggggtcacccgtcacctctcatgcttaaactaatgaggttaatttggacttcgtacttttttatatatgtcataatattctttgattaagtgatgttctatttgaacatcaaaggtagctatggttctgataagtctaggctatgtgatacaataaacagtagaattagttcaaaccttgtttactgatttactgtttaaacttatatttttcagattgtttgtattgtgatgcagggatatagtttgtggaatcgtccacttacacgaattgggaatagttcatcgggacttgaagccacaaaatgtgttaattagtaaagatatgactttgagtgcaaaactgtccgatatgggcattagcaagcgtatgtccagagatatgtcatcattgggtcaccttgccacaggtaagttgttttttattatctttttttatgcccaaaatattggatttgtaacactttcaaaaataggactgattgatctcgcaaaacaaaactaacactagagaaaaactacataatgtcataagttggtcaatagaatgcatgttagtgtctgaacgcaatgtatgatcgtttgttgaatatgtgttatgtttatgaaatgagtttcaacccacatttttaaagtatctgctttaaaaactacaggttctggcagttcgggctggcaagcaccagagcagcttctacaaggtcgtcaaactcgtgcagtcgatatgtttagtttaggttgtgtcatcttttacactataaccggttgtaagcatccctttggtgatgatcttgaacgagatgtcaatattgtgaagaacaaagtcgacctatttctagtagaacacgttccagaagcttcagacctcatatcccgtttgttaaacccagaccctgatttacggtaatgttactttcctctctgatgattaaaatccactcgaaaaagcctaatctcttatacactgtttgctctttgcagtcctagcgcaactgaagtgctactccatcctatgttttggaactcagagatgagactgtctttccttcgtgatgctagtgaccgagttgagcttgaaaatagagaagctgattctgaaatcttgaaagcaatggagagtacagctccagtggctataggagggaaatgggatgaaaagctagaacctgttttcatcacaaacatcgggcgctacaggcgttacaaatacgatagcatccgtgacttgttacgagtcatcaggaacaaactgaatcatcatcgagaacttcctccggaaattcaggttcatcttataattgaatccctcaaacaccgttacattacactcacgggcttaaactgattattttgaaacttttgatgtcttaggaacttgtcggaacagttccagaaggattcgacgagtactttgctgtacggtttccgaaattgttgattgaagtctatagagtcatctctctgcattgtagggaagaagaagtattcagaaagtacttcaaatgcgacatcatctaaaagactgtttcgcttccagcactttatatgttagttattgtatgtttgtcattgttatataacataacttaactgatatctaaatgtttaacgtataacttaaactgcaacatatgtagtatttatatatgtatatatctcttcaagtaactatgtttcaagtgacgtattctgcaaccgaataagatttgtaatttagaaatgtgtctcttttactcagaatctagttagagtatttacaaaaaggttaaagattagatattaagaattgagtttagtaaaaaaaaaaacaatgcattgaatatactaacggaaattatagttggagtcttcttattacgatttcagttatattggccacggtgacgaacaatctaacgccataagaaaatgtattgaacaagaatgatcaaacatattttgagtttttgtttaacgaaaactatgcattaagacttttatatttttcattaaactaaacatatttcgttgttaaatcgaacgtaaaaaagtttacgggaaaacatccatcgtttctggtgcatgcaaatttctttgctctctagaggttaattctcattttggaaatccattttgatcccgtagacatctaatttctccatcaagtcatgtttggcgtaaacgtgtatgattttgtcttgttttcttcaaagcttatcactttggttgcttcatatctaacatttctcgtatatgctatagactcgcatccatttttgtataaccttttttatcttgattttaaaaatttcttttccgacctctataatttataactataaataaaaaactgtctaaattggattattaatcgactgaccaacgttaaaacttaaccaactaactgagagggcataatggatatcttatttgacaaaattatgacgcctcaattacccccttatagtggcgtcatgatgggaaccaaacgattaaccccctcaacatttgtgtttctcatattacaacgatgcaaaagttgatcgcgaaattatggctgcatttaaatttttaaatattgtttagtgttttctaggaagagtaataatagtaaatataagaattttagaatttcttctaaagtgaggatcgagtggacttgaactcttattcacgatactcctccaaaaaaaactgttgttgtaaatgtaactcaatatgcagtttatacaacaaattttttacttcgagtcatgccaaatttagaacatcacatacattcaaccaaactaacattaaatttatgtgttgatgttttagtgccactaatatgatttgttcaatagttggtacaagaacattaaatgtttgtaagagagataaaaaaatggacatttttatagtatttttgcagcaaattttcggcgggttggtaaaagtgattttgtatataataggtatcagacccgtttagaatttttggtcattcaaaaatcattggatcggattatatataatccaacttttccaccggatatatatttaaaagtcacatacaaatattactaaaattggattgtatctactaattacatttatatatttaataaaacaaaaattagaaaatttggttttgatttaaatttatgattctcctttcatcttttttaaactgttttaaatcatcatataatacataaagtgaaaaaaatctcaattttttcttatgcatatattgtgatttcgaaattttttaaaacggacatgtattacttaattaatgaaaagtgtgttttcaacgtcccacatctgctataaagtttagacaatgatttagattcatattatacataaaattaaaatgaatccaacttcgaatgagtataaaccttaacataacaagcatccaaatttaaaaattgatgtacgaattaaatcattggtaaatatgcttcacattatatttatatgatctgctgaacttatgttggacttttgaattgagtagagtaaagggaatcatgacctcttatttttcgtcattcaagaaaaaagtcagaaagaactagagaagggctgctaaagaagaggaaagaagaagagttgaggaagagaaactcatccctagtctgacagaagaacaatttgcaaagaacatggacttgatgaggaaaaaagttgaccgctttcactgactacatggtggtaaagaaggtggaaaaaaagaagcgaaagatgctaggggcattcagaaagataaagcttgatattggcaactaagaaataagtataagaatgttcagagattcgagaaatttgacgaagaggaagagtaattctgaaattctatctgattactttctatttagtctcttgtacacttgtaggacgaatcttattttgtgttctaaaaccattatgaccaatggtagtgtgataccatttaaatagtgaggaagaaaggctggaaaaacaattaagtaacaataaatagattttgcgactattgaaataaactggtttgcaggtgatcgaggtttgattggaattcaatagatcaatatccgatgaaataagattgatttgctttctctctctaaaagatttaagagagaagatagaaaaaatcatcgcccattaaaaaaaatagatattaagaatttgagttttataaaaaaataaaaattcaatgcattggatattactaaaaggaaactatagttggagtcttcttattacgattttaattatatatagttggccatttttcttcgaatctaaattacggacccatgaggaaaatgaccgttgtctccgaacgggcttcgtgggcttattgtttgtaaactcacggcccattgacgtcttcttatttgattcaagaccagaaaccacgttttgtactgtagtcttgaattgctctgttctgctgatagaatagcaaagttctgttctgctgataaattagcaaagtaaatcttgaatgctagtttgtctttttctctcatgttatgtgtaagaagatgatgatgactctgttaggtaagaaagtccaactttgtaatctaatcagatttagtctctaattgtttacttgtgtctacatataaaagttgcaagttgcagatgttaagaactaagaagtggtatctgcagattttgggtattaaggaaagtttccccctttgaataaataaggacatatactaatgtaaaggttcctcctttttcacaaatcaaaatgtgtttctttgtgttctagtgaaatccaatccattgtgtctctgatgctgagaatcttgaagctttcgacatcttctcgatctgtgccattgacaagattatggcttcttcaactgccttgtttctgctcatcttcttcatcatcgtcttctttgctttctgtgcccagcgatgatcatatcgtccgtctcattctagaccagaaatcagcttctggagctttggaaacttttcgatgggcttcgacttttcctgggtttatccattctcgttccacttaccgtgctctgtttcataaactttgtgttttccgacgttttgatactgtctaccaactgctcgacgaaatgcctgactcaattggtttgcctccggatgatgctatttttgtaactatcattagagggtttgggcgtgctcggttgatcaaacgtgtgattagtgttgttgatctagtttcgaaatttgggatcaaaccatctctgaaagttttcaattcgattctggatgttttggttaaagaagacattgacatagctagagagttttttacaaggaagatgatggctagtgggattcatggtgatgtgtatacatatgggattttgatgaaagggctttctttaacgaataggattggtgatggttttaagcttcttcagatcatgaagacaagtggtgtggctccaaacgctgtggtttataacactttgcttcatgctctttgtaagaatgggaaagtcgggagagctaggagtttaatgagtgaaatgaaggaaccaaatgatgtaactttcaacattttgatttctgcgtactgcaatgagcagaagttgattcagtcaatggtgttgttggagaaatgttttagtttgggttttgttccggatgttgtgacggtaactaaggtgatggaggttctctgcaatgaaggccgtgtgtctgaggcactcgaggttttggagagagtggaaagcaaaggaggtaaagtcgatgttgtagcttgtaacactttggttaaagggtattgtgcgctagggaaaatgagagttgctcaacggttctttatagagatggagagaaaaggttacttgcctaatgtggaaacatacaacttgttgatagctgggtattgtgatgttggaatgttggattcagctcttgacactttcaatgatatgaaaacagatgcgattagatggaactttgctacatttaacacgttgatcagagggctttcaataggggggaggacagacgatggtttaaagatattagaaatgatgcaggacagcgataccgttcatggggccagaatcgacccttacaattgtgttatttatggcttttacaaggaaaaccgttgggaggacgccctggaattcctcttaaagatggagaaactttttccgagggcagttgacaggagcttcaagttgataagtttatgcgagaaaggcggtatggatgatttaaagacggcctatgatcagatgattggagaaggaggagttcctagcattatagtatcccattgcttgattcatagatacagccaacatggcaaaatagaagaatcacttgagcttattaacgacatggtgaccagaggctatttgcctcgatcatcaacattcaatgctgtgattatcgggttctgtaagcaagacaaagtcatgaatggtattaagttcgtggaagacatggctgaaagaggttgcgttcctgatacagagagctacaatccattgctcgaagagttgtgcgtgaagggtgatattcagaaggcttggttgcttttctcacgaatggtggagaagagtattgtccctgatccttctatgtggagttcactgatgttttgtctcagccagaaaaccgcaatccacgtaaactcctcattgcaggacataatccaaagttaaaagctagaggcagtgacataaatgatcattgagctcgaacttgaggcctttaataatgcatctgcaacaaatacgaagatggctccaaactagcaagcagagagatcaagatggtacgtttgcttcttttgaaaatctgttaaaagctttgggagaaaaggagaatgcctaaaatcagaagaggcagattttaaacaagaccatgagagaagggcaaaatggagaattggacatcgtcaaaatgggaaaatgtttgaagcacacccatcaataaaaaaaggacaagaggagcaaaaagaggagagagtcttacgtttcgtgctattcctctctctctcttttatctctctttctcgagaaaactaaagaaaagggggctcttttattcaaagatccaaactttgacaattcaaaatccaacatagaacacggatcaagctttcaaattcagacagagatatgtcgtgttcatcctcatctggatcagaggaagacgatgagggtttcgatgcttaccgtaaaggtggatatcacgccgttagaatcggagaccagtttgccggtggccgttacattgctcagagaaagcttggttggggccaattctccaccgtttggcttgcctatgatactcgcacttctgtacgcatctctctccttatatcttgctttactatgccaacaagatcttaaatgcagaatttgatttcgtaaatttgttttaagcatgttcccgttagtcttctctaattcctttcatctgggctttgatctgttttggtacaagatcttggcttcgtgtgaattaatcttttagataagcaaagttctgaattttgtggttctgatttggcactgcactctgtagttgaccaaccattgcagtttgtttaaatagcttagtaagggaaatgaatgttctattaaatggcgctgttccttaaatgccaacgttactctatgggtgtctcattaactataggcttaatttaatgttttgttctcttttgagctctatctgtggagtccttttaccttgtctgaagcagggaaacacttctacgctcttagattctgatgtttgctcttagaatgtaagatgcccatgactttatattaaggaattccgctgaagtttttctaaaagttacgaattgaaattaaattctacaagctccttgtcacatgtaacctcctctttggctttattctcattagttataataaaccatgtgtttttatctgttgtagaattatgttgctttgaagattcagaagagcgccttacaatttgctcaagctgcacttcatgaaatcgaacttcttcaagctgctgctgatggggatcctgaaaataccaagtgtgttattcgtcttattgatgacttcaagcacgcaggtcccaacgggcagcatttatgcatggtgctcgagtttcttggcgatagcttgctgcgtttgattaaatataaccgttataaagggatggagttaagtaaagtgcgggagatatgcaaatgtatactgactggtctagattatttgcaccgtgaactcggtatgattcactccgacttaaaacccgaaaacattcttctttgttccaccattgaccctgccaaggatcctatcagatccggactaacaccgatactagaaaagcccgaggggaaccaaaacggtacatcaacaatgaatctgattgagaagaagttgaagaggagagcaaaaaaagcggctgctaaaatatcaggaagaagagtttcgatagtaggtttaagtgaaacaccgaaaaagaacaagagaaacttggatgggattgatatgagatgcaaagttgtcgacttcgggaacgggtgttgggctgataacaaatttgcagaagaaatacaaacaagacagtacagagctcctgaagtaatacttcagtcaggttactcttactctgttgatatgtggtctttcgcttgtactgcttttgagcttgctacaggcgatatgcttttcgctccaaaagagggaaatggttacggagaagacgaggtaaagatggtttttaagaaacctcatatcgttttgtaccaaagagttattttctctttatcagctgtttaacacattcttctttactgtcttcaggaccaccttgctcttatgatggaactcttaggaaaaatgcctcgaaaggtacccggaaaaatacttggtttctgtctatctcttgattgatcggttatagtctcgttgatacttgtgatttaactagattgccattggaggtgcgagatcaaaggattactttgacagacacggcgacttgaagaggatccggagattaaaatactggccactcgaccgtttactgattgataaatacaagcttccagaagcagaagcacgagaatttgcggattttctctgcccgataatggattttgcacctgagaaacgaccaactgcacaacaatgtctgcaacatccatggttgaatctaaggacacagaacaatgaagatgatatagaaggtcagatgagtaacatgcagatcaaaggttcatgttcttgatttttttttgcttacaaatgatatagaactgctctctctctctttttggttaattctttggttcgtttccatttgaatattgttaaaagaatatttgttttgttcttttttctttctttttttttgtcttggaagatatgatcaatgactaacaatgggtttcatataaacatataatgtagttcactgctctcttttagtggtagtgactagtgagtgatatcaaaccaaattttaattccgattattcttattagtttgtctttttttgttttttttttaactctaattacaagaaagtttccacattgataatgtaagaatacgtgtaagatggaaaaatgacacatcaaaaaataaatttcagtagatagatgaaggaggtgaggccaactggccaaggcttgatttctcagttgtgattgttactcaacatatggttaagccagagagatggaagtattaccaaatcaagaacacagaatgggagttcctagatgtggtcgaagccaaatttgtgtttcaacaacaccagccttcgtaggaaaataataataatatcaaactcataaaaagcaaaaaaaaacaaaaaaaaataataataatatcaaattcatgataatttgtttattctttagaacataaactaatacaaaaatagaaatcaaaatgggataatcagtccagtagcaaaattatcccaaaataaagtgtatatatccatataataatcatatttttgacatacttaaataaaaatttctatttcacgtggatttggaatattttgttccatttgtcacgttctaggctactagggccagtctttgtagcaaagaaacatattacaaagcagttcaacaattggaaagatgaaaaaaaaacctccaaattattttctccaatttatgtctccagttatatttcactttaaatttccattaaaaccaatcaacacaaactccaaaggcccataacaactacaaaacctaaaatacactaaaacaaaccagctcatgcggcaaaagaatgttgcatcttgcagtcaaacacacagaaacaaggatgctaaaactatagcaaaaagttacccctgaattgaaacaaggcaaaccaagacgttagaaaagagaccgaagtaagaatagttcgttgagttcaggataaaagatcaagatgagctctaatggctacatgtgatagtgagagtcgaagacctcaaagaacctgaatgaatacgaaaattctgtttcttttaaatcacataaacggctgtttaatttggaagatttcttcactttcaataacaagtctaccaataaccaatagatataagatttatgaatcactacaaaacaaaatcatgaaccaatagatatcatcatcttattgacacccaaggattaacactaacaaaaatgtaattatctaaacaatctaaatggcaagatgggtttcacttcacatgtgaacgtgacggtgacggatcatttttgttgtgggttgctttgtctttagacatttgcaaaaggaaaaaaattgtgacgttatatctcctccaactacgaatattcacgtgaatctgcacgtgacccagttgtagccacacaatcaaaaatcaaaaaaaaaactttttgttattgtaattagtgaaaattctcttcttgaaattaatatagatcttattgaaattattatttttatttaaacaacacaaagaaagaacacaagtattttcgaagataaattagtcttagcactgggagaaaaatgacttaaaacaaaagaaacataaaggcaaacaacaaaaagtcatcactttaataacaacacttacactgattaaacaaccaacatacatatacaaaatctatgtatctagatattattcccaaaatatacaacataaaatcaaacacattacccaaaaaagcaaaacaagataaaaataaacaacattaagattgtactgaaaatgacaatgctgttgaatctgcaccttcttacctcttttaggtgtaaatacatataagaagactatgaacgtacaactttgttctgcttcacacattccggtgactttaagtcctgacacttccatgatggtcgttctataacctgagccacaccaccattataaccttccgacttacttacacttagattgttttcctctaatgtgataccgttttcttgatccttgtaggcacacatgctcaaagggagcttcactcttcctcttcttttccctaatgagctactctcttcctctgttttctcctttagcgtgttatcgcataagagcagcttcccgtttactctggttccgtcatctgaatccacaacaccagcaacatcattcccatcgttcatagtactagtcagagtcttttgcttcttgtttctgtgaccagaacaatccgtcaagactctaggagaattgtttatagctcgaatcaacctaggctctttacaagaaaccgtctcagctgcgggaaaagaagcaaacaattccaacgcattcttggctgcagccactgctttagaagcaatgatggccttctcattagcagtagctctcgccgcctttgcaaccttaaccgctaaagcagcggttgctttcgacgcctgagcaagctcttccggggaccgagtctggtcattgagtagatggtcgagatgatgagtgtgcacaactgctgaagcagaggaaccatttgaagttgtagtagacgaggacgaagaagcgaaaggaggactcggagattcattgctgattctcgagttctggttcttgaatccggcgagtaaacgcttccgtggaggtagaagcgaatcggactcaaggcacgcatttgtcgccatttatctcgaattaaaatcctaaatcaggatcacattatagaatctgtaacaatcaatacttcaaacaaagaccaaatcctcaaaaacatcacagatcaaaatatttaatccttaaaaccaaattatcaacacttgatcaaacaaattctcataaaaatcataaaggagagaatttatcaattataaggtggtgattgatcaaagacaattgctcagagtttaagaatcaagctagagagttccttatagagtacctgaaattacaagatgaattcacgaggatgctttgaagttaccttatcatctctcaaacagagatgagagatacaaacacagagagattgagagatggagaaattagggttttcagagaaatggggaagaagatagagaagagaggagatttgttttgtattgttgccatcgctctctctgatccgtttttcgtttttatatgtaaaccctacgaatatcagttttaattatctcttaattgttatttttttacttctatctaaattaacttacgtttctttcttttacatttaccttttccatggaaaagtaaaccagaaaattaacttgacaactactatttgcttttcgttttattactaaactgtaataacggccgtcaataactctttgtttttttgttgtttttttatttcttaacggagctaattaataagttaacagtagtattacagatgtagactttctatttgtagaaattaaaaaaatgacttcatagatgtactggaggcctttttggcaagttcatggcacatttggtagcaaaagtgtttcaagaggaagcacaaactatcataaactcaaccatttttctttatcaaaaaaaacaaaaaggagtctgcttaccacaagaaaggatcgatggttcgaaaacttgacgtcaacaatcctgcaagagaatttttctgatgaagtaaaccaccataatttattggaagaagtctgatttgtgttggccgactcaagaaatgctctctatctatagtaagctccatgagcgtataatgaatgaactcccactcttccacttgcctctgagttttacaattcattttcatacgcttcattagtctctaattgttttaggcccatcagcaaaaatatatacaaacaagcctgcaacttcttctttttcttggcaactataagccggatcatttatgggattagcatattaaagtctgtgcttttgtagatataggaacatctcatgtttcttacaaatttaggtacttttatattatatggatgactgttttatccttcaatctaattgagtttcttctccttgtaccttcaatctaattgaggagaattcatcaatatcaatcgatctcagaaatgtgcgattatttctctctctttctctttctctaatggcatggaatctattgcctctaaactcaccattgatgtccattgcttctccatcaccttacaaaattcagatctatgcttggccaatcttcttcctcgacgatgcaggtggtaatcttccatagcttttttgaatttgaattgtttgatctgaattaatttcatcctctcttgcttcaatttcaaagagggataagaaacaattgaaaattttaatcgactccaattatttaagattagtatatttgggttccctatataatatcttcttagggtttagctttcttccatcaaaaagcttttaactgattttattggggtttatctgaattgtatggtgatgaaacgttgttaacagattttctaatttttgtctctatcgattttgtttccgtaaatacatcttttgtgtatatattgtcttgtacaaagaaacattgattaagtagagaaataggataatcaatctctgtacttaatacatcatccattgaagcaggttaggaatcgatccaatatgaggctctgcaaaaacaattcagagaagattctgcaaaaacaatttaggagaagaaggagtgaaatcgcaggggcaatttggtcaattcatttcccaaaaactgcctatcttcataagcccaatcataatgtgctctttctctaatttatggcccaaaatgtacccaatattataaaagccccagtataagcccccaatttctgaaagtttttaaatttgcttttatttcctaaaacttgtctataaaaaaaatttcctgtaaaacttttttagtttgggaccctaaattttaaaaccggccctatacaaaaccttgagatatctatctcgttggattatactgtatctttaagaatgttgagtgacatttcatgttcatacatacgtttgaaggttttcatcgaagtggctctcacttaggatcgaaaccttgtttaccctcaggcctcagtattatgttgcatataaatctttttataacgaactaatacgcatattgaaagtttgtaaggaaaatattttgtagtaaaatctagaccttgttatattggttcagtgacatagtgaatgttagtacaaaatagctatttgttacaaaatccacataagatggttgtatttatagagctaagtaaagtcttcatacaatcatgtatgcacacatgtgttggaagaaaaactactcttaaaacataatgataatggccaaaataattgatgctaagaaaattatcacaatagtcaatagtggtctgtctgattcatcaatgcaaagcagacaactcaaacccacccctaaacaagtgacgactatacaaatgtttaaatttgttatgaatgtgcagtctccattaaagtttagaaactctttttagtattagtaaaatatcagaagaatctagcttccttatactgtaagaaaacatatacagttaccatgaaaactcccttcttcaagaaaaacaccccataaaaaaaaacctatttacagaaacacactaaaaaccattcatattcaccaaaccaaaaccaatcagatctgcttcaacatcttaactcttatcttaagttcttaacatatttgtcttcttagatccttaacaagttcctcaacaagatctgccatgatcataccttcaacttctttccccaacacattaacttcttcaccaatcaaagcactccatggaaacctatccatgtcccaaccaatgatcccatccaatgaacaaaaaggtctctctggctgagaatataaatactccgacatgatcttccatgttgattctaacagatatttacctcgtatagtcgttgattcagacacagatgaactcaaaagtttgttcttgaaacctgactttgtcaatggtccaagcaccaccgtaagtacttcattcagaagatcaaacagtatgttgtgattttcttcacttatagtagtctctcctgtgtcgtcgtcttcttgattctgattgcttcttttcttgagattctcttttgtttcttcaagaacagacttttttataagctttgctaatggatcccatctagacaatgatatatctgatgtgccttcatacaaaccagaagccacaagaagatctctcacaaatactttgtctggatttcctaaatcaactatggtctcaatctcttgaatcggttcttcttccacaggtgttcgcacttgtacctcggattcaagctcatttatctgtcttcttagttctgaatagcagaaacagagaatgagaaacaatgtgacacatttcaagaaaaaagagaaaacatcgtttagttttcttaccacttagattggaactaatgtctctgaaaacttgaggcataccattctcatccgatacagtcacgtcaggtgttgaaacctggctgagataatcgacatttctccagaactcttctggtgtactactgcagactgatgcagggcttggaggcacttctgttgaattctcctgagaaagacagaacttgttttagtttagactataagtaccaagtcattgataaaagagagagttaagaagttcttacatttcgatcgtaaaagttgttaaacttcgatccggtcacgaagtctttgattgattcatcctcgaaactgtttgattcgatcattgaacgtatcttcttaccaaagattcttcctctaagagttgatctaaagctggacactttcttcctaagattgaatctttctttcctcctgattggatcaacaacaacaggttctgtttctgattctgtttcttctcgctctgttattgtagcctcgtgcttcctcatgatctgtgcgcctgtcaaaacatgccggtcctctaacaaaagcttaccaaacgatgtccctgagacaggagcagatagtgatcttttgagatttcttggtgataaagactctttcttagaaacatcttcttgattgatttcctcagcttgtttcgctgcatccgacacagtaggtcgcaaacggctactagatttggtcacagaatcatgtgaaggagtcatctcttttctcaaaacattcttcaatctctctgccaaaagttttctagtatctctacttataaactcagtaggagagtctggtgcattgcactgaacctcactcactgcatatgatctcatcgattcagacctcggagaaggtctttcgctgaaaggagtctcgatcccgcttcctctaactgatgaacttctcttgagagctgcttttccttgaagctcaccttttaacctctctttaacttcctcaagaaactcttctatactacttcctctgcttccttccattgtcgtccctgaagaagtagtcaacgaatcttcgtaatcataagctctctgaagaccaggtctcagtacaacaatcctagttggagcagttctatcagatttcaaggtaaaatctctaccaaagctcctagttctcgtgaaaagcctctctttattctcatcccgagccaccacgcagcccgaatcaacgattcttgaacaatctttaaaccttttatcagcttgccaagcttcaaactctcttctgaatctttgtagctcctcttcttgaggatgttctctacgcattggtgtctccattacatccaatgcggtcactgctgaagataacctcccttttctacttcttcttcctcctttctcatcatcaaatctattcactttactctgacgaggatagatccaagccgacgatgacttaacagactctaaaggaagtgcatccattcccattaacttagctacaagactcggcgtgttctgcttatcgttggaacgtttcgaaagctcctcgattatcttcttcttcattgattcctctattggataacaacttctctcgtaccattcctcttcctcaaatccattactctgtttttgttataataaaaaaaaagattcatttacaagtttttttttgttcttttcagttttagatataaaaacaaaagtatgttcgttattatttatttaccggtttatctttcccgttatggtatgtatgaaagttgtcgacttgaagctcgaaactatttcttggagcttccagatctgcagaaaatattcaaagacaactaaaaatgagtgattgaataatcttcaaaaaaacccagaaacaagatttgatctttctcagttaatatcatttaattcagtgaaattgtttaccttcgtcgcggtttttgtgatgagagaaaactttacgggagaaactgttgttgtggaaatcgaagagatgcaataatcctcccatttctccggcgattggagatctccggtgaagtgaaattaaaaaagaaaataagagaggatgagaaattggatagttcaaacagagatctgatgactcatcagagaatccgacaagagagagtgaagttcggaaactggaactatgaatttgtctttaaagagagaaagaaactttattaagacagacaaaacagaacagagtaataagagagacagattctgaaacagaacagaaacaggtttttacgcaaagaatcgatcgagaaaggaaacaaataatatcagaaatggaattgtcttctcgtgaatcaatgaagcatcgaaaaatggagattgggaaaggatgagagaagaagaagaagaattgggggagagaagaacagaggaaagtcgttttcagacagagagagagagagagaagaagaagaagaagactaatggtgattagtagtaaggaaactgacgaaacacatctcatccaaagtacggaactccggtcgctttctcacttttgatatgagagagagaaaatgataaaacggaattttgcagaagagagaagaaacgtggagattcaatgataaaacagagtattcttctccgggtacgtacgtggttcctgtgagccgctccaaaatttttagtagttattattattatgttccaaagttaataattgttgattttcattattggttgagttttttcctgttaaccgttatcattaatctcattattttttaagaaaaagaaataacttatcattattgtcattattgtgaataagtaacaaagaaaatgatcatcaagaattattgaaattaattttctgttttttttgtttgtttggtagcataaatgttttgagtattaattagtttggcaggacctttttcatgtatatatatatcatgaataaaagtgtacatggaaggtagtttttaaaaaatatctaatttgagtaaacttagaaaatcgaaaattcgtcagagaagttgaaagattcctttgtttctatactattttttggtgaggagaaaagaacaaaaaaaaaaaaaagagtaataaagtgagagacatgaaataaataaatgagagaatgaatgagaattctcattctcttttgtaagttggaacgtgaacagaagggtagttggattgtgaaatcagtctcttcggtactaactttcaatttaataatttaagaaatttagtgcaatcaagattaacgtaaaagttgaccacatacacaaaaaaaaagtagataacttgaacaacatactatgtaacgaacagctcatggttggagacatcggaccgtcatttttcttatgatcatcaaaattataccttgcttctttttttcaattgttcataataactctggttttgcagaagaaataaaacttttaatttggcgtttaactgatttaaatgtgttagaaaaaacgtggatgtgaaaatttgggaacagatgacgagattaccgtttttaacgttattgaacgatttatatgatatagcggttaggaacatctattatatatataattgcataacatttttaattgattgataaataatatcataactgatagtcataaaattactaaaataaatacaatatttcttttataaaaatagaaaccaaaacatatattatgaaaggctgaaattttatgctaaatacatagtagtataaattattaaaatatattttaaataagcgtgaaacattttttatgtatagatctcttctcttattacatatatcaaatatacaagattttgatatcataatattatatagaaaatattaaattttcgttacaaaaagtatattttgatatttttataaattttgttaattactaacacacaaatgcttgaaagaatgagcataaaatttaaaacgaattaaaatgttataaaatgctaaaacggtttgtattctcgtatcacacatgtataaaactatagcgtttagaaatggttgcaggtttgcaaacgatttggaaacaaccaatcatccctagcttttcatctatttaataactaaaaaaattgcatcctcatggcagcgagagaatcgaacatagagaaaaggacatgttgtggttcttagttacatgtcatacatatgtaacggtgatttgttttttcccaacaaatggacacacaaaaaaagttctaacatgttttctaacacaagaattctaaaatcttaggtccgaaaaatttacacaatagggaccgtaacattaaacaatctattctgtaaatagaaattcgaatcccaaaatatatttttgttaaaaaatgtttgaataatcatccatgttcataaaagtggacactttttgtttgtttgttaatgtggcgacttgcattttaacaacactacaaattatactaaactatttctcgctataagaatatcatttagtaacgaaatattattaccaaatagctcatatgaattaaaactaattacgcaccctataatctatagacgttgctgcatacatgcaaaacactaatcccccattacaagctttagttatgtatattaggcctaatttatattccaattctatatataatatatgcatggatcgttcctcaaagcagttgcaagaaaaaatctaactaaaaaattattgtaataacctagtggctcttacgattgattaataagtcatctacgtacccggtcaataaccctcaaattagtgtctaattaatagagtatgttatacgttttaaaaaataattttgataccacccaactacctattttatactaattaattaacttagatttattatcccataatttatttatctatctttttctataatttcatgcatgcaaattactagatttgaatatatagataaaattaggaaaagtcagtaggctaagagttccgatcattatcaagaaattcaaacacaaaatataagttgtttctttgttttttttaagaaaacataaagagcatcaactcaatttccacacaaaaaatctaattcacaaagtaaacacctaacacaacattattatagcccatgaaagctaaactaaataagtaattcatatactacaaagaaataaaaaggtgggaatcgataagaatacaatacaatacaactcatggtgatggtgatagcattgtgggggcttttagttgtaaagttatgactcaaaacacgctttgtgatttttatatctatttattttatgtattaatgatggatcgtcatgtgcttcgtatcctccttcgactctcctccattattacatcttttatttcatctcatctttttttaattattttgagagtattatgttaaacttctcacaacattcatttatcgcctacacctgtatatatattcacgaatcctaactgtacattatagattttaagaaaataaactaagtgaagccgtagtttttagacattttgaaaccctagagccattaagaatttaagactgtgccacgactcacgaggcccacgactaccatatattgcatatctagaaaacctcatttgtttttacgtgcctaactactattgtgaaactcatacgttgaatgaatgaatatatcagaattaatatggtttagttcctatacggctatacacctagatattcgggatttatttaatctgctgtgttgacaaaaaagaaaatttttgttgtgtacaagagatttataacttgtttttttttttgagttatattttagagtttaacgctactttgatttgaatgaatatgttcagacttgccctttttaatgtatcattcttttgtttgaacaactgatgccaaataatgtagttgatttcgaaaacgattcgaaatgcacacttgtaaaatctctattactgtatataatattctttataaggtttacaaaaaaataaaaataaaaataataatatttctaacaacataaagaaaggcactaaacccaaacttacacatctaaacatcatctatatgggaccgaccataatcatttttgtctttgatcacatcagtttctaaaagtcgcatcagactcacatgcaatcgaattctacctctcctcgcggcttctttaatcatatcacaaaagatggaatagtactttactttctatcatttgttcctttctaggttggtcccaaatagacttatctactaggcctatagatatattaagtggcagcaaagtttaggagaaagcctgataaccataatctcgggcttttaaaatcttagcccaagatttacgacaatgtgaagggaagaaagctacaacgagaaacaggaggagagtcttttgtcaagaatcctcaagacaactaggtcttagtacgaatgtaagcttctgacttcaatagggtgaacaaataaccataacatacgacaccaaacaaatttttttatgaaccaattgattttactagtttcaaacataaaatcagatgtaaataatacattgctgtccacatattttggtgtatccaaaacaaaccgaaattttcatcaaagccaagaaaatcaaacggtattaccataaccaaaaaaaaaaccttaaaaaagtaaaaaacaaacaaaatcttaaaccattttacacctagtgtcccataagtaggctccaaaaccattttattagaattttccttaaaaatatgcgagacctgaccggaaaattcatcaaatataagatactcatccaacaagttctgatttaacacacacgagtaaccaagaatagactccaacgtaacgccaaaagaacaatagcaagcaaacagataaatggtatatatgacccaatccagtaggaagattctattccaattcgttgttagagatcaaatattccctcagaaaaagccagaaaagtagaacttttgtcagtcacacaagcgtcaaatatcacaagatgccaaaattcagagacaactaactcaaaagtagaaacagaagtcaacaaataagcataagtagaaataaaactgatactaaaactcatacaaagttgaagaacatatgaatactagtaaaacataaggaaataggggaaatatagcagtcaagtgatattatccctacagactgacctaaaacaacattgatgtagcaaatgaggttcaaatatcacaaacacaaagcataaataagagttttttaaaagtttttggtcataaacctaagcaagtttacattctcaaatctgagtcaagtcaatagcaagacctagatgcttcaatcgtcgtcttctgcctcctgcaaagcaaaaatccaaagaagaccaatgtcaaacatcaaaatagatgtaaaacataccaaaaacaatagagttcaagtctcagtcaaaacctcttcgcttactgcttcatcaacttcagacttggatttgtcagagtcatcctcttctctattggttccactagcctaaacaacattcacacaataataagtctgtttagcaacagcataagaagaagacccaaaagaacaatctctctatacagtgtgagagtttataccagtttcaagttgtactgttgcacattcttaatatattcagtctttctgctctcagccttagcgacgtaaggagctttatcctgtaattacagattcaaacaagcacaaagttttaaatacagatctacaaaaaccttattccccaaatcaagcatttcaatggctactattattatgacttacttcatcagtcattgccttccatctagctccagcagccttaccaacctgattagacaaaccaatccgataattaaaccaacctaaaccagttttcagattacagatctgagaaatttttccagaaatttcggagaaatatatactcacagtagcgacggatttgttattaggattcgctaggttaaactcttttcggaaatcctcactaagatccaacaacaatcagtttaaaatttgattagaatcgaaaaatcaattcgaaaatttgaaaatcggaggaagattcgtgaaattacaggaagacgaagaaagcacttggaggtctcttaggttgatttggatccttcttcgtcttcttcccagcctttctacctctggttttgagtctaataaatcgaaaaacgaagaaatcagattttgaagatgcgaaaacaaatctggatctcagagtcggagaagaaaccaaacctctgatcagtgctcgttgcttcagctttggattcgccgcctttcatgtcgaagtttctgcaattgaagaatgacaaagaaacgaagaagaagaagaagatcgttagagaattgtttgactcggactgagtttggggaaaacggtaggagcgagtttttacctttaggttttttttttttgtttgacgagagagcgtatgagtgagtaataggattttttttttgggggggctttagatgcgatattataataataaaataatatctatttttaaaataaaggcgacttgaaattttgcactgtggcgggattttttcgtgaaggagcgaaataatttgacacgtatgggaaagaagagcaacggacggaataatggattgtgctcttcaaatcctgaccgtccatttgacacgtgtacctgagcttgcagatctcgcccttaattacattcataaagttcttcaccaattgacgcatttgctttctaataaaccccaaatattgtttgaccagaagagagaaagataggaaaactcgaaccgggtttgaccagatcaattagatttaaccggtaccggttatttacattttttttcccctgtaaaatattcccctcccctcttttctctcatcgctcgctgcctttctctttcacagtcagcgctcttgaacggagaatctcagtcgcgccgtcaactttttgttgagaagagatatcatctgttttcgatccaaagaatagaaagcttggattccgaaatctccctttttgcttccccaattcgttttcctttacaagctcggcgcttgatctcgctatctctcaggtaggatcgagctatatacaacagtttctcaattttactagatataattgctttagattttcaagtgctcttgcgtttctggggttttgttaagattggagtttttgtttcttattctcgaaatctgttgattgattcgtttgatccatcaatgtttgtttagaaattcaaaaagcatgcaaatttgcagattctttgtttgccttgtgcgaattctatttccgtattccgtatcgaaactaaaaccctgactaggttatgtttcaagtgtgttttttagttttctatttgagggatattttaactaactccataagtttggggttttgtgaacagccaaaagtcttttctttcgtgacatcagtttcttggtaaaggaattcgatttcttcacctaatagagaatttattttagaactttggactgatatgttgaacattgatgctgatttggcagaaatggatcgtttgatatgatacgtatctacatttgtagaactgattttttcacctagaatttgcagcaagtaagactagaatgaataaaggggaagcttgtattatttgttgttaaatgagttgttcaaagagctttgtttgatatcattgttgcttctttgttacatgtggatagtttaggatgctacttgttaagtagtaagtactgttaaggtgtgtagaacttatatttcactgtgaaacgttggagtaggttgccgtttgtgccgttagtatatcttgttttcgccttttactgacaagacttatgaatgttttgctttcccgtagagagctgagagctgaggatattggaaatttggaaggtggaatctcaaatggctgaacttcctggtcaaataagacatataggcggtcgaatgagtcaactgctagagcagatatatgggttttcgagaagatctttgtttcgggtcatatctatgggtcctataccttgtcatattgcctttatcatggatggaaatcggagatatgcaaagaagtgtggtcttttagatgggtctggtcacaaagcggggttttctgcgcttatgtcgatgctgcaatactgctacgagctgggtatcaagtatgtaacgatatacgcatttagcatagataattttagaagaaaacctgaggaggttgagtctgtaatggatttgatgctggaaaagataaagtctttgcttgaaaaagagagtattgtgcatcagtatgggattcgggtctattttatcggtaacttagcgcttctaaatgaccaagtgagagctgctgcagaaaaagtcatgaaagccacagctaagaatagtcgggtagtgcttctcatttgcattgcctataactcgacagatgagatcgtacaagctgtcaagaaatcttgtattaacaagtcagacaatattgaagcatctaattataaacacgaggatagcgatagtgatatagaaggaacagatatggagaaccaagagaagaagatacagttggtggatattgaggagaatatgcagatgagcgtggcgccgaatcctgatatactcatcaggagttcaggagagacgaggctgagcaattttctcttatggcaaacaggtaatacccagctctgctctccggctgctctgtggcctgagattggtttgaggcatctgctctgggctatattgaacttccaaagaaatcattcatacttggaaaagaggaagaaacaattatgattgtcttgaaaggagactagtgaaggatatacaaaagctctcttctctatttggctttgtaatgtgatgtgatgctcttgtggtatactatcaaaaggaaacttgggattacatagaacaagcaatgtattttacacacgaactcatttgagtttttctttatgaatccttaaccaaaactccaaaagtcctctctaaagacatcttacttcctgttctgtcttgtaagatccagaatcttaacatttgtgtttcacgagtgtttttttctcaaaccaaaattaaaccaataaatttagttcgttaatggttcagattgattgcatatatcatggaatttcggtttagcgatattaaaacaaggaaaaccgggattggtatccaaaaccgtaccgggcgtcaagtctggttcggtaggttagagtacacgcttgtggcgaacttgcaattggaaacctaaaaagtcgcgactatgctctctgcaaagatggttctacttttggcttaaagagcaatgttttcgagtctttgccatggcgggtttcattaaacgcaaaggcaacgtattttttcattctcaagccttagctgctgtctactccaaggtgggtcattcctcctctttggattctttcgtttagtagattcatttctctggggcaattgatcgaacacttaatctgctggtttcttcttgtctctagttgcagagaagtaattgcacgcttgctgagggattcatggagaagtgttctagcattcgtcaagttattgatgaagatataaattcaggtgcttttttctttttgtgatacttcctaagctggtttggatgtaattacatgttctaagttaaaggttgttcctttttttttctggtattgattgattttatcagttgatacatctaagtggaagaaggtacgagcaagtgatgctggaattaaaaattcaatgatccctgaatcctctatgaatgtcttgagactccttagacgtcaaggtttgtgtttttgtatgttttaggtttactgttagcattgatgtagaagtattagaggaagctgaactatttgtttttctggtcttaggtttcgatgcataccttgttggtggatgtgtaagggatttaatactgaatagagtgccaaaagactatgatgtgatcactacagctgatcttaagcaggtttagtggattgattttctgattatgttaccttgttcaagaccttatgttttgattattgcttcacgcatctagtttgtttttatagatccggcggctgtttcatcgtgctcaggttattgggaaacggtttcctatttgtcatgtttggatgggaggttcgataattgaggtcagttttcttcctaatgttagagttgtgttatttgtcttctgttttaggcttgtatatggtttgggtatttcttgacactcctcttataggtgtccagttttgataccgtggcacacagtgacagtgatttggagaagtctaaagagaaatctggtgtctcactggataccaaggcaaacaagaataacagcctcttcaaaatgtattctggttgggacattaaagactgcaaacgctggaggaatagcttgcagcgggatttcactattaacaggtggagtttctggaaacatttacttgtaccaaaagggactattgtatgttttgactgcatcaatcacacccacttacttgtggtattaaatcttggtgcagcttgttctataatccctttgattttacaatttatgactacgccaatggaatggaagacttgacggatcttaaggtgactaactgagcttactttttctggttacatctatagtatttcttatgttattaaccattcttcgctaattcaaatgcagcttcgtacacttgtccctgcacatttatcattcaaggaagattgtggtatgcttattaattgtcctcacggcattgtatctagacacagtactttatgtagtttaaagttctaactattttgtcatggttttctccaaatacagctagaattcttagggggttaagaattgcagcacgattgggtctatcattgtcaaaggatgttaagactgcaatacctgaatttgtatcttccgttgcaaatctggaccaggtacattgactgcttgaacttggatacttggaatcacttcctttatgttaaatgtccatggtctcagctattaaaatcatgctctgtctttgctcagtttagattaatcatggaaatgaattatatgcttgcgtatggagctgctgcgccgtccatccttcttctcatgaagttcaaactacttcatgtgttacttccttttcaggtatacccatttgcttaatcttcaactctctctctctctctctctttctttttaacactttaaacttggatgaatttgaatttcaggcagcttacctggatcaagctagtaaaacatctctatcaagttccttgatgctagtggtacgtgatatcttcttgcaaggagcattttcagtgaacccattttgacatttctgcgtttggtttatggtttattttagaggttattctccaatatggataaattggtttcctgcgatcaacctgctgaccccaaactatggtgcgttatttctttatatcaataggaatatggatcttctcttcaatgagttctggttaatgtcctgatttgttttacacaggattgcagtgttggcttttcacattgcactagtgcgtaacccccaagaggctattgtggtgcgcgcttttgctgctttgctctaccatggaaactggagcaaagctgtcgaatttgctagagaacatgaaacttcagtgatcggatacgctcctgaggtatctaaatcttcgagaaagagatctgatgaagatcttgcagaagcagtttcagaattcacatgtctattaaaagatactcaatacgttctgactgataaagaggctctccgggaagccctatacctatacccggatttcaaattctctggtttggtaagtacaaacaatgtgcatattactattcagtgtacaaagatttattgttttaagacatatatacgcagtttaagtttgctaatctatgtttggtcttgtgctcaaatcaaactagcccagatatctgcttcaccttttcttaatctagcagttaacgctataattgattgatgtggtttctcaggtgtttataccgaagaaaaaggggagagatgtagcagaagggtttatgagattgagtgatgtggaatcatatgaaagccaaaaagagggattctctatcgactatgtcttgcttgggaagggaaatccatgcgaagtaagatttgttcttggcaaaatcattctggacaccatcacagaaggtaccgtcatcgaacctctaaactctgtcaagaagaagcagagcaccagaaatcatattgttccagcggcttgcttggagaagaaggatgagttgttcgtttctaaatcgtcaaaagaggataacaacaatcaaactccagtccatgactcaaatgcatcatctgttctaaagattttgaagaggacgagagaagacagtgagcagaacaatgaccaagagaccgaggtatgtccaagaaccccctctggtccagcaaagaatcaagatcagtctgtagttcaaatgcttaaaagacggcgtagcaaagaagcaccagtctctgagccgcctaagcaaaagacttcaaagaggtcgagatcagatgaccaagaggcggttggaagtctctctgttccagcaaagattcagcatcagagtaacaagcatgacacaaatgcaccgatctgtgagctacctaagcaaaagacttcaaagaaccattcgaaggagtcacgaaaagtgaaacacaacgacttgcctgtgaaggagattaaagaagcaaaacaaggctttgtttctgacaaatctatgagtgatcttctacaagttcttgagaaatcaagtcagcaagtgtctagcaaagaggagaacaactctttatcatcagagaagacgaatagaccgagaaaactctcaagtctcttcaggtgaaatggttaccttattggtgtttaggggccttaagtcaaggtggagaccttcgtgacaaagcataaggtctcccttcagtcacggtctcacttcacaatttttaggtacgacatgtagtagtaacttgaaccaatttgtttcattttgttttttatttggtcactggtagagagaaattttggccctgagtaaatgatatatttatttgtatgtttttttcatttagattcaaatagttttcttcgtttttctgcagatgacattagtttgtttctttatcagaagccgaaactattcccttattactaaaaggaaagtacaaattgaaaaatagacaaatttggcttcaatttcaattttggattttgtacgtcaacattaaggataatttggttaacttaatctattaaagcttataggatctgcatttttaattttgggtgggtttggagtaatggtctcttaatcacggattcaagtacctaatcggatttagcatccaaagtagacaatcttaaccgttcaacaataattagtatctctacttcattttggtatctaaatatgagcatatttcatcccaaagagaattataatcacaaaaaaatatttcaaaaaaacacttataatcacaaaaagaattacatcacttttactattttacatttttgttactactttacttatatttatattacatacacatttactaattaatacacatatttaaacacaataaaacacattattctaaatactaaataacaaccaactaataaaaagtctcaatcattatttataaaaagttttttaaaaatgtattttataaatttacaatataaaatataaccaaatacttaattaaaaacccatataaaaccgaggcccgctgtaaatcgcgggttaaaacctagttattacaaaagtccttgacatataacaaatatcgtttgaactgacaggaaataaacacaaacacagagatgatccaggatatcgaagtctttcgatctcaataaatccgtttcctgaccatagacatgtctccagactgtccatatatgaaataacagtgacaactttatatgacagcaattcacaacagtttattagtcttttattaaaaaaacaaaaacagtctattaataaaatgtaaaaattagattaagaccaaagagattcatgctgcttcaatctgctaatgcagctaagtaccagtttactagttcaacattatatcgcgctctggggctacgatcgagtttagaattaaaatctcgaagacactgataagaacaaatagctatcccattagacaactttaaatatacagtactcgagcagcggttgtcacagttgtggcacatcagtcgagtgttactactgttgcaaataacttttatactcaagtttccgaaaagcaacgtgtagcctggcatcatataagcggaccacccaaatacacaactgcggtggatagtgatgtaaggtttgctgcatgtgtagaaccattcccttggatctagtatcccctcgcagacttcacaccagtatgtttgatctgagacttctccgtaacaaagggagaaaggaactgcatcatatttgttgtgtagcttatctggaatggtggcacactcataacatagaaaaactttgcatagagtacactgtagatagtatgacgaggttgagcctgtgtgattgcaaccattacatagtctcgtatcatagttatggatagggaggaataagggatgttcatgacttttgtgggtgaaacaatcaggaactaagatgcatctaacatctacctggaaccttttttgctggtaaatacgcgtacatctctttttggagcacttgtacacaaaaccaacggtcactcgctcgcaaactgaacaatttgaggaatcccatgcgtttagtggaaccgggtctaggaaaagagggtgattatgcaatccatgatctagtttccgaggaagattggcacatacctcatggagaacataatcacattgaaagcagttgtagaaatggcgagagtcgacatgaaggacacacgcttgacattgcttatccatgtctcgaacacggtcatacttctcaagcttcagatgatgatcatgacaaaagtacttaatcaaatcatcaccaacttttttgaatggtgcaacatcttcggtttcgtcaaactcttcaggttcccattcgagttctctcccatcccatacatttttatgtgttgcacacttggaatggactacaaaagagcaatcatcatgattgcacgtatactggccatagttgatatcaactgtctcgtagcaaagacgacacaacgatgaagttgagggtgaaagaaaaggagtgtaaaaaagacgatgagggtgacgggtgatttttatgacgcgtggtaagtctatacaatccttgtggaccacgtaattacattgaaaacaagcataacttggtctccattgctctaccaacccacaagcatcacatggaaacaaaagaggtcgaggaaggaaaattagtgaatggtgatggctttttggatttgagatggtaggaagtggaaagctttgggaacaactagaatccaaagaaaagttacagatagaacatcgatagaaaaagtcaaaacttcttaaatcatttccacaccaattgcagttaccaagaatagaactatcctcaggtattattgatgatacgtcgtaggaatgtatatcggaatcatgtatgatgccggtttgacggtcttgaacactgaaaatgagaggatgttgtgggtgataagggtgtgtcatcttccttggccgcaagtagcaatactgatcgaactctagatcacatgtggtacagaaaaaatagaaataaagagaatgccttatgaatgtggagtctgagcttgcaaaacaaccagacggagggtgttcaccatatcgacgggagagggtgtgaggatgagatggatgagacaaacgacatatttcttcttcttgaccagatactttgctagatattaatagctcttcctctccgccataagatatcgtctcttcttggccataagacattttttactctttagatctctttttctttctctagtattgtcttctttttattgttatgatcaagatcaaatacgagtgtctatatatatatatatatatatatatatatatatatatatatgtgtcaacaaaaattaactagcacataatttcatacgaacaatgatccacaatacaatacaacagtacattaagacgaaatggctacaggctgtttcgatctactttaaaataaaatatgtctttgcttattttggaattgtagaggggagctactatcaattatatataataagtttcgatttactcattgacttttatagttttgtaatattgtgctggccttcttactttaaataaataattttactggtattatgtttaaagtataaatatattttataattgtttatgtattaaattattgtaataatgaatttaaatgtagaagttatgtaaattctaccaacttttatgttttttttataaatattttaaagattatagtttaatatgtagtaatttgtaaagtttaaatgactatttttctaaatatacgatatatatattgataattaatttaagtagaattataatcaatgataagtacacgtgtcattaatatagagtgttagatgattaattttataagcaatttgtgacaaagaaaaatagaacggatttttcctcgtgacatgtctccggtctgtccatatagttatattattaatttaaaattggatccgaaatgtaatcgtgaatttataaaagttgtggctgtctttcccaaacatgtcttgagagactatgataacctatatgacagcaattaacctgagtttattattagtgttttttgattatttagtttcaatacgtaaataatccaacgcatcatatgtcacccaataattttataccattcggctctatgtagactttgggctttgtttcttgtttatgtttcggctaggctatctttttttttttgtcaagatttcggctaggctattttagtttatgtaattgtgcatgaattgatttttttctgctggaccgtacatatggagcggaccatgtctgaaaagtcgaagccatccaaaaggaaaaataataatatatttgagatgaaagacacgaagtaatattcctacttacagtattaagtttgtaatattcatggtccatttaacactaaccaaaattttcggctttattaacttaggttacattgttgccttatgtaaactcaaacacttagataataaatgttgaatctattacaaaagaactcttcacggtcccaaaaactatataaggcttattccttttcgacattgtcaaaactttcaatgtcagatgtccaaacacaaagccaggaacaaaaaaccttctcaaacaacttgtagtacaccgaatccgggcaacgatgatcacacttataacaaatcggtcgagtatgactattgttcccaagaattttcatcgatgcagagccgaaatagaatgtgtaacctgacttaatataaacggaagatccgaatatacactcaaggtggatagtgatacaacatttgttgcatgagtagaaccattctcttggattcaattctttctcgcatacttcacaccaatatgctttctctgcatcttctccatagcaaagcgacagaagatgtgcatcatatttgtagtataactcatatggaatggtcgcacatcgataacacatagcaaatgagcaaatagtacattgcagataatactcatcacgaacactatctttgcaaccatcacaagaaatgtttccttttctagaatatgatgtggagatgaataaaggatgttcatgacttttgtgggtgaaacaatcaggaactaaaatgcatcgaaaatctatctgaattgttatctcatcatcgcaatcagtttttgaacatttgtacctgaaaccagtggactcacgggcgcaagttgaacaacttgtggaactgtaatcgagtataggagaagggtctagaacaagaggatgcttatgcaatgcatgagccaattttcgaggaagaccagcacatacctcgtgaagaaagaagtcacattgcacacagttgtagaaatcataagagtcgatacgaaggatgcacgcttgacattgtttctttgcgtctcggacactatcatacttctcaagcttaaggtgatgttcatgacaaaaatacttgatcatattatcacccactttcttaaatggcacaatatcttcagtttcatcgagttcttctggttcccattcgagttctcttccgtcccaaacgtgcatatgtgttgcacatttggaatgggcaacataagagcaaccttcatgatcgcaagaatactggccatatttgatgtcgactgtcttgtagcaaactcgacaagatggagttgtaggtggaaggaaaggagtgtgagagagacgatgtgggtgacgcgttatttttatgacacgcggtaagttgatacaactctcatgaaccaaatagttgcattggaaacaagtataacttggttccaacaaactaaccagctcacaagcttcacatggaattaagaggggccaaggaaataaaaagagggaatgatggtggctttttggatttgtaattgtaagagttggaaagttttgggagcaagagagatctaaacaaaagttacaaatagaacaatgatagaattgagatccatctctcaaatcatctccacaccaattacaatttttgaatatgtaaccatattcggggtttttagatatgatctctatttcagtgttttgagtggtgagggtgagaggatgttgaaggtgataagggtgtgtgagcttcctcggatacacgtgacaaatatcgtggaactccacatcacaagtggtgcaggagtaatggaaggtagaacatggtgagggttcttctttgtcgcatgcgaagcaacccgatggagggattcttccggctctacgggagagggtgtgagagtgagttggatgagacaaacgacatattggctcttcttcattagcagccattttctttttcaaagttttggttaggatccaatctgtttatctaaaatatgattacttccatcgtgtggagatgacttgactaatgtggacacaacttatatgattacgactaaataatgtagacccaatatacaaattatgtgaagtgcaaattatactattaaaaatgacacgagattaaatttaatacaacttcattacatgatctgtctctccagactgatatcatctgtgacaacgaattaacaagaatttcttttggccaacaaaattaattaattccactgtttattaattaaaagaagaatacgtagatacgtaagagttacagggtgtgagcaaggccagggtagggtggtttggcccccttcacttaccattgacttttaatagagtgggctgggcttacaaaatttatgtttgttatgtattagttgatcatatattatttcatagaaatttcaacaaagaattcatatttgtttcatcctagctgatttggtgaaaagtcgttaatataaatatatcacttcacaaacaacaacaaaataaatactccctttgttttaattatttgtagtttaaccaaaaaacctttgttgcaaaaaacaacaacaaattatcttctatgcaaaaattaaatgtatttaataatttttgaccaattttattttacaatatggttttttaattggttgaattagttgtaattaatgatgttttatgtaaacaaataaactaaatgagattttgatgatttaatctgtgctcaaaacctttagagtacaaataaattacaacaggagaagcattacttttaattattaaagctcgtcattagtaacacagaaacaaacaataaaatgtgatggccgttgttatcgctcatccttgtcgtccatattactttgcctagctgatggactatatctgaacgaggaacggccaatttagctagtttagtccatttcttttgaacaaagcaaacaataaaatttatttgaatcaattatgagaaagccatttttttttaataatctttgtagaattgccattttgattttggtattttaaatttgccacttttgctgagacaaaaaaaaacaaacaattttgccc

SEQ ID NO: 1024 - DNA, 11178 bp, Arabidopsis thaliana
gatggactatatctgaacgaggaacggccaatttagctagtttagtccatttcttttgaacaaagcaaacaataaaatttatttgaatcaattatgagaaagccatttttttttaataatctttgtagaattgccattttgattttggtattttaaatttgccacttttgctgagacaaaaaaaaacaaacaattttgccctctccattaatcacacattcaccatttcggttagtttcttcacaaattcatatgttttgtctaatatatgtaatatgtcatgtatctataaaatagataatatttatcaattaattatataattactgaatttcataaagtgaaaagaaataaataatatttttttttttttgtcgtcaacttttcattatattatgaaaagagatacatcaaacagcgttccaagatattacaaagacagagttttgtactctagctgtttttgctaatcgatcagctttaaaattaaggacacgtgggatttttgaaaaaccaatcgatttgtatctgcggcaatattttcgatgtcccggagaaatgttgctatcggtgaatactcacacgaatgtgtggttctggttattggctgaaacagagctgcaacatcaccatgaaagataatgtcttcataaccaagcctctgtagatgaatcattgctagtttaagggcttcagcttctgcttcaagcggtgtgctggttgggggtatagacgacattcctcgcagaacaaattgagctttcctatcatagaggatccatccaatgcctgcacaatcagtaggagatatccatgatgcatccacaaaacagcaatatttatttgcttttacgatagtgttcttaaagtcttcagatggccgccgtaacacttattattgtgactatcatggagttgaggtttcctctgttgttgctcattgcagtttaaactctctttccattgttgttgatcaataagagccttctgtatactgtccgggatagaccacctcttgttattgaaaattaaatcattcctcattttccagattcgccatccaatgaaagggaataaacttacatcctttcttgcggattggtttaatttctggatagattccaaattttgattaaaagagttcgacatgagggagtcacctggacagagttttatatgtgcttgctcccaaatttccttgctgactctacattggaagagaaggtggttcacgtcctccgaggcttcaccacaccgttggcatgtatcatcagtaatcagtcttctcctctttaagtttcctgcagtgggtaaggcgttatgagccgatcgccaccaaaaatgctttatttttggtggggcattttgtttccatatatttgtaaatacagtctgagctgaaacctcatttggagagggcaaggaagcatgttgttgctgggagagcttacgtagtagatggtagcctgacttgacagagtagtttccatcatgcgtatatatccatgtaattgcatcatttgctcctgttatagaaggtcgaatagcacggatatgaggtatatcattttggtgtatgagtttgcagagaagatcttcattccatctgccttcaatgagcaaatcacttactttcaactgagaatagatggagtcacatgtaccaacaggaggacggggaggatttaatggtagccaattatctttccacaactgaatattattaccattccctgcaatatattttaggccacgagagatcagctttgtaccatggaggatgcttttccacgcatagctggattgacttgtagcttttgcatccagaagtctctcctttgggaaatactttgctttaaaaactcttgccatgagtgagaatggttgttgcagtattctccaactctgtttggctaacaaagcaatgttaaaatcttttagatctcgaattgctaaccctcccatcttttttgggtcattgagtttcgaccaggctacccacggaatcttatgtttgacttttgtattggaccaccagaaccatcgcatagcacttgtgatctgatgaataagcctcatgggaagcaagaaacatgacatactgtatgtgggaatggctgtgacaattgatttaataagcacttccttccctgcaggtgaaagaagcttattataccaattatccattttttggtccattgtttgggctataaacgagaaagcatttgttttattccttcccacaaactcaggcaaacctaaatatctgccaaaaccttctgttttatagattcccagaagttgactaagttgttcactagtcctgaaatctaaacctttaccaaacagaattgcagatttttggaaattaactgcctgacctgatgctttctcgtaaagcttaagcacattaaccaaggtcatacactcttccagagtagctttgcagaacaccagagaatcgtgtgcaaaaagtaaatgagagattgctggtccatttctactagctttaaaaccatgtagttgttttgctttaatagatgcttgaattaaagctgatagaccctctgtgcataataaatataaataaggcgaaataggatcaccttgtctaatgcctcgctttggaataattcgtctcactggttgcccattgatgagaatagagtacgtggtagttgtgatgcatgtcataatccaattacaccacttctctgaaaaccccatttgtttcattatcgcttcaataaaaccccattcgatcttgtcaaaagcctttgtgatatccagttttgtagctacaaaaggttgaacaagcttcttagtgtgaagcgagtgaataagttcatgtgcaataaggatattgtctgtgatcattctttcaggaataaaagctgattggttgtcagagattagagaattcaaccaaggcttaatcctttcagataaagcttttgacacaattttgtacgccacatttgcaaggctgaaaagaaataaataatttaaagtgaataatagaaatccaaattattcttaattaactatgtaataataatattttgtatccggtatactttgattcctttggttccatgtttccttagggtatagagttaactattaagtttatgttttataagtattttatttttagtattgctcgcatttatttctattagagttgttgtacccaagtttattacaatacaaataaaatttatatatagaaaaaatatagagtgacacagttatttgttatgtagtaaactatcaaaaatgagccgacaaaaaaaaaaaaaactatcaaaaatgataaaaatattgtttagaaaacaaaaattcataaatgtgtaggtttacaaggataaagaaaagtcattttcagtggccaaaaaaggcaaatttcttaaattcattaacaaaatgacaaatttctaaaaaaatatagacgacaaaatagcattttctacaataatccctagtttagccacgaataacaataacaagacatgatccctctttatcttaactaagacgcgtttggtttacgaaagtaactttttaatactagtacttaattgaaaatctagataaggaggctcccccatgttcacggcttcattccctagcattgcctgttctgcctagattttcgtaaacattgactattcctatttttgtgcttatgatggtagatgactaacttctttggtgctgaaatgtcgtataaaacaatttttttttacgtttttttttttgggtacaaacaagtttttgtagtacgttgcaatcggttgtctaagatcttatgactagcgcggtctgaccctactactcaaatctgttatcaaaacttggatcacatattcactctataaaatataccaattttttttttgagcttatattcaaaatggacatcttaaaaaagtttctttcaaaagaggtattttctaccgtaggattcaacaatattcaacaataacaatttattgactcgattctgacgattttaaacttggtatgaaagcgggaaatagatattgtatctagaacttctcaattataagtatggaaatggtacacagtctaaacattagtaaaaactataccctagtttgggatttaggaacccaaaaattcaatttacagtatgtaaatgttaggcatgctgataaagtattccaaaaccttttgagacccatagttgcgttcttagtagagaagggagtgtcaaaaatcgttgaagattataatattttacattacatgaagatgaaaatacaaattaccgatgataaacaatggactaaagacgacagatgttacatagtgtgaaacaataatgttgcagatgagaagatttgtgaactaagagaattgcagtttcagtggagaagatgacgccagcgaataagaagaaagatgacttttcacgtagtgatagtacctgttttcgaatgtcgggtcaaaagtgcctaaaagcaaatacatctgtaagacaaatgccttatttgaaattaactcttgttttttttggtagaaaaatagaccatatttgtttctagtaaaagggaatagaaagacacacaaaccaaataaacaagggcaacaaaatttgaaaaacctcaaccatatttacttcccacaaattggatgttgtagcctaatgtcagaagtttcgcatcttttctgtttatcatttacctaaacttttgattgatatccagtttgttcagccgtattctttttttttttgaaataatgttaaattatattcaaagaaaccaaacgtttttacatcaaaatgcaacgagaaatttagagtttaagccaaaaaaataattgagaaaactttagaaacactgtaagtgattaacttctagaattgaaccaagctttgttcaaccgtattcgccaatcaaaaatatttgatccccccgggaatgaatacttccgttcactaaaccccttttttaagctcacacattcacatattgagcaaaaaaagaaagtcttattgatatggcccaaaactcaaccttgtctttcaatggtatgccctctggcgatcaagcctgcctacccgtacctagcaaaaccccaaagaaaaatcttccaagaaaagtcttccaagtgaattcccataatttgtcttgaacaaagaaaaatagcactaagccataacttaattttctcaattagcctcatattagtttacatattttaatgaaaatactcttgagtcgacataattctactgtttatgtgcgaaaagaatttgtcgatggacagtgttctcgtgctcatggtgatggacaaaaaacttgtaaaagtattttttcaatttttttcctctttttgcaaactttcacaagttttccaatagatttcacaagtttttccaaaacaaaagaaacgaaggaaacttgttgttgataccatacattgttttaaaaaaaaaaaatcaagcatagccgaatttgttaacgtagtaatataacaatttatttagcaagttttttaaaaaaatttataaggtttttaaatctcacgatctgtaaattaaatgagcttttatagatatgaacatatttcagcccaaatattagagaaagatgacatttcatttgagcttatgaaaatgagcatattttggtctgtaaaattacagtgttactcttattcttcctttcttcttccttctgtgacgtcgattttggattttttttctgtttcttccaaaaccttcattgatcttcttccttcttctataccttttgaacccaataaatccaattatatgcatgttgctaaaagaaatataaaccctaagaggatgatatatatagggaacccaaatgtttcaatcttatacacatattaaatcagttacatatttgagaattcaattgaatcaaccttttcaattacatgtttaacaaggaagacaaacaaagagaatcaaagatttaataaaatctacacacatgttgatgggtaatttaattgtttctttgattgaattatgggaaaggttgtgtagaagaagaagaggacaacatagacgagaaaaacaaattaattgctaataatacgaagagtaaaatcgtcaatacaagagagagaagtacataattgcatagacacatgattttgtgcatgtatcaacaacgacatatacttttaagtgctttattcataattgatccgtaaattaattgttacataatctttcgaaaacttccataacttttttagaacattttttttatctgtcaaagctagaaacattaatgtgttcaaaccattattgatattcttcattgccaatagccaatttatgtttatatttaaattctaaatcctgaaatgtaagctctaattctaaattccaaataaacactctgacaggccagcaaaattccaaatactttagtaaatatccacctacaaaataaatttcaaatcggaaacaataactcccacgggccagcataattctcagtacagaatcttgtctgtctcatattgaaactttctcttaagaataagatagactaaaaagcatgactagctctgtaaatgtgattaattaataacctaagattgttgattaagataaaacataaagttttaatcaaaaagtttgttagaggcgcgcctatggagcgtacaattgtgtcttaaaaaaaaaggttaagccaccaaaataacaaaaaagaataataatttttttgaaatacgacgaaagccacatgccttgaaccaaagttaccgttgtctgaatatgaaccaaacttagaagtaaatcgttccctcatgatccaacggttatattctaaattctaatcctagccgttccttttttaaaattaaaaactcaacacttttttttattttgtttgtatcttcctcttttgcttatttcatccccttcttcagattctcttcgtttaatgctcttcttcttctactctctttgtgggtttctcttgtaataatcacaaaccaaaaaaaaaaatggttaactcatgcgagaacaaaatcttcgttaaacccacttcaacgacgattcttcaaggtagtagatgaatttgtcgagtaatatacgagaatttcgaggtgttttacagtttgcgtaggagaattctgacagaatgtgttgtgttcttttctggttttgtttagatgaaacaagaagtagaaaattcggacaagagatgaagagggagaagagaagagtgttgcgtgtgattaaccagaatctcgctggtgcaagagtttatccttgtgttgtcaacaagagaggaagcttattgtctaagtaaatttaacaaaatctctaatctctcacaagttagtgttttttttcaatctgattgtgcttatgggttttgattgatttgaatcagtaagcaagaagaagaagaaggatgtcaaaagaagaagtttgattctttgcgtccttcagttacaaggtacataaagcttgaatctttcatttcgttttttgactttaaagaaagaaagatctgagtttgtttttgaatctgcagatctggagttgaggaagagactaacaagaagctgaagccctcagttccaagtgctaacgacttcggtgattgtatatttattgatgaggaggaagctacattggaccttccaatgccaatgtcgcttgagaaaccatacattgaagctgatccaatggtaacaacaacaaaacagaattcagaattttgttgatggatttaattcataaatcaatgatttacaagaaaattttgattggataggaagaagttgagatggaggatgtaacagtggaagaaccgatcgtggatatcgatgtcttagactcgaagaactcgcttgcggctgttgaatatgttcaagatctttacgcattttacagaacaatggaggtaaattatggtttagttttatctgtttttgaagtaataagtggcttgagagcttctttaagacagttcttgatttgaatttgcagagatttagttgtgttccagtagactatatgatgcaacaaatcgacttaaacgagaagatgagagcaatactaatcgactggttaatcgaggtatattatcaacaacattccacattgtactgtgtagtttgatagaggctaaagatgcttgagtacgttttcaggtacatgacaagtttgatctgataaacgagacactgtttctgacagtgaatctgatagatagattcttgtccaagcaaaatgttatgagaaagaagcttcagcttgtagggttagtagctttgctgttagcttgtaagtatgaggaggtttcggttcctgttgtcgaagatttagtactcatttcggacaaagcgtatacgaggaacgatgttctagagatggtaaaggcctggcttctttacttaatagaaaaagtaatcttgtctcatatatgttaaagacattctttgattaaatgatttctttcttctttacaggagaaaacaatgttgagtactttgcaattcaatatctcgttaccgacacaatacccgttcttgaaaagattcctcaaggcagctcaagcagacaagaaggttagttaaaaataatggacttatgaatcagtttaactagaagtttgaattttagaaaggaactaactgtgaaactgaaaacaaaacagtgtgaggtcttggcgtcgttcttgatcgagcttgcccttgtggagtacgagatgcttcggtttccaccatcattactagctgccacatctgtgtacactgctcaatgtacacttgatggttccaggaaatggaacagtacatgtgaattccattgtcattactctgaagaccagctcatgtaagtctctctctttttaccaagaatggtcctttaagtccataaacaaaactatttgcaggaaaaaagactgatctttttaattgtaatcgcgggtttcgcagggaatgttcacggaagctggtgagtctgcatcagagggcggcgacaggaaacttaacaggagtatataggaagtacagcacaagcaaatttggttacatagcaaaatgtgaagctgcacactttctagtgtctgagtctcatcattcttaatccaaaaggacagtagtaagtagtttgtacagcttcctgacatagttccctcattcactctgtagcacaaataagaagaaacaaaaaaaaaagccaattaaatttgtcttatgattgattcggtttttttgttgttaccctttgttcacttcacttgtcagtattaaactctacaatgaatgataaatgattgaatcatttcattctttgttcagaatgaaatgtattttgtatcttatttgagctaaatacaaaaacaacgtcgttttcgttgttttcactttgacttctctttagatctctctcccaccaactccttcttcacacttcactaaacttcagatactttttgttttttcctcaagatcaacgataatggcggcgtcaacgaactcattcctcatcggaaaccaaacccaaatcccttctttgaaacccaaatcaatatcccaatcctttatccacttcactaaacccaacaccatcaacctcaccacccgaaccaaatccgtttcaatccgatgcgcttccgcttcaaccaccgtcggatccgagcagcgagtcatcaatttcgccgcaggtccagccgcattaccggaaaacgtcctcctcaaagctcaatcagatctctataactggcgtggatctggtatgagtgttatggagatgagtcatcgcggtaaagagtttctctcaatcattcaaaaagctgaatctgatctccgtcagcttctcgagattccatcggaatattccgttttgttcttacaaggtggtgccactactcaattcgctgctttacctctcaatctctgtaaatctgatgattccgttgattacattgttactggatcttggggagataaagcttttaaggaagctaagaaatattgtaaccctaaagtgatttggtctggtaaatctgagaaatatactaaagttccaacctttgatggattggagcagagttcggacgccaagtatttgcatatatgcgccaatgagactattcatggtgttgaatttaaagattatcctcttgttgaaaaccctgatggtgttcttattgctgatatgtcttcgaatttctgttctaagccggtggatgtatcgaagttcggtgtgatttacgctggtgctcagaagaatgttggtccttctggtgtcaccattgtgatcattcgaaaggatttgattgggaatgctagagatataactccggtgatgcttgattacaagattcatgatgagaacagctcgttgtataacacgccaccgtgtttcgggatttatatgtgtggtcttgtgtttgatgatttgttggagcaaggtggtttgaaggaagtggagaagaagaaccagaggaaagctgagttgttgtacaatgcgattgatgagagtagagggtttttcaggtgtcctgttgagaagtctgtgaggtctttgatgaatgttccttttacgttggagaaatcggagttggaagctgagtttattaaagaagctgctaaggagaagatggtgcagcttaagggacatagatcagtgggaggtatgagagcttctatttacaatgcgatgccattggctggtgtcgaaaagcttgttgctttcatgaaagattttcaggcaaggcatgcttgattcttttttgttttctagtcatcttgttgtttattatgtaagctttgatgcttatgattttgagttttcgttccttcttccggtacttgaattgcgattgtctgcggaattttttcagtaataataatttgagataatagatttcattttcaagcaagaatcatttacacttttatgtttgtctgagacttttgagttgagactgaaaacttccagtgaacaaaatcttttattagacaacttattgaggaaatgctgagattagcttatgatgataagcaagagcatacaagaattagcttatgatggtaagaaatttgcatacaaagatctcatgatgtgctgttagtgtgtcctttctctgtatctcctgctgaaagtgatggtcctgttttcaagacacgtaaata

SEQ ID NO: 1025 - DNA, 57991 bp, Arabidopsis thaliana
cgaaactttggtttattaaaatgtgttttttttaaacaggtgcatcaagatatgacagctccattgtcacattactttatatacacaggacacaattcgtatcttacggggaatcaactaagcagcgattgtagcgaagtccctgtgatcaaagccttgcaacgaggcgttcgagtcatcgagctcgatctttggcctaactctactgggacagatatcaatgtccttcacggaaggtaatatatataggaaacttgttcttgttatttctcttcagtcaaaaacattttcaagaaaccgcggttttcttgattcttcagaacgcttacaacgcctgtaccgctgatgaaatgcttgaaatcgataagagattacgcgttttctagttcgccttatccggttatcatcactttagaggatcatcttacacctgatcttcaagccaaagttgctgaggtataacattttatatatctatatcttgtggttatcaataagtttgattttgatgttgtttgagttttttttttctttctttagatggctacacagatatttgggcagatgttgtattaccctgaatcagatagcttactggaatttccttctcctgcttcactgcttcatcggataatcatctccaccaaaccgcctaaagaatatctcgaatcgaggaacccgattgttaaacaaaaggataataatgtatctccatcttcagaggatgaaacacctagaacagaggagattcagaccctagaaagtatgttgtttgaccaagattttgaaagcaaggtaagaaaaaggaacttaattcatgaaaaaggttcaatatacattgtttgttgttttgtaatttagttttgagttttgagttagagtgatagtgatcaagaggatgaagaggctagtgaagatcagaaacctgcatacaaacggttgatcacgattcatgctgggaaaccaaagggaacggtgaaagaagagatgaaagttgtggttgataaagtgagacgtttgagtttaagcgagcaggaacttgacaggacttgttcatctaatagtcaggatgttgtaaggtagtactaatttatataccatcctaactctttataggccagggtttgcaacttgattaatctcaatgtttttttaggtttacgcagcggaatttgcttcggatataccctaaagggacaagatttaactcctcaaactacaaacctcttatcggttggactcacggagcgcaaatgattgctttcaacatgcaggtaacaagctaagttttataaggtctatggataccttgactcttaagctaccttttgtgatgtataaagtgatctctgtataagaaatgaaacatttggtgattatagggatatgggaaatctctgtggttgatgcacggtatgtttagagccaatggaggttgtggatatgtcaaaaaacctaacttcttgatgaagaaagggtttcacgatgaagtctttgaccctaggaagaaactccctgttaaagaaacgttaaaggcaagccaacaacaatttccatatatatacttataggatattttaacatttcaaatgtcattagccttatctttttgtcgcggttattacaataggtgaaagtgtatatgggagatggatggcgtatggacttcagtcatactcactttgatgcatattctcctcctgatttctacactaaggtaatatcaattttacaaattgtggctctttaaattcctcaaaaaccttattagaatgcggacttgtgagctttgtagatgttcatagtgggtgtaccagcggataacgcgaaaaagaagacaaaaataatcgaagacaattggtatccaatttgggatgaggaattcagcttcccattaaccgttccagagcttgcattgcttaggatcgaagtaagagagtatgatatgtcggagaaggatgattttggtggacaaacatgcttgcctgttgcagagttaagaccagggattcgatctgtgcctttgtatgacaaaaagggtgagaaaatgaaatcagtacggcttcttatgcgtttcatcttcgaatgatttggcttaacagaaatgtgtgtctctgagaaagaatttgcaccatttcaaaaagcttttgaggtattgtataatgtagcttgaaagatcaaaatgatctttgctctgatatctccagaaagtgaatttacctaaccatattgaagaaaatgtaatttatagagtctatattttttttcaatatgtaaaatctattgtaagatgattatccatgcttgcaatttgcaaagctgttacatatattaaattaattcataattgagatatacatggaaaaactaaactattgatgaaaaaaataaaatggaaaaactaaactatccaaccgtttgaaaaatggaaaaactaaactatatcaaggaaaataaacagtttttcttctttcataactatgcatgtggaggatataatttgtagtaactaatggaactaccaggatattaattaggatttgcttcgctattcggtctacaatgatcttaaacatagataattgatatttgataagggaccaaaatgatggatcatatatggtcgtcactggtcagagaatgcacattatatggtcataggtccaacgtttaatttgatttagaacaactggtaactgagaaactatgtatgtatcaaggttattatattgcaccacacaagctttttacttacaatgtgaaatcaatgtaaaaaccgttctatacacatattaatctcacaattacagcgattaaacaatacaaaaatcacaagcaagattccaagagggaaaaaaactggagaaacaaagaataagacaaaaccaaacaaccaacaaaagaagaagcaaaatcaattgtaagatgaagaagaagagagccaagggtggttaagtgcctctagagctgttggacgtctcaaaggattgatatcaagtagagtccttacaaaatctaagaacaattcatcactaacttgtaattgttcttccaagcttgattcttctgtgattatgtattcaatctcattgctctcctaaataaaaaataatgcgtcacattcaagcaataacactcaagtctttttggttatattaagaaaaattacctcgtttaagtggtagagatcatactctttggtgaagtatttatgtgtctcctgacctttctctagcatctctgtttctataggacctaaaactgcaacaatcctagccaatatcatcgctactgcttcgtttggaaacagaacctgatgcacacattgatacattgtgttacttgtttcttcagtatgtaggatataacatatagacaagacttttgatggaaactagacagtacctcaccagagcagagttctgctaaaatacacccaagagaccacaaatcgatcttttcgtcatatggaagcccgagaatcacttcaggagctctataggaacgagattgtacatacaagcacaagttatcagagcggaaacaactacttccaagatcgatgatttttaccgcgcatcttttgtaactctttatcagtatattctcaggtttgagatcacaatgtatgattcctagtccatgaaggaacacaagagcatccaaacactgacgtgttataacctgaagtctgcttaagttaaagtatggttctcctcctgattcttggttgaatttctgaaactcatacaagtttgctcggagaagttcacagacgataaacaaatgttcctgttatacatatacacaagaattagtaacttaattaagagcaacagatatgtatatctttcaagatctcttacttggtggtagaagtaatcatagaggcgcaagatatgatgttcatcagcaggatcatgcttattgacatgtttcaatagcttgatctcatctaaactctgatcaaagaaatctttatcgttcttaataatcttgaggcaaacatcaaccccgttgtgtagatcctgtgcctgaaccaccttgctaaatgcagcagaaccaatgtattccgtaatgtaatatcttcctccaatcacagtgtttatcacaattggtagatccttgttctcttcgaatcccgtcctgtcaaatatatacaactatttgagatcacatatttaaagactaactaatgcaaataatgatcatacctgtttttccagtgaatgattctaagattaaacacttcatattcatcttcaacctcatgaacaacatcaacctcttcatctgttacattcaactgatcaccagtcttgagatcaagctcatcagttttatcctcaagaccaatgtcaagaagaaagggcttatctaagtaatcgagactcgcttcggttagagacccttgagatgatgatctatcatagacaccaagcgaattctcgaattggttatctgtgataaacttatcctctgcattttcaggtaaaatgaagcaatcagattctctaaatgcaggagacataaactcatcttcatcttcagtctcattgtgcaagtaaaactcgctccactctggatatgtcctagctgtcccaaattgagactgtccatcagaagatgatgaactatctccgtaaggattcacaaatcctacatttatgcaaaatcttcccaatcaatcaaacaatcttgagcttcaatttcttgaaataagatcaacaaccagaaatttcataagatcgaaaaaacttaccggaagaagaacagaagccagaagtggaagaatccaagctaacaaactcgtcgtcggaagaagaagacttcgagttcgaaccatcaccaccggaatcagaaggacgagaactcgctgtgattttgatcggcgtaggaatcgggaacagaaacttctcgaaatcgaaagaagcgagtttgtttttctcgttgatatcgtctctaagagcagattccgcctccgttaaaccattccgtcgaagaaactcaagaacagatttaacatcaaccgccattgaccaaccaccactgtcacgagagagtttcagaacaaagcacggagagagataagagaagaggaaagtttcaaactttgaatcacgtgattgagaatcgagtcaagaaactaaaacccattgtttggtattgatgataagcttgttaaagtcacgcatgctctgatgattgaatctaaatctgtgatctttctttcttcttcttcttcatctgagtctacttgttctactctgtgttggctctgtaggaccaaagttaactataacggatacggacatggtgcgatgtcttgtcttaccggtttttttggggaaattttctctctgaaggtttcttcaggttacgggattgataggtttcaacgttcgttgggtttttcctttttcacttcttgacacgtgtactaataaggatttaacatgtgtaaatgatatcactgttttgggcgttttttttactttattttataatgtgtaaatgaaccgacggaagtttttaacatttttttttgtcatgtcttgggataaatcgaattcaaaagtttaataaagtaatgaaaaaggaagaatctttcagatgaattgtgattattctactttaaaatctctaaatcttccactgtggtataatttgtttatttaagttataagaaagcgaatctatcaatgtacaccaacatcatcatcatcatcacttacctaatctaaagaattttcaacgttacaagaagttgtagttaattttagttttacatgaggtaagatacttaaaaataaaatttaaattttaggaaatgaagaaataatatcataactttatagttaatctctattttttatatttccagcaattctacaggaaattgtattttttcactcttttgcttttactctttaatttgtttttttaaaagtaatgtccaatgcctttttaagcctattattactacagaaattgaacgttgtagttgtagagacgaattcaagtaaagcaggataaagacaaaaataaaataaaagttgacagctgaaaggcaaactgaaaatccgtggaacgttagaataatgttttgttacgcgattttttttttagttaaagtggaatcataattgaataagtcccatttgatcggcctgagagtgagactacaataaaccttaaatacctaatggtttgggataggggaattaataaaaacgtaaatatataatgttactccttgaaaaataagagaggaataaaaaaacagctcgtgaaactctatcatatatgcaggcaattttgtaacgatagccattcgttttggactaattaatctatctcttaactcttaagttttatgattatttcataagtgctcacactcgcaccaaaccgagtagccacaattattatagattgtgttaaatcataattatttgctttaagtcgacgatatagatatagttcagatatctccataaatatgaagaagataccaataataatttattttaagttttgtgagcccaataataaatttcagtttctctatttataggtgctacttgtttcttatagaaagtttacgtttaaaaactggttccaaatgatacaaattatgctcactgttcagaagactttaactacataagtctagagcaaatctccgaaaatttaagttttgtagggatagtgataataataaaatggaagcattaaaaacaaaggatttggtacaacgtccatgtggtgggtgactaatcatggttttactagtagctctatagtgaataatcatcattattaagtattttttgctataagtgatctgaaccccaccgactacaattatattgttttctcagcaaagccattactgtgacctctatcagcttttccacgtgaccacattttcgccaaagaatttagggtttttgctatttacaaagtaatctattcatcatagattctccaactcctggcacaacataagtttctaactcacttaactaggctaggcaatcaattgcatcattaatcgtcatgcatgtatagcattttatggaaattaactattttgtaaaatgttataaaacatatgtatcaaaattcaaacgagatgttgttacttatagttttaaacaatcgacattttgatcaaactttacaaggattttgaccagcttctctttagacacacgttatttgaataggcgaacatatgaaattgtcaatacaacttgttgaaaagtattttgctattgatttatattattgtttaaactttaatttgatctttgcaccaaaaaaaaaaaaaaaaaggtttaaactttaatttgacaagcccgacaaggtgacaactacattgtccataatatgacactaatgggcttatattaattgataaaaggtttatgagataagcccatggttaggggccttatttctcttgtttgtaaattattgatagaaccgatggagaagtataataacaaggttggcctgttgggtaaatatgatatacagatttactttcatgtgaattccacagtaaccaatatagtgtatctagaattaaatttgttacctcagtcaaaaccactagtctactaatttatatcgaaaagaaaagtacatacatgtaatgtgtgtaagtctgacaaaaatgaactgttagagaaaagaaaaaaacgggaataagaccactaaatacagtcatttgcctcattttcttgctaaatccgttttattttgtcatcatcatacaaatctttaagcgaagtagtctttgtcaagtcactacgggactcccactcatggaacaaactatttaacgtgtcatgcagaaaataaacccaatatccacgatatgatacgtttatttttgtcaaaggttttgcttttctaaaagtgaaataaagatcccccaaacgcctctcgaaactgatcctagtaagctctgatttttcaaaatcagcgctgtgaatttttcatttatttatttattacagaatgcatccaaatcatggttactcaatactagccaagttgacaaaaaaaaagagagaggcctataatgattccatgtgactatatatacgtacgcttatatataaacatccactatacgatagtgaaatactgaaatggtattttgtggctattcgcgtcattttttgtagaatcatatgtcacaattatcagtatataaggttaaaagtaagttcatttaatttcagtgcacatctttatgttattatcaatttctattcaaaatcttcatttttatttcatagtttttgtttgattcaacgatattgtcattccactattaccaatccaaatggacatgatatgtattaattaagatggtaacgatgtgtacagttaaaatgcgaatatttatgcctacataatcaaaccgacgttgaatttttgcaaatgttcccattatgtgtatagtgttacatatcttagggtcacagtttaccaaatatgaaaaggcaaagaagaaaaaggagagagaacataagtgtaccagatatgggaaaagtaaaagatgctaagtggagctcgtgatttgttctttagggctcgtgattaaagggtccccgtgattgtatattaacagtcttgattcttcctgtggtgcggtttggcctttattattggtgtcttgtctccgtctctctcttttatcaaacttaaccaaatcaagaacaatatgccattacccatcctctaccacccaattgagtagtatacctctctactttatcggtaactagttatgtctctatgattctttcaagtttcaaataatatcattcgagtatttttaccacgatttcaactatgtatgatcgatcattaattgtttcattcggttggcacataaaactatttagagacaaagtgttcgtttctactgcatttatgtctaaattgatgtattcaaaagaaagttagtgtttctgtgattatcatgtatatagctccattaatgttttgtttttttcaacctagctactattccttttcttaccattcatttgatatatgagtattaagacaataatatttcgtcatgttttagaatgcttttacaccttttttcgaccaacctatgaaatgtagaataaccttttattttgttgttttgcttcaactttttatttctttatggtaacagtaatgtctagccgccatacttgtaatatttatttctttagatataactttctatcaaaatattgaaaaagcaaaaagaagctgagggaagtcccgtcgttaattatactttagacaagggacaaacatatcttgccctttgatatttgtcataatttttcgaaaacatttttgagtgattagttccgtaaataggacactaatgacccacacaaatactaatagtttctttaaattctataatctcatcaaaaatacaactcacatatataatggcaacttcatcatttctataatctaatattagctcacattgcctcccacctcccctaatggattgaccgacccttcaaatctcaacttttcaaaatgttattatttcccctctctatcgttctttttccgtcatttaaacaaaaaaaaaatctttttgttttgtcttcttataggtgttgcaattattttgtcgactgattaattgtgatagtattcctggttctcaattcagggtttgattatcaaccatttgcatgggggctttattaactcatctggaattccaagaaaacaaagatactcaccactagtactataattttgacaaaaaaactcaaaaagcattgtaattgcaaagtaactttacatagtttatcatgtgcgtgtatatatatgttttttttttttgaaaaacatgtatttattcgattttaaattcagacggtaacatgacgaacctatcacaaactactaggatatatatatgtcatggttttgatcaaaaaaatatatttatatatttcatggttaaagtgtttcttttttgttatatactgtagtaaatttttatacggcttccatagatatatatatatatatcaaagtctgatctgataaatgcacatttacaagaaaaatgtggcatacccggccctttaatgtttgatgtaataagaaaagatggataaaacattaaaggtcaccaatgcgacacccagtgaaaaacgacttatttgaagatggaatacaaaaggaattgttgaattaaactccattggcaaaatgggtccatctgttcatactctttttctttattttattttgtccacttaactttcatattcatcaaattttcaccattcatcattttttattcgatcagccatgctagccttccatcgttggttcaacatggatggatctcaacgaaaagcgtttggacctaaacatttggactccaaatcagattcgacggcataagcggactgatgatagtcaactctaactcttgaaatgatccaaaaaaaaactctaactgttgttgttatatacactacggggatagttgtgtttctgtttgggctcacaagcactttattagtgtttatacaaatatatatgttaatgtaatattaattaaccaataagtgctaataaaagagaaacttgtgttcctttcataaacattatgtgctagaaaacccaccttgttattattctctcgatgttggtgcatcgaatttaaattctaggaagagttcaaggaactccgacgactcactccaaccaatcattcaataatagaccaatttgatcaaatctatcgatatttcttttctaagtatgcgagacattcgttggaaaccatgtatatggtgtaaacagtgaagtacaataggttaatttaggagttttattcaaaaaagcttagaatgttcaaatttctacttattatttcgatttgagaaaattcagctttattcttcaccaatacgatttttatttaattgattaaataagctttttttttatataatcaatgtcatattctttttggtctatgctcggaagacgtcaacaaggatattggttccctaaagaagaaacctcctcttttattgaaaaaatatctctcacgtattgattgatatgtaaaaagatgtcctacatgtgaatttctatgattgtgaaaaaagaattattttttacttttagataacaatgtatactctatggtaacattgcatcaattatgaatggattggccaagtataaaatttaattatgattatacctcaaattcacactacttaaccatctattttcaggctattccattaattagtttttattaacacagtaatttatttgagaacagatttgaaaatattttgctaaactacttaaccttagactaactggaaaacaatatttaactaagtgtctgctaattaagaaaattaaagtatcgttcaccttctagacacactatgtcgattactgttttgagtgcaactagtgtattcgaaataatacttgggtgaattaagtttaagctttgagtaactaaaaattatatataaggatccataagttttgttgaaatagaataatcggaacttttacattcaaaaactttttcatatatatacagaaattcaacccccaataaacaaatgactaatgagtgatagtctgataggtgttaatgactgtcttaatatgagatacataagaaattttgaatggaattatttaataaatgtgaattatgtgggtgacttgactattcagtgttcactgaacacaaaaaggtaccaaaaaaattattccaatcagtgagagatcttcaaaggaaagattctcattcgcgccaatatttttgctgggaaaaggtaaaactttttagattattctataaattattttgctgatgttcccttacgaaaaaaacagtattcagtaccaaaatgtctggcacatataatcgtatagacgataagtagttgtcgaaattttatagggcaatggctcaagcaagtgaaacattgacacctagcccattcacatctatgtcactatatatgtgggttcacaaaggtgacgttttccttatgtgaatcatgtaaatgctataaagttttgtagtacatgagcgattatatattattacgaaactcctgaaatatatgatatataatcagatgggttgaggtagtgacaatagtttgtaagtgcaccaaaatacgttttgagctattaagtccgaagtttaggtccttttaagttatcgaaggtatgcttaaaaaaatttactaccttttagtttttttttgcatgatcgttattcgagaaacatgctgacgcacagattgatcagacgctgtggtaatccaagtgatagcaacaacacaaaatcatgtggagaatgatgatgatgatgcacatatggatttgcataaattttgtaatctccgaaatattgtggagaatgaaggaggagaaacataacattttaaaaatggataaagaaaaagaaagtgatggaaaaataagtatgtggtagaaaaatagggttccttcttctcatttgtctctttcaagctttatgatgcaaagcgacccttctttttcttccctttattttcttttattgttatcgttagtgtcactttctttttattaatttcataaagtcgtatgatcgtatccattgtttttattttgctccgacaggaccgacactgatctttctatatctttcggtaattaatgttataggattcctttttcagatcacatcatttgtattttatgttattttcgtttaacataatacactaataaaatgacttcataaaagatatggtttaggttggggaataaaagatatggtcgagccatacttctaatccttaatttaggttgatagaacatctaccgtcactaacaagtaatgaagtcagattaaaacttgatcgtgacaaaaattgtcccatatattttaaatgaacatgataacatattaattgaaaaatgttttagtgacttagttgtattgaatagcaaaggcaagtaagtagttatatacaatgactttcctatactcgagaagaccgtatccaagtaaatcaagaagatcgatatatatctagccggatctttggattgtcaagtgtcaacaatcttaattagatcaaaacagtctgttttaaaacatatgccaagttgtcaaacagaaaccaagcttttcatcactcaaaggagaatcacaaattctgcatggcgtgggggatagatatatatcatcgggagccactgagtccaagaaattgaatctattgacttcctattgctaatctatttcaaaataaccacgtcagagagatacgagtacatgtaatatcaatgagatattttcttaggagtaatttgaagatatttaatttgcggttgtaataatcccttttgaaaataatttgacttgtacacacggcaacaaaagaatgatctaaaggcaagtaacaagaatctgagtatccaccacctcttcctgttcctgttcttgttcctgttcgattccaaactctcactttctctgcccccctcgtgtctggctcccaccttttgtgtccactcaaccaacaacaacagtgtatctcttctcctccgttaaataactttatatttccccgttacatttccttattgtaacaaccaaaaaataattcacctgagactcacattctttaaggttttcgcatttaatatttcactttcttgaaatctcctatatttttgttatatatggtcgtcggcgatgccaacggcggtgaatgtagcgaaacaatgcttaacggcagaagcatcctacgcattagaagaagctgtgaacgttgcacgtcgaagaggacactcacaaacgacgtcgcttcacgctatctcagctttactctctctaccaacctcagtcttacgtgacgcatgtgctcgtgttcgtaactctgcttactctcctcgtcttcaattcaaagctttagatctttgcttaagcgtttctttagaccggatccagtcgggtcatcaacttggatctgatgattcaccacctgtttctaactctctaatggctgcaattaaacgatctcaagcgcatcaacgtcgtttacctgagaacttcaggatctatcaagaaatgtcacagagtcagaatcagaactcactttcttgtgtgaaagtggagcttcgtcagttgattctttcgatcttggatgatccggttgtgagccgggtttttggtgaagcgggttttcggagctccgagttaaagctttccattattcgacctgttcctcatcttcttcgttattcatcacaacagcctctgtttctctgtaacctaaccgggaatcctgaaccgaatccggttcgatggggtttcaccgtaccaagcctgaattttaacggagatttggattaccggaggattagcgcggttttcacgaaagataaagggaggaatcctctgcttgttggtgtatcagcttacggtgtactaaccagttatttaaattcgctagagaaaaaccaaaccgacgggatgattctcccgacgaagcttcacggtttaacggcggttaacatcggttcagaaatctccgaccaaatcagcgtcaaattcgataaaacctacaccgacactaggtttcatgatctagggaagcttgcagagcaaggttcaggacctggactactcttacactacggtgatcttagggttttcaccaacggcgaaggaaacgtaccggcggcgaattacatcgtgaatcggatttcggagctgttgcggcgacacgggagaagagtgtggttgatcggagcgacgacgagcaacgaggtttatgagaagatgatgagaaggtttccgaatgtggagaaagattgggatttgcagttactcaccatcacttctcttaagccttgtttgcctcacaacaagtccaggttattattacttctcttaagccttctcttaaaacaatggtactaatttaaaacagagtatcaactaaatgtagaaacagagcattgattagaatatgacttctacattttctctgttgcactaactttaggagtatattttccaaaaaaattctctgtaacgttgtcttacttacattatgttgtaattgaaaacagtttgataggatcatttgttccgtttggtggattcttctcaacaactccttctgaactgaaactacccttctccggtttcaaaacggaaatcaccggacccgtttcttcaatatccgatcagacacaatctaccttgccaccttggttacaaatgaccacaagaactgatttaaaccaaaaatcaagtgccaaggtcggtttactttctcttctcctaatttcttaatctcccataatcctacgagtatgtttcttgtactacaagtttcattatgttatgttaattgcaacgtgtatttacatctcctcagtgcagaccaaagaagggttggaatcagtttgtggaaataagttcacgagcagtgcttctgcatcgacctgttcagctaaatcggtcaccactgatctgaatcttagggtaagttcagtcaccacaggatccggtctcaagaagcatttggatagcaaagatttttctcagccacaatctgtgtcctcctattcctttgataacccaagggacctcaacgcagagagtttcaagattatttacagaagattaaccgatatggtttcaggacaagatgaggctgctagagttatcagctgtgcactgtcacaaccgcctaagagtgtcactcgaagagatgtttggcttaatttggttggtcctgatactgtaggaaagagaagaatgtcgcttgtccttgctgagattgtgtatcaaagcgaacacagatttatggccgttgatcttggtgccgcggagcagggaatgggcggttgtgatgatccgatgaggttgagaggaaagacgatggttgatcatatctttgaagtgatgtgtaggaatcctttctgcgtggttttccttgagaacattgaaaaagctgacgagaagctgcagatgagcttgtcaaaggcaatcgaaactgggaagtttatggattcacacgggagagaagttggtatcggaaacactatttttgttatgacgtcatcttcacaaggttccgcaacaacaacatcttattctgaagagaaactattgagagtcaaaggaaggcaagtggagataaggattgaaactgtatctagtttaccaatggtgcgatcggtttacggcccaacctcggtgaacaagaggaagctgatgggattagggaatcttcaggagacaaaagatactgtggagagcgtaaaacggttaaacagaacaactaatggagttcttgatctgaaccttccggctcaagaaaccgaaatcgaggaaaaatatcattgtgaagagaactcaaacgtttggttaatgaacttgaagaatcataaacgtctcattgaggttcctttcaagccttttgattttgaaggactagctgaaaaaatcaaaaagagcgttaaagaaaatttcgacaagtgcgtgagatcggattgcttgctggaggttgaccctaagatcatagaacgattgctagcggctgtttatttctcagatagtagaaaagatatcaaagagttgctggagaatataatgagtccagtgttcttgagaattaaagaaaggtatgaaatcactactagttgtgtagtaaaattagttggtcgagatcttgacatttttcttgaggatcaaatggacttgttctttgtaaaatctcagtaggttaaagagaactttatatggaaagtgtatcatataaggtagagttagtaataggtattattgttcttttgtgttgctatactatgataatgtgtgttcctgtagttatgatgatgagttgatctttctccttgtttattttatatgtatgtaaatagttatttacattctattttattttacctgttttaaacaaatcgacagcgtttagtgaataacgtcattatttataaaatatgataactgtttaatatatatttatgtacatgtataaagatttctaactataactacagaagcaaagctcctcctcaaaaagaccttaaagtcaaatagatcaaaacaatacagacaagtattgatgatcaaaattgatttatttggaagaccggatttgttgcaatgaactagcatagactcaacgtgtggatgtccgagtaccgtgatgatcatcttgaaccatatcagttcttaagttaaaaatgcgaataccatgtattcagttttcgcgaatgaccgattaactgtcttccgatccgtttttttcgttttccatgatatcgataactcggtccacaatctgatgcaatttgctgatgagttttgggaaatattttggaggcaaaacacacaaaattatttcactataaaaatgttactataataataagttgaccatataaacaaagaaccaaaattgaccccaaggagcgtcgcatagtcttattcttcagcaaatctacgactcgacttacccagaaacatgatgacacttttcttttggtaaacatgatgtcacgaaaaaaaattacacacataatctatagatagttagaggatgtgttagaattcacatatcagtttaattggtagtatatgatttatatgctgattatgattgaaaactatcagcctgttttaaggtaattatgagttatgatgggtacttatgagtttgaccatatataggattaggttgttaaaatgcatacatacaggttatgtgtatgtttatgtttatattttcatataaacaacaacaagtacactttcttgtaatttagtgatttagatttcttaatcaatttgtgtttttttttaattgtggagtagtatgaattgagttcacaaaatagcaaatttgtgactacgaaaactccacggaagatatatagaagaatcgaagaaaagtagagaataatgaggagtaagtcaaatgatcaaatccacggactaatccattatgtttgatgtgacgagagaaaaataagtgaatatttaatactatatactatagtatatttttgcaaaagttaaaggtgttgcattaattttttgatagcaaacaattaaggaaatgggggaaaaagtgtaagcgggcggccaagtgaagacattctctgtcgcccacccaaacaccaaagaagagaaggcgtgcctcactttccctctttctccacgcacttctccttgcccgtgtttctcactcgctttaccctaatcactccattacaactatacctacaagaccattaagataagcttatcaataagaacactgagataaagttgatctctatttacgaattgtttactaccaatagattttgattcgtaccaatcttttaaagtatgtatgtattgtttgaatagtagttctaccgaaccaaaaatattttaattgatcatgtaaaatatatttaagattgttgtgtgttaattatagtgatctttagaaaaaagagtagccaacgtgataatgaaagcgcgtgttaagagtattgaaacactcacacgcttgtggaggttacctgctaagtcggtcgatttgatcgatggtgggtcttttacacatccccaacgtcatttaccatttattcaacctcatatattatgttcttgatgatgaaaaagaacataatatttttttttttttttttttttaatttttttttgatgatgatgaaaaaaaaaaatattatgttcttttttaatttctttttaatatttttgacagtaattttattttaatcttattttgttacaaatagtttttaataccttaggacctgttggaacttggaaaaaaacaatattttttaatatctcaggatctttgcccatacatgttttgggcacccatgcgtttatatgaaaaacagcatgcagatgtaaaatataaacaactgtagatttggtcagatgttaaaatttaaattatgtcttttgaaatgtgacctataattgtccagatagatatacataactatttagtaattgtaagtctatttcctgtaatgtattcagctaaatgcatgtagataatctgatatcacatacatctatagccatatagagaatgcatagtaacatcaacaacatataaattttgggctattttctaatgagggtttttgagtataaatggatctcctaaaacgagtttaccggatgggtaaggtagtagttccctttgagttttctttctgctttgtataattaaaacaaagtaattgattaggaacttagtaggtcctaaagagaaccaacaatggtttcggttataaataaaccaaatgggtacattatccttatatctagaaactttaaccaaaaacaagatgttatctagaaacaataaatacatccggaatgagactttttcttatgtaagtcgatacaatgggggcattgttttatttcccttcaaatgaactttgctttttgatcattttaaaaagccatattgaaaaaatcaatgagataggaagatagatattataatattctttttataaaaaagacaaaaaaaatacactaaaacaattgaataagagtcagcaaaacaacgacgtccttaccttttttaaaagtttcccagttttgacttttgacctaaaccatttccatgtagaaagagagcaaaaaacaaaacaaaacaaagataagtaaaaaataaaaatgatataaagaaggaagaagaagaccgagaaaggtagacgaaagaaagagcgtaccttcctctttccttcttcgtaaaaaccaagttccttttaaaaggagcctctcctttctcatttgatccttcttcaaaaaccccaaccacttcttctccccaaaaacctccaaagtttcaatctttacttctctctttttctccaagttatcttcttttctaggtatgtcttgattctttctctctctgttttttcctatttcattcaggattctgggtttggttaaatctttaatctttatggttttaatggcttgattttgacgaaacggtcgtgtaattattcattactttgcttaaattggggattgattttgtgtataaagaagaatcttgaaaatgaaaaattgaaactttgaatcgaaagaactcaatttgcgttgctctttctcattctttgttgctttctcctaaaagtttttcacttttgaatcacaggaagagatatgtgcggtgcaaagagcaacctttgctcatctaaaaccctaacagaagtcgaattcatgaggcagaaatcagaagacggagcttccgccacgtgtctcctcgaattcgccgcctgtgatgatctttcatcgtttaagagagagatcgaagagaatccatcggtggagattgatgagtcagggttttggtattgcagacgggtcgggtctaagaagatgggttttgaagaaagaacaccacttatggttgctgctatgtatggaagcatggaagtgttgaattacataattgccacaggaagatccgatgtgaacagagtttgcagtgacgagaaagtcactgctcttcactgtgcagtttctggctgttctgtttctatcgttgagatcatcaagatcttgcttgatgcttctgcttcacctaattgtgttgacgctaatgggaacaaaccggttgatttgttggctaaagattctcggtttgttcctaaccagagtagaaaggcggttgaggttttactgaccgggattcatggttcggttatggaagaagaggaggaggaactgaagagtgttgtgactaagtatccagctgatgcatcacttcctgatattaacgaaggtgtttatggaactgatgattttaggatgtttagctttaaggttaagccatgttctagggcttattcacatgattggactgaatgtccttttgttcatcctggtgagaatgcaaggaggagagatcctaggaagtatccttacacttgtgtgccttgtcccgagtttcgtaaagggtcttgtcctaaaggagattcgtgtgagtacgcgcacggtgttttcgagtcttggcttcacccggcgcagtataggacacggctttgcaaagatgagactggttgtgctaggagagtttgtttctttgctcatagacgggatgagttaagaccggttaatgcttctactggttctgcaatggtttcaccaaggtcgtctaatcagtctcctgagatgtctgttatgtctcctttgacgctgggatcatcgccaatgaactctcctatggctaatggtgttcctttgtctccaagaaatggtggtttatggcagaacagagttaatagccttacaccaccaccgttgcagcttaatggtagcagattgaagtcgactttgagtgctagagatatggatatggagatggaacttaggtttcgcggtttggataaccggagacttggtgatctcaagccatccaacctcgaagagactttcggatcatatgactcagcttctgtgatgcaacttcaatcaccaagcaggcattctcagatgaaccactatccgtcttcacctgtgaggcagcctcctcctcatggattcgaatcttcagcagccatggcagctgcagtgatgaatgcaagatcctcagcgtttgcgaaacgcagcttgagtttcaaaccagctccagtagcttctaatgtctccgattggggatcaccaaatgggaagcttgagtggggaatgcaaagagatgagctgaacaagttgaggagaagtgcctccttcggcattcatggaaacaacaacaacagtgtgtcacgccctgctagagactacagtgacgagccagatgtgtcgtgggtgaactcactggtgaaagagaatgcaccagagagagtgaatgagagggttgggaatacggtgaatggtgcagcgagtagagacaagtttaagctgccgtcgtgggcagagcaaatgtatatagaccatgagcagcagattgtggcataagaagcagaaagaaagatgtgggatttatattgcttttgtcttctgggcctctctacacagaatctaacaaatctggcaataattctttgatttgtgtttgacccatagtttggttactagtatatgtttttttatgttctttttttctttgtcattctcttgtccttcgtgacactatgtaatgattaaaagcaaataattgatgcatgagttcaaatgttctttgaaggatccatcttattagctttgtaattgttgtgatatcttaatcttattggttacgtatttcaagtgctttagaaaaaatgggcctaagagattttggggagcttttttggcttgttattttcctcacatatacaacttgcagcttattatttattgaaaatcttttcttatctagattcaaaaagatttccacaaattttaattaacgacccctgattacaaagaaacctacccaaagtcaaattttgtccataatttctatcgtgtaggacactaaaaagtaaaaactcatacctaattggtttctagtagaaacggtcagtgcactatctttctttcaggttatcgaaggaaaaaagatcagtagagtagcatcgttaatagtagagttaagaaaagcatgtaacatgtggtctactttttatttcacagaaaaataccataccatgtgataatgtcgcataaaatctttacttttccggtgttatcgatgtgtgttaatgctaaatacccgaaacaatttcaagactcaattttgaactatcgaatagaattcttctaaaatggatgaggaaaaagtcgctggtttaagtcgtgcgaccctcaaaataaagttaggaatataatcacaagctgcatactttcattaatcaatttaaaaagaaacgactaactttattctttctttgccaaactccataattagttaagtctatgaatgaatgtgaagagagagttttacatttaaaattgtaaagggcaaattatagaaaattctgtgtccaccaattaggcttggctctttaactcactgttctcaatctttaataatccccatcttcttttctcctatatgattatctctctttccttcgtgcgtgttatctctctgagccacatgccgacacttacataactgttgaccaagtctctcttccttctttatcaaatcatgcaaccttcaagaacaagagtttcattttttgaaacaggagagaccatgaagcaaagaaagaagagttatctctcaatcttcgtgatcttcttctctcttttcttcttcgggatcttcatgtacaatgacaacctcaaatcctccattgctgacttcacatcttcgaacccattctctagttcatttgtggagttgccgccggatgagtgtgatctgttcaccggtcaatgggttttcgacaacaagacatatccattgtataaagaagaagagtgtgagttcttgacggagcaagtgacttgtttaagaaacggaaggaaagattctttgtttcagaattggagatggcaacctagagactgttctttaccaaagtaaagctaatgtttcaagatgccctgtttttatccggtttgatcgaattggtatttaacaattgtctgttttatgattggtttgatgaagattcaatgcaagagtgttgttagagaagctgaggaacaagagattgatgtttgtcggtgactcgttaaaccggaaccaatgggaatcaatggtttgtttggttcaatcagtgattcctcccggtagaaaaagcttaaaccagaccggttcactcactgttttcaaaatccaggtaataaacattaatccacttgtgtgacactgacactaatgacattatttttatagtttcttactttcttgggatatgcaaaactgaaatttaaaataggactataacgcgacggtggagttttattgggcgccatttttggtggaatcaaattcagacgatccggaaaagcacagtataatcgaccgtataataatgccagagtccatcgagaagcatggagtcaactggataggcgttgactttcttgtcttcaatagttacatctggtggatgaatactgtctccatcaaagtcctgtaagtagtaatgttatagtatacacactcacacatacttatgtattgaatatcctaggattgaagatttgtgatgatggaaacagacgtggatcgttcgatgatggggacacagagtatgatgagatcaaacggccaatagcgtacgagagggtgttgaggacattgggagattgggtggaccataacattgatcctctaagtacaactgttttcttcatgagcatgtctcctcttcacatcaagtaataaatttctcccatccataacattttttttttgtatctaatgtttatatttgattgttgttctgtttttgttttaggagctcagattgggctaatcctgagggtataaggtgtgctttagagacaacaccgatcttgaacatgtctttcaacgtggcttacgggcagttttccgcggtggggacggattacaggctgtttccggtggcggaaaacgttacacagtctctaaaagttcctattcatttcctcaacattactgcattgtctgagtatcgtaaagatgcacatacttcggtttacacgatcaagcaaggcaagttgctgacgcgggagcagcaaaacgatccagccaattttgctgattgcatacactggtgcttaccaggccttcctgatacatggaatgagtttctctatacacatattatttctcgaagatgagattctttcatcctcttttttggtttaaaaaaattcttgtgatgtatataggacagagattcaagggatttgaagttagccaagtaaggctaaaaatttgttgaataaagtgtacaattcacagggaaacacagatactataatttcagtaaatgacaagattagtaggtgtgtattatcagctacatgattgtaaaagatgttgaagtagttgaagttaaaacgttttgatagaccaactacgacccaacattcattaatgtcaaaaccaattttctcatatcgccagaaaccgaacacaacgagatgaagcaaactgacggcagagaaaggaaagcttacctttctctgctatactttgcagtcattcttcttcccgtattccttctcggatgctatctgtacaacgagaagcagctgagggttggccagtttcaggaattcaatacacataacctgcaagaacacatcactccactacaacaaagcaaagaagataaagacaagaagactgatcttgttccattagaattctgtgatgttttcacaggaaaatgggttcttgataacgtcacacatcctttatacaaagaagatgaatgtgagtttctatcagagtgggtggcttgtacaagaaacgggaggccagactctaagtaccagaaatggagatggcaacctcaagattgctctttgccaaggtcagtcccagctttctgagaacaaaaataagcaaaatgaataacactttcttcttctctcaatattctttcttttttcgggttctaggttcgacagtaagctgctgctagagaaactcaggggaaagaaactaatgttcattggtgattcaatacattacaatcagtggcaatccatggtttgtatggttcaatccgtgattccctcaggcaaaaagaccttaaaacacacagcacaaatgtccatcttcaacatagaggtattaaagactatcttctatgcaaaaagacaataatccaagaagcaaaagaactccaaatcttaccttctctactattctgaatgtgtaggagtacaatgcaaccatatcattttactgggcacctttcctagtcgaatcaaatgctgatcctccagacaagagagacgggaagaccgatccagtaatcattcctaattcaatctcgaaacacggcgagaactggaaagacgcagactacctcatattcaacacctacatatggtggactagacattccacgatcaaagttctgtaagtgataaacgatctctctaccaagttccaaactttcaaatttgccaatcttgatgaagttttctactttgatgcatgaagaaaacaagaatctttcaacaaaggagactcaaaagagtacaatgaaatcggaatctatatagtatacaaacaagtgttatcaacatggacaaaatggctagaacaaaacatcaacccaagtcaaacatctatcttcttcagcagcatgtcaccaactcatatcaggtactaaatcatcaaacacccataaaaatcaaaactttacagagactgatccttttcagttgcaaacagaagttcagattggggattcaatgaaggaagcaaatgtgaaaaagagacagaaccaatactaaacatgtcaaaaccaataaatgttggaacaaatcgaagactttacgaaatcgcactgaatgcgaccaaatctacaaaagtgccgattcatttcctcaacataacgactatgtcagagtatagaaaagatgggcatacctcattttacggttcgataaatgggaaactcatgacgccggagcagaagttagatccgagaacttttgctgattgttatcattggtgtcttccgggattgcctgattcatggaacgagttgctctctctgtatatcatctacaaaatttaaatgttttttctgattgaatgtgagaatttgcaaacaccagattccttcttcatcgggaacgtcaaaaagtcaccggaagagacgagagagcgacggcgaagtagagagaacattctaaaccggtttagtgttttaaataaaataccgtgaattatcggtttagctgagagcgactattgctgaaaccggtctagtcttaccaaatttctacctatttttcctttggtcaacaaacgttatatcgacagtcaaattgcggttggatgtatttaataccaaattattgaaaccgttatgtatgatttgataacgcattaaaccgttttgtaagaacaaaattgaacgtttgtgagaattttctttatccatttaataacattgaataatagtttttatttgtaattctaatgcgtacttttctttggatgcaatttgacaattctagtcgaattagctctacctgtttttactttggaacttccaaatttcacacatcacgattgatccaacactatgttgagaatccacaatcattaacttcttactaaagaagagaaattggtactggaaaacaaacgagacactttacgtagacgaaaacatacacatggtcatcaccatccgtaaactaaacaagaacttaagtacgcacaggaaactacacaagatataactacatggaaagatttaaaccggattaatattacatccgtgtggggaagtttgatttaggtcttggtcctgaatttggattcgtctatctcgactccttcctcctcagcgtgttccccaccaggcttgtctccggtgctaagaccacctttgcgtcccatctgctgatatccttcagttcctaactgctcctttcgagtttgccctcctcggctcctcccttcatataataaatattccacaaacattaatctcgttactctagcctaaagacctaacttgaaacatacgcaaccatgaataagagaaagaatgaccttcagcgagatgctgttgagcttcgaagcttttgcctcccgtaccacctggcacgacggtctcgcccttctttgccctctcatccagctgcttcttctcttgttgagacgccatggctctttagttacttacacaacacaagtttatataaaacactagacaagtaaaaaccaaacaaactcgcaacgacttgatgatgatatacgaagaagactatagtagctcgctctatatatagcgagttcaatccggagggcgttttggttgtgttgcatcgtggatgttcgacgtggtgactcagggacaatcggtacgtcatacgtatgctcttctttcttggtgacatgccacgtgtctgactttattagctgacgtatactttgaacgtggtagtggccgtacttcttcgccgcgtgttctttaactataccgccgcaattattttgtgtgttgcctttgtattcataaaatctttcaatcatttgactatactgtatgaaagtaaatatgaatacctgaggaagaaatcccggatggattcatgattggaaatgttggtaatcgtcattgaatttgtgccttacggttaggtgtataaattgctggtcaaaattcgttgacgttaggtggtccatatatcaagttcagttccgatcaaattgattgaatacgtggcatcgactttaagcagattcatatgcaaatattcattttagaaatcaaattacaatttgaaagcgtacattaagtcttattgttgaaaaaataaatataacaaactttttttactctcaactttgaaaagattcaaatgctatatctctgaattttagctcctaattctattattttggactctttaaaaaaaaaaaaaaaatttgaggatcgctgcccctggttttgactatcacacttattttgtgtagcattccatattgcttgaatgtgtctgcaatatttgagttatcaacgttatatatccttgttgcttcttttgattcgttttgtgaatgaatttatgttgtcctcaacggttctctctcaatactacgtgactacgtcaatgttatagctaaatgtgtgtaattttttttaatgtttttttaatatttttatttgtattgtaaacacaaaaatttgaactacaatctacgagcatgacaaattggcttgccaagtcaaaaaagggcgacacgagagtgattcttacgaggcaagttatttgtgttcctaagacgaattagggtcaatagttccccaactccaatcatctatacatcattattacatacacacttcacacttgcgtatggttacatcaattttaaacagcgtacgattctttaaatcaaagatttagttgttcttctttccttaaatgaattcactaaattttgccaggtcttcagatttttttttgactttttctaattatgacgtttgaaaacgatgcgggagtgaattaacaaccttcatatactaactataaataataatttatttcaatacctaattcctcctctaaatagatagattttctgaaaggcatatgtttcaagtctaattccttattcgaatctattgactcggattcaccaatatagtaccatcccatcaaaagtttgaaccattagtttacttaattattcatattaaacttttgaatagttatccatagactaacattgactaacttatataaggtttgatggtttctacttcgagattaaattagtaatgaatgcaagaatctaaatgatacgattctaatttttttgatacgtgcataagattctaataaatttgatacatgcattttccatagttgatcaaattaggtatgaagaccagaaataactagttcccttattaattcttagtacttatccttttttcgtctaaattcttagtattatgcaattttttctagcgtgtaaaattaacttcttttttttctttgttgagaaggtataaactaaacttgataatgataaatatataacttcacatatagttccatttcaaagaaaactaaagaatgccctaatacagttgtattcaatggacggcgcataatatagatcacttattctaaggtaaaagatttcacgtgatcaccgagtccaaccttctattcaaatctctcgttatggcaatttaataaccactagaaaaaacaaattatagagaaaggtaatttgggcaccgacgtgaatttgactaaattacgagagagaaagaaagagagacttggtcacgaaggtgttaattagcatgaaagagagagaaataatcgtcgttgaccattgaccataacttagtcagtcatatatataaaaatccaaccgcccactattgttcccctattcacaaggtccttgctttctcagacgtaaacaacaagaaattatattaacacaacaacaacaacaaaaagaccaaccctatttattcatattttctcttatatgcaactctcaaagaatccgatcaaacaaacgagaaatcgagagaagaattacaccgacgatttcaccatgaagagatctgtaatcatggctcctgaatctccggtttttttcccacctccgcttgttttctctccgacgtcggtcaaaacgccgttgtcttctcctcgttcgtcgccaccgaagctgacgatggttgcttgtcctccaagaaagccaaaggagacgaagactacgggttctgattctgaaacggtgttgaaaaggaaacgaccaccgatgcttgacttaacggcggctccgacggttgcatcgtggtgcagtacgacgagagagacggcggagaaaggagcggaagttgttgaagcagaagaagatggatactactctgtttattgcaagagaggaagacgcggaccaatggaagataggtatttcgcggccgttgatcgtaacgacgacggaggttacaaaaatgctttctttggggtatttgatggtcacggcggatccaaggcggcggaattcgctgcgatgaatctagggaacaatatcgaggcggcaatggcatcggcgagatcaggagaagatggttgttcgatggagagtgcgataagagaaggttatatcaaaacggatgaggatttcttgaaagaaggttcgagaggtggcgcgtgttgtgtaaccgctttgatatcgaaaggcgagcttgcggtttcgaatgcaggcgactgccgggctgttatgagtcgtggtggaaccgcggaagctctcacttccgatcataatccttctcaagcaaatgagctcaaaaggattgaagcattggtgagttttatccttgtgcattggattttgattagtaacatcacataattgtggaattgcatttcaaaaaaaaaaaatcattgaattcgtggaaaaagcgactctagtaaaaatgcggttgataaaatttttgcaaattggagaatcattctaccattttgcgttcaaaataatgttttagtgcggtttggtttaatttgtgtttggtttacttatttttgaatgtgtgtagggtggttatgttgactgctgcaacggcgtttggagaattcaagggacattagcagtctcacgaggaattggagaccggtacctcaaggagtgggtgatagctgaaccggaaaccagaacattacggattaaaccggagttcgaattcttgatcttagcatctgatggcctgtgggacaaggtaagcataacaagaaatgcatgatttcaaaaatttgattttcatttttggtctttggatttaatgttgaagctggtttgtcctataggtaacgaaccaagaggccgtcgatgtcgttcgaccgtactgcgtaggcgtagagaatccaatgacactttctgcttgcaagaaactggctgagctatcggttaagagaggctctttggatgatataagtctaattataattcagctacaaaactttcttccatgatatattaacacatagtacattagctaaacttaattaatttcattaggtcgtagttattaataaattttgttcggtattttacatgtaaatacataaaggtttggaaaataattaatttattgttattgttcttagagataagctccaaaatatttttggtttacgatataaacactacataatacatgaaattgcactatctaaccatttatcatcctttttatcctcaacttttttattctcatgcattttgaaaaccacattctaatcatatttctgcttttatgtgtaaaaccaacaaagatgtacatggttgatatacacacgtagacataaccttgacaagcaacatcttcgtcgttactcattttacagatttctacccatctgccttcaataaaacaaacatcaaccatattagtaactgcatggtaaccaagcatacgtgagtttttgttgtaaggaccggtaaacactttgaacctataaacacctccgcctcttccaacaactcagaataatgaacaagatcacatgctaaggttttgtaatgcttcttacaaacaaaagtttatttaaaaagggaagggagagtttataaaatataaattagcattgacattggtgtgaggttcttcacataatcatatcattctgaccaaaatattagtcggaaaatggttagaaacacaccaatatgagttgttttcttgtagttctgagaaaacatagatgaaccaatatatcaacgtaagtaactaagataaattgtgaatcatgagaatgcaagaaatattttctcatgattacatgagatgaaatactaccttacaattcatcaaactttttgtagaaaaaggtattgaagaaatgaaaattggatgtagacaaaaaaataaaaaattcttgctgcaagatcctggacaaagacaataatcacattaagaacaatgtaaattttttaaaattagtaaaaactctctataaattaataattcacaccatttaaattttagaggaggtgatgaaaggacattatcatcaattttggtagttaacccccaattatttaactaatcaagatacaaggggtacaactgtaatatattcatagtttggtgtgttttctacaatattcagaaacacgatttaagacgattgaaactaaaaataaaaagtgtcggacttgtaaattttcgctcagcgatctgcttccaatggcgatctacttcattctctatacacttctcacgatcatcttcgccgtatctctgagtttatttctttccgtgatcaatgcaagaaagagcagaaaacgtgcggtaggattcttccatccgtacacgaacgacggtggcggcggcgagagagtgctctggtgcgccgttaaagccattcaagaggaaaatcccgatcttgactgtgtcatcttcaccggagatcatgactcttcttctgatagcttagctcgtcgcgccgttgatcgattcggtgttcaccttcagtctcctcctaaggtcccattactcctaaagtttaaatttttatcaatttgaattggttctaataacacagaacctctcagatttgagggcaagtttcaattttgcaatttgggttagttttgatgcaagttttgtgcttttgttggttgttgttgtgtggctttaggtgattcatctaaacaaaaggaaatggattgaagagagtacttacccacattttacaatgataggtcagagtcttggttcggtttacttagcgtgggaagcattacgcatgttcactcctttgtatttccttgacactagtggatatgcgtttacatatcctcttgctcggatctttggttgcaaagttgtttgctatactcattatccaactattagtttggatatgatttctcgtgttcgtcagaggaactctatgtataacaatgatgcttccattgctaagaggttttggttatctccttgcttatttggtgtttttcaaaagtgaaaagtttctatttctttgtttagtgtaatgatgtttgttgctttttttgtgtagcaattggttatctacttgcaaattagtctattacagagcttttagctggatgtatgggatggttgggtcatgtactcatttagctatggttaactcttcgtggactaagtcccatatcgaagtgctttggagaattccagaacggattacacgggtctacccgccctgtgatacttcaggacttcaggtgataaccttcagacagctcgaatcttatgatttttgtctgttttctggttacatctcagtatttgctgacatcttgggcttattgcaggcgtttcctcttgaacgatcatctgatcctcctaaaatcatatcagttgctcaatttcgtcctgagaaggtgagggatccagtatttgacttatgagaatagggtactatagttttgagggctcacactccaaagttcaaaagagtcgtccagcttactcaattacagtcttgtaacaggctcatatgcttcagcttgaggccttttcactagccttagagaagctagatgcagacgtccctagacccaagctccaatttgtgggaagttgtagaaacaattcagatgaagaacgtctgcagaaattgaaagacagagcagtggaactaaaagtagatggagacgtgcaattctataaaaatgccatgtacaggtatttgctcaaagctctttacggcattctctattttgtcttgcaatactatcagagcttccatgattcttagttgttagtatcggactgcagagaactagtggaactgttaggaaatgcagttgcaggactgcatgggatgatagatgaacactttggtataagtgttgttgagtacatggctgctggtgcaatcccaataggtcagacttaaggacttgtatatgtgattttatctttcagttactcttgcaatttctctaatggatcctctgtttttaattgtgatgcagctcacaactcagctggacctaaaatggacattgtgttggaagaagacggacaaaaaaccgggtttcttgctgagactgtggaggaatacgctgaagcgatccttgagattgtgaagatgaatgaaacagagaggcttaaaatggctgaatctgctagaaaacgagcggcaaggttctctgaacaacggttttgtgaggacttcaaaactgcgattcgacccattttcacaggtcctcttaaatgacagttcttaaaccctcaaaacctgcttactgcactagcttttaaacgcacaagacaagctaggttataccttttatcctctctttatagatttttttttttaattctggttaaaggtctgacgtagacgttgtaagaaacagtttggtcaaaagaaacgagtaagatcttcctatttctagttgactgttggggaaaactgacaccaacatttgctttcaaacgttttcgatttgtccgaatgcattttattatgagaaacttggtgctattcacttcaatgaatggtcggaattggatcttaacaagagagcaagattatgtgaatgtagcaaataacattagaaacagagtaaggaataagactacaagaggaatcactaaaacacagttataaaaagccaaggagcatcatcgttatccatggacaacacatagcctggaaccactctttcaaagctgactcttgctattgcacctcatgctcaaacgcctcgttaccttgttaaaatcagtttaatcgatatggaaaaataattgaatggtcaagaacgtaaattctaatactatggagttggaaactaaaatttgacagatttcaattaattgggtttcttaataagtattagttttttcagtactttcatagtatgatgcttgttgttaattatagattcttctttttaaagttctcaaatgattgtttttggtcacgccggtgaatggttggtcgtggtccttgtgacatgtaaaacatttgctcaaatagttttttttctatagtacatttagtaaatatcactttcgctttttgcacaaaataagtcctgccaagtgccaatatatataaaatataatatttaatacaaaaaccttcattgtataaaaatgttcacgaatctacgactacgagcacgaggttaaagaataggcgtagtaacagtgtctgcgcaaacattttgatcatacattttgaaaaaactatttttttgtaacaatataatttccaaaacatcatttcttattaaccctaacgagttaaaaaaaatgagaaatccccaatattcactttaaatgctccaaactaaaagagacggaagacaagtcttcattgtcggtagtcaacagttgttctattaacaaagattaaaaagatgtaatatacgacgaaaacggaaaagtaactaacaaagtagtgtagtactcgattgcttgatatgattaccaatttaccaagatggcaactccaaattattcccaccgaaaagatgatcatcatgcgaacactttgttacaattattcattctatataaacatatgattattcccatcgttgaagaatctttacttaagattctcaccgtaccacttaattttcaatagtgttaggcttgttacttgagatgcttgaaacttgatgagtaagaggatgaattgcatactttgagatatcagaaattatcaatcatgatcggccatcataaactttttaaatagcaacaagatcgattgattcccttccagattttatactttctttaccaactttgattcacaaagttccaagattgtcagtttgattgataaagttcaacccaaatcactagagtgtcagtgggtaataagaactagaatgtcaatggattgataaactcgaatctgactacaatcttgagaattatttttagtccaatgtgtggtatgaaagttttgatttgaagtgttacttttggccctacatatcttgatttatgcgcaaattttatggatatatgcgattaaaaacttgaaaaacaaaaaatcgttttagtggaaccacatatattaattattgaataaaggcttctctcttccgcatgtgagtatatgtgacaagaagcgccaccaaatctaagttaaagcttgttttttctgtcgatgcgcatacaacaagttttttttttctcatatcacacaataatacattataatttctgtaaaatgcggttcaactacaatgcgatttttatttattacttttatgttttataaacgttgtgactatagtaaatttgtgaagcgtgaagagaaaacaaagtttgtagtggatcgtctttttagggtttttactaaatcgtgtgaaagaatagatataacaatacggtatgtttaagatctcaaaaactgatgcaaacagaaaagataaatcatttcatacatgtaatagaaagataaatcaattttacaattatatatatatatatatatagatatatttgtaaaaacttatttgatgataacatatagtgaaagtacgtttgtgaaaaatgagtaaatgatatttgatcagaataaagagacgacgaaatctataaactagctcaaacatctttgatttggtcttctgtccttcgtcgacctctatgtattcctctccacatgttcccgtcaccattttatctcattaaaacacattgtcccatgaggccatgctacaacatctccaaatctcattatctgtttcatttattttctataacgattgacgaacaaacacaatgaatatctagctagtaatttcgatatttgactatgcaaaataaaatccatataccatgtttcgagtaggcaagtgaaaggaaaaagtggataccgctaaagaaggcattgagaacgtggagaaaagttgtcaatgtggcaaattatcattagcatcttcattgtatagcttttgatatgtgtctttagtatagattaataataaaatcaaagacatctcctctttttggtgtctcaaatgtcttcttagagatacaaatcaaaaattaaagacactcctcatttgctttatattttttttactagttttatatttaaagacacccacaaaaaaatgaccaatgtggatgctcttagttccaattcaaaactctgctcagaaaatatgatcataaagaaaaaaatgtagagaaaatgattggaacatgagagatgtgagtgataccaccggtccggtaaaatttttttttttttacaaatagaaaagttaaagataaaagcatttccctccaatgattgttattgacgataatcgttgtcaaatccaaattttctactattttcatatatcgatttcaatgatgttttcgatcgactttataaccagttggtctttttccatatgattaaagtgggtcgatatacctatttgatttgaacgactcaactttcaaactacatatccctatcttaaattagatctcgaaaacaacttgtatgtttacttatccacacacacacaaaaattgtatatacttaggaataatcaagttttagtgagatagtaaactttggagtacatgcactaacatatttattcgcaaaaaaacacgtgtgtaaaaattgtaaacaaggaccaagttatttttatacgataacactttatttatacaatgtcacttgtacaataatatgcgacccaaaaaaatacgaaatttctacctcgaatttcttacaaaattataactccatatcatatgactctttaagtggtgagcgaaaattcaacacaaaatttgcggctctgcacgtttatgcaaattttaaatttcatcatataaagaaaagagcaataaaagtctacaaggagtatcacaccaatcaacatcaaccttaaatttctccttcattatttagatcaacacccaaacttcgacctctctctatctcactcacttccactacttacacagaaaaccagtttcagattctgcaaaaaaaaaaaaaaaaaacttataacttctttttaaaatacaaaaaataaaacttattaagcaattctttattaggtttctcgtggcgatggagaattcttacgactcaagcaagtggtctgattctacaactccatatatggtctcgtggtcactacaatctgagtcctctgattctgattggaaccggtttaatcttggcttctcttcttcctccttcggtggtaatttcccggctgatgattgtgtcggtgggatcgaaaaagctgagtcactttcaagaagccaccgtctagcggagaaaagacgccgtgaccggataaattctcacctcactgctctccggaaacttgtccccaattccgacaaggtatgtatgactctcacaactgaaatactctcggttcagtcatgaaacttcaatttgagcaaaccggtttatatctgatttcggttaaagaatttttaattcgagttgaccggtttattttctagctgggttatgtaaaccgattttgacttgactctactgcagttagacaaagcagctctattagcaacagtgattgaacaagtgaaagaactcaaacaaaaagcagcagaatcaccaatcttccaagatcttccaacagaagcagatgaagtaactgtacagcctgaaactatctctgactttgaatcaaacacaaacacaatcatcttcaaagcttctttttgctgcgaagatcaacccgaagcaatctcagagattattagagttctcacaaagcttcaactcgaaacaatccaagcagagataatctctgttgggggaagaatgagaatcaatttcatcttaaaagatagcaactgcaatgagactacaaacatagctgcttcagcaaaagctttgaagcaatctctctgctctgcgttaaatcgaatcacatcttcttctacgactacttcttcagtttgcagaatcagaagtaaaagacagagatggttcctctcttctcattattctcacaatgaataaatttcacaatatacatatacatagtataacacaaacctcattattactaaaggttttttccgcattttggtttagatttgttcctactaaaccaatcacgatttgtatatttcaagatttgtataacctaaatctaaatcattccataagacctaagccaagaataacattattcgtaataaactgagtagatagattaagctttaacattaattgagaatccataacaatccaacaacaaggaataacttaactgaaacaagttcagacaaaagtacttaggatttaagcgaaaagacagaaacagggaaggtcttgaagatgagtctacttagatcgctgtctcatctttcgtctcttcctcttcagcctcctcattcgcttcttcttccactgcgaaaccacgcatatacagaaacttagcagcaacaataagagacgtagcagattgatagactaaaatgtattggtgaagatttgaaagatgaataccttagctctcatggcggagaaactcttttgctcagaaccctaatcggcgatttcacggcgacggtaacaagaagtggaaatgtagcgtaactgtgaatatataccttgaaaaccctagggtagaggtatatatatatgggcctttttcttagcccatataacaatatgggccttttgcttatatattcttagcttttaagaaatttggacgagaatcaaaagttaaatattctttttttctgtctgttaaaataaattatttgtttgtttctatgggtttttaaagaaaatttgttataaatttggccaactcatccatcatatacttattaatgtttttatataaaaaaaaacgtatgcattttaataaaatcaggttaatgattaagattaaggatggaaaaaaaaagtaaatcacaataaaatatagaaataagagataggtctccgatgaaataaaaatgcatagtcaaaatcaacgaaacaaaatgaccaactcaaagtcaacaaaataaaaagattttttattccaaaacaacgaaacaaaatgaccaacagtttgtagaaaaaaaaaagacaaacacaagtttaaaacaacaaaaagaaaagctttttaaagctccacaaacaaacaaagaaacacagtttaaagataaacgcatacaaacttagaacacaaaccaaatcaagagtttagaaatgatgattgttaaaacccggccacaccatgttggtattagacgtcgtcgcatcaccattgttttctccagcggttgttacattaggatatggttcttggcgaacaccatcattagccgttatagtgttgttgctcatgtaaaattgtgagttgttaatgttgattccttcgtttattcccagctcacttctcatgtaatcaaaaggatcttggcttggttgattcatagccattgttggattattgatcatgctgtgatgttgtaaaggttgggagactgacccagccaaaccttgggaagtcatcatttggagacgaaatggatccatttccaaatgagggtttccgttgctactgcttccttgataaagacgatagcttttagggtttggatttccgttctccatttgttgcggtatttcatatttaggtggactaggtggaaaaacccattcatcaaaaaagtaataacttttactctgcttaaatatatcggtgttgatgaatcttgttgcttcatctgtccttccagctcttttattatcttgaccgcctcctacaaaaccatcatttgtggtggttttgaactcttcgacttgtatttcaaatggaaacactggtggatcgcgaagaggaggaaattgcatgaaagctagtttcttcctacaaagtaggatagtatctcttgagaaagataacaaggcatacatctcactttggttaagatcagcaatttcacgaccgctttggagttgcatcatcagctcatcaatgacatgctccttgttcttctttttactcttcttcaattgttcttgaaacttatgtgtcttctcttttaggtaggattcgacatttgactctttcttcttctgcacggacttcggtaaagcgaaaaattcgtctaggagaccatgagtcgcctgaggagatggccacaccaatggtccaaccttatcggggctgaaaatgattacaatagcccttacagcacacaatatggttagctctttcacctttttaagtaatcctaccctcattttttgcaaacttgttgctcttgacttgtcattctcgatccatacaagttttactttctttcttgtcatgatcactcttcgatttttatttctctcttttaaaattttaaatgttgttgagcatatgaatgaagattagcgcgggaatccgtttaaatagtgttgaaaagatgagattttggaaaatgatactagtcaaaagatgtaaaattaattgctacttactaaaaaatattgaatgtctatggtaatgttttagttaaaccaaaccttttagatctaaaccaagttgaaaatatcaactcaaaaactagaattttcctatgttttggttataaagttattttcaaatatcataaataccatagaaaattgactaaaaatgaaacttattttgctaaaaaagtaaaagtttaagaactgaattcaaagctaattaaaaatttaccaaactatattggatttggttttacattgattattctttaaaaacaatactagtaaacaaaaactaaaatccaaatcaaaccattaacatgttaaaatctttatgtggttaattgtactattacagaaaattgaaataactgaatttctgtccaaatttaggtcctagtcaatataccaaattgatgatttaattaattgttctgtcattatttaatgctaatgattatattgactaacattattttcattgttgtgaatcatattaattcatagtgttagataattattttggaaactaaatgttgactatacattttcttcagtgtaagtatcattttcatatttacatagtatgaattaaatatatatatatatgtattaccatatgtatacataaaagttgactcttgaattctttatttataaattgttttttttacttcagatgttttcttgttattacattgagactctaaactgagaattgtttataattgttttatacaaaaaactgaaacaacaatacttttaagggaaaaatataagagaataatatattcttaaaactctaatggacatcttgtatctttttctttttctttgtttagcgatcttttttctctcatcgttgtgttgttgtggttgaatgttttcttttgtgtacgtagtaactctctttgtttctcgattttgttttttttggattcggtttggtactactttgccagatttcaataataccaagatatagaggaaaacaataaaactaagctttattccacattgtctggtgatctttcataaacaacattgtatgatttgattaccaaaataatcggttctagaaaagtttatgtcaatctctatctagtatatgaatcaccatacccatatttgtgcacttaaattattacgtaaccaagatatagaaaagtgttgtgatttcatataacaaatgaaaatataataatctattttgttgtgttttgtatatataattattataaattaaattaattattaatattgaaatattcatgtataacccagtcagatatgggattatttttaatttaaattttgtataatactgttaaaagattcgaaatataatcataaacaaaaaataaaattgattttttcttgtcaacttccaataaacaccatagtaaacaagaaatcacaggacaagggaaatacagaaacggagaactctttttagtcaaagaaagctaggattcggacaaaatcatgtccaaacactttgaaggatgatcgatacaaaaaattgtaaacttgaatatgaagtgttggtgtgagaatacccagctcgaataatgtaaataatcttctcaacgacaacaattatgcatccagtgatgaacactttttgaaaacgtgtttctctccatagtttctacattgatgattcctatattactaaaacttaatagagatatgtgtaaatattctcagagataaacaaaatataactatatataacctctgaaactcgaacaaccaaacagaaattatcatatcctatcaataattatatattaaggtaggcacactgtgaaggaagtgttgaaccaataaaattcccatacaactttccaccatctcctccgattctcttccacatatacatactttattggaaccgtaatctcttttacgaattccttgaaaataaaaatcttcaaaaaaataataaaaataccctcttatttatctctataggtagtaaaaaaatcctccaaaattttgcatgcagagctcctcatagaatgcaatctctttgattcctctcaacaatgaatctccaatgctcttgaccgaccttagggatgctcatcgtatataatatgatcttccacaaaaacaaattaatagaattcccccaagatgggatcaataaaatcccaaatactcccccaattatgactatattcttcttctcctccaaaaggccaaatggtcgaagatccatctccaaccatataacccggatccagacccatagaacataccggatcaaccaacggcggtggatgagttattgatagactcgaacccaccgaaccagctagagagttcaaatcctccatcgaactattattattacacccacttcctccttgttcctgccctaacgccacctcatgatgaaacgaagtcgaattagttaccggaacatcagtgagctcgatgtcagaaatcttgttattgttagtattagaatgaagattctgatactgttggtgttggaattgtcccatctggaccatctgattttgttgttgttgttgttgagggaaaaaaccataactagggcataacatagaggtcccaccattaaggaagatgttgttgttaaaagggataccgtacggaccaaagttggctcctcctcctacggtggcggcggcggggcgagggaggagaggtcttagggtttgagtggaggaagaggaggtggaaggagaagaagcggcggagacggaggaggaagaggaagagacggaggaaggagacgaaggggttaagttgagctgagcacgtgacccgtataggtaaacggcagcccggtcgtaggcacgtgcggcgtcttcggcggttgcgaaagtaccaagccacttgcgagtgcgcttacgtggctctcggatctcggcgacccatttgccccagcttctttgtcgaacgccacggtaacggaacttggagttgtccggaccacctttgcctttgcgtttgcgttgagcggaggaagttgatgagtcggtggtggaatcggattgaggattattatgggttagggtttggttattatcttccagatggttgtgttgatgttgggaagctaaagggtccatagatgaagaagaagaagaagaagaagaggaagaggaagtagagagagaaagagagagattaaagaaattgagaaaaatagtggagaggacgaatcaagaaggaagggaaactgaagagtgtttgaatgtcatcgttgtgaatggtcgattagggcggtgcttcttttatttatacttacactctcttctcactcacttctttttttcttttctttttacttacccgtttgttttctaccaaagaagaaatttgtgttgtcataagttacttgttacacattggaatgtaatcaaggatattataaaaacatttaattgctttctttcttttgggtaactatagcaaatcatgagcgatatataacaatatcttgaagttggttcttttctttgattggatgggtaattgtgagaaatactcgcatgttgaaaacactccaaggcattcagatttcagaggattcaaccagagagaactgaatcaaattcaccaaggttaggaatattgcaacatatataagagaaataagcgtgttcaaaaatatatattaagagaaataagaaacgaataatctaagatggaacagagatatcatttttgtttgtttttctaagtacttgtcaatttaaattgtaacaaaaacatagcaaaagataggcaatttaaaagattaagaagatcaagtgaataaaacagtagacaaagataacaaagaaaatgatttatgagttcaagaattaaaagcatcgtttaaagttggcaagcaatgaaactagaataaatcattacataacggctaacgggggctgattagccataaattgtagagaatgaaacactaatcaatgaataattacaaagcgtggcatgaattacccaattttgttcaactctcttgcaatttaagtggttaacaagcattaacagataagtatactaaaaaggatcaaggtaattaatctaccattaccaacaaccctagtaaaagatctaaatgcatttttaatagtgatctttatattttcctctatttatagaggtgactctattttaaaggcattatgttcaaatggtcacctctaaaatagagttttctctataatagaggaagaaatagaaatatttactttttgtctctataaatagagatctctacaattcatctctaatttttcttctatttttgaggaaactctattttagaggtgaccattggagcacaatgcttctaaaatagaggcacctctaaaatagagaaaattatagaggtgaccattggagatggtctaaccatattcgcccctaatttggttttaatctaacttttagtgttgaacttaaccgaagcttctatacttgatgattatgatcttagagaaaaatttaagctgttgggaaatcaccttatgatactatttttttgatgttttatctttatacgtaaaataaaattgtaaacatagatataattaagggatcggaggaaaaacatctggtacaacacgtatcatatttttggacataagtaaaaactagaatcatatttctggagtagtacttgttaaattttggagaagaaaaataagttgatttgcgcactcggagagtgttgcagatccattgcctgctgcagccactggagggacagaaatacagatgcagagagacacagtaattatttttctgctttcattacatagatatatgtgttcatttagtccacttaacaccattcttggaagacgacttggcttcagtcaaatacttcgtccgatagatttagattttggatactacaccttttattaatcttaaaaaagaattatgtagaaatttaaaatactcacatgtcaatggataaataaataaatatattaaaaagaggagttatagtgtagatatttatgtacgcttcttctttctttttttgtcatcatttatgtatgcttcgactttaagaaatattaaaaacaaaatataactgacattttttataagaaaaggaattttgaaaacagagagaagagaagagagtttatttttttggtcgcctagaaagactaatctaccgtatagattatgatgtttgacccacaaatataacaaatggaagaccattaacgtttagacttttttcgaaataaaaacttgacttcttagatcttataccattgaaattaagagacaaattttcttaatattcttttactaaaagtaaaaataaataaaataagaatttgttgaattatctattgttcttatgaatggtagcatatacatgactccttttaatctataaaacataactcttagaactatcgtcataataacaagtttacttagaaacttttcattgatactactaatatagaattaaagattcgtctgcaagggatttacttttgttgtttgccaactacaaaactatcaattattaaacgaagagaaaaataggaatattgcatgggagagatgaggtggcgaggaaagaagcaaagacagcaaaagaaccaaagctttttgtgttgtggtttctgagatctcaacccaattgccttggaactctcacctttttatgtctcagcagaacccaactagttgcgccatacattcattttcttgcatttatccactttattatatagtatcaatcaatatagcttgattattccaatctcaatcattcacgtgaaattttgtataacaatgactcaaacatttgataacattaaagagacattgttgaaggctttttttttagtcaaatgatttccagatgcttaagttaaaatgatgactatatcaaaaggcaaagaatttcaatgctttgctcactaagttctgcaacggatcaaatatatgtttcgaaagatagaaagtgttcatgtttgaatattttcatataaaaaaaagcaaatggttgttgcggcagaggaatattgtcgagcaagatgataaaaatattcacatgcccacgattacaaaccgtgggctgcactttaaacaacagctaagattatgtgtgcgtctatataaaaaaaaaaatgaattctcaaaaaacctttacgaaattctcaaccaatgcctaaggaaaaacaccagtaaggtccaaaaacttgttaacgattcaaaacatttctattttccaaaacgcacagtgaaatgaatgctctgggctaataatgcccaagaaaaaacaccagtaaggtcctaaaacatataaagccgttataggcttcaagaacctcaactcaaatcactcaccaagcctctatagtatagacgatggagaagcattcatattgggctttctggtccattccttttttataatccgtccattttaagtgtaaggtttaaatcctgaacaaattagctatatatttcgaacgaattctgcaactatacacaaactaaacaaacctaaccaaaaccatttatttgtatctgtttacaggtaaagggtaaatttcatctgaatctttgccgatcaaagcctttgtttttttgcttagtttgtttgatgttggctatgtttatttagtttgttaatgaatcaattatacggattctaagattgtgtaagtagcttcgcagggaaacaaacgtttttcgggaatagaccatttttccccacttctatcttgaatctcacaatcaagataactaaagtacttcaaatgtgttatgagttattccgatgtatgataattcttagcgttttgcttttcatcgataacacctcgaaatctcaaatattattgatttatgtaaaaatgttactacattataatcagagttttgaatcaaataaagcaatcttacaaaacacttctctctttggttgcgtatttcgccagaatttttgtacattcgttttcttttctatgttttaggttatcttcaagtcggaacatataaaatgatcttaaaagattaagaaatacggatatgcacttagattatatcgttatttaattactttgtatggtggagcttaatatataaatgtaatttcacatctatttgcagatatacgttggatagtaggtagttccatgctggctataaaataaaatcgtaatttaaaagtcgattattaagatatttatgagttatgcaaagttcattccctttggtcgagctgactttttagtgccaaatctctaattgagattcgctccaaccataaatataaatgagtcgattcatgtctcatataatgcgtatttatcgttgacaaaagaaaatgaaatgataacgtatttatttgtttcatcaatgataatgtatttgtcatcaaatattttatcagattatcttattcagtgtcaaaattcctttttatggtaaaagtgtcatagttccttcaagaaggattacttattaaatctataatatgattctatgattagcgtcgagtcatatagaagctgcgacatgtcagtctgacttgcggtgtctctaattaaataatgaattaacgcacgtctacttaaaccggtattaaacatttctaactaatcagagtttagtcaaaccattttcaatctttaatggggcggttccaatggtgattctcatccccattacgattttatattttgagaatcttgaataattggaaattgtccaaagtaaacagacttgtatgtataaagtttctacttataatatgtaaacaaatgaatttggatatgtttaatattccgggaagggattcattttgtggaaaatatcttgattcttgagcaaatgtgaagtatcaaatatagttagtttaatgaaatatctaatattaaaagtaacttttttacttgattatacggattattctttgacaagactagttttcaacatttattctccataatgtacaaattcatccaaaaggcaaaaacttacaagaccattgaaaagataacaactaaacaaattcagaatgatattaatcagttatagagacgatcaatttttcttttgacatagatacttcttcacttatgaattatagatacaaaaactaactacatatacaatttggtgaaacattaaaaaaagattaaaattaggagaacaaagggttttaacataataatagccaatcatgcttgttgtttgccgacacatactattgcatcaatcgcgctacttgggaccaatggaacaccaaggctactatatatcacggatctcaaaaggaacctttttatcttttgatataaaattccagtaataatagttgttatgttatgcaacaatttaaatgcattgttaagtttaaacttaatgtcctaaacaagattatgagcttatttgaaacatataaagtattatgtacgatatatatagttagaaaaagtgttttcggttgctagtttgctattataagatcctatttttctataaataaatcgataaattgatagtggatcgcaaataggcgtgcaatgagaagaagaataaaataaataaatctataatggtgatttatgttggatgattaaacaaataaattggaaggtgggagaaggaagtaaacaaataatataagaaaaccaaaaatggatttaaaataaaataagtcaaaactcatattttacaagtcaacggaggagagttcataatttattttagaaaaaggtaaaaaagtaaaaaacgtaaagagtaaaaaattagaatttatcctttctctaatctaagcgttaggactcgtcacaagattctcgtacgtgtcaacagagcttgacggaacggcgaccattactttaacggcgtcattttgttcaggaatcggaagcaacaaacagtaacggtcgcaacagaccgatccaacatgaaccggtttacccaaaccaaaatcaagcttctctaaaccgagacgtgaccattgcgacaatatcaagactccaaccgagtcaggactcgctctctccttgctcacagcttccaccaccgatctgacgtactcgtcaccgactcgctccttcgcttgtttcacgagcatcgtcgcgtagcttaatcctttctccgtcaagtctttcacggtggtttgagcacatccgacgacgaatgcgttcccgtagaacccactgggtagactcggtttgactcggtctctaatgttgacgctaaacaaaagcttaaggacctgattcgatggcaagttcagtgatctcgcccagctccgccatacatgtgcagagagtacctcgaacgatgtgtgtttagaattgaactcaccgagtcgactcgcgagtttctttagctcgttaagtttctgtctctcgaagacaaccgatgtaggaacgagtcgctcggcgttgaatcggttaacgaatccgcatagatcgggaacacggttgaactcgggatgactcaacgagtcacgaatcggagacggcataagcaattgacgatcccagagatgtttccgttttaactcggtttgactcagtgagtctttagataactcggcgaataaagtgagaaactcggcgctaccgattccatcggagacgcagtggttaacaccgacggctaaagcagcaccaccgtcacggagccaagtgagctgaacgacgagaggtggagcaccagcgaggacatcgatgacgtggagcgaaagaagctttctccagctagtcacgtgccggggaggtttctgaaagtcaaggcacgtgaggatgtcagagacggcttcaagaaacagagcaccttggccacggcaattgacctcgagacctccgccgccgtcgggtttttctcggacgcggccggagaaagggaagtaaggaacgagagcgcgagagagagcggatttgagacgaccggagagagaatactccgggtcggaaacgggtgggtaaacgaggaggtattcaatggtgaatcggaggaaaagctgagaatctaaagcggagagagacagaacagaagaaggtgtttggtcggaaggagtaataactgtggcttctttcacatgaactaaggatcccattgcttttttttttcttcttatgatgctctgtttttcttcttcttcagaaataaacaacaaggtgggtctctgctatgtgtattatatatatatctctgattattattatataaatgtatattatatgctttttctctttgttttctgttacaaatatatgtgattgtatactcacgtatatagagtatcgagacaagtagggtaatttcgtaatttgggtgttctttgtttttttttacgtggtgtgtcttgtgttgtgtgttgtatcgtgcaaatgtactcttcactcttgtgtgtacgtgttgccttattctcattgatttgagttttgtggcaattttttttttttttggttgatccgtaggtacgaaagttatacatgttcttggaatgtagattttaatggagcatggcgactaatgttcctccatgagcatagtttttttgttcatagtgtttgtttttgagaattttagcacatgttttttcttttgagattttttttaagcaaattagtcacatttttttggtaatcaaaatgtaaatccaaaactttcttcatatatatgatatttacagatttggcaaaaaaaaataaagtgtaattttaaagtgtaattagcaaattggctgcctaacatgagttctaggaacttttgagtaactactaattagtattgaatatgcaaaaagagagatacactagttttattggggatattgaaaagatttcgacaatatttggttgatcttggatatttcgttgatttaagttatttggagaagcgaacaatatacatcatacaacaacaaacctaaaaagcgacttggaaaaggaagggacttactcgaccaaaaccgactccagtaacaaatttgaagtttacacttttcttgttgcagggggttttatatatacacttttcttgttgagaatgatttggatgtatataaggggtaatattaatgagaataaaatggttgtggtggcggtttacacaatatgatgtgccttgttgtttgggcgttggcgcatgtgtctaaaacagtgaaagatttggtgctaagattctcatggaataactttattggacaaagacaaaaatatactcatggaatattatatgaaatacatacccttccataattcggcaaaatttatatagagagagagatacatcaccatttctttccttattatagtcatcttatggttatcaacttatcatcactaacatgtgttatttgataaaaataattttgaatatcagaacactcttaggacacatttatgacttttaatttcgaagcccaaaagtttaaagtcaaattattcaataaattactagattcaataataattagtttcaagtgttgtttgtcatatggacttctaaaatgaaaatgagttttttttttaaaaaaaatacttataaaatgaattattttcccatatacagtagctccaaccaaaagaaataaaattaagctatgtaccatctctttaccacgcgacacgaggcatgagttacataccgaaagatcatgaaggaatgtaatttttaaatggtaaacaaaccattcgaattaatataaataaaccatttgtgcacttttaattgaaatcatatgaatatataattcaaaagcaatgccacttttttctttaaattttactgtagtggtctagtcaattctagcatggacccataaatatttaacgtggtcactcgtatagtatatatgatctacttttcttttaactcatatttttttcggtatgatataaagcttctttattcaatgatgatagaacagtgtacttcggccctacaaatattacctggtcttattaataatccaaaatgtgatgagtagagtcttgagagatttaaggatcgatcaaatcttaattctatggagtttctaataagaaagaagatgcatgaaaccatatattgaatgctgatgttgcataatcacattatactgtctcaatctttccgtctatataacgaatttttcttttggccattaattatagacgtcttaagtggtaaagtattcgaccgtctacaatttttcggaaaatgactagagtttaggaatcccgattataaagaaacgataaaagatggtggaatacatttcacattcccattaattaaaatgtaaagaagatgattcggtaatccattcaaatgggtttatattgtttttgaacttttgattctgtttatgaaagaaataaggaagatttgggaagattttgtaccaagaaaaaaaggtgagaagatttctttatggggaacaaactaaaagggtgacttgatatggtatgcacatgttacggtggtcatgtttttttttttttgttcattctttcttttacactcaaggaatctaaagtaagtcatctacgaactttgctcgtatatattatagagtagaagtagatgcatgctgaaaagtgagaggcactttccatataatatagagctttgtattcatgtcggtgacgccaacgacatgttaattaacaagaaggaagcgcggttaacgatgaaattgaaaagagaaataaaggtaaaaagtaatgttatgacggtgacgctggtgtagctcgaattttcgaagttggtattccttgcaacaagtcgtcgtgtatttcacaagaagatataattcggtcgtttcattttgttaacacaaacaagattatatatgactacgtttctattttcattgagaccatggtaaatcatttagcaatattatccccaaggacaaccactctttagtccttaaatttcggaaacatctatctaatttgttccagtcacattacctttttggacttatcttagtttaccgtaactttagattcaaaccacataaccttcgcctcccgtttaagcttaacttattgtacatataaaatatatagtctagttctaatgttacattaaaaagtaaaaccgatacattaatgatctgattatcggcgaaagtaatgcgtacaattcgaacatgtcactaggaacatacatatttagcccaaagaatcatcaatttcacatagttgtacaacatggcacgtaaacaacaaactaataaaatgagtcgacgatgtactcatgcactatagggagctcacggtgaaatggctagaaatattcttgtggataatctagctagtaacgaatttcaacttacatctttataggcttatatataagatagataatacataacataatcatagttcatagtatcggttcactccgatgaacaaaagaaaatacaaaaaccttttttgaacttactaaaagatccaataaatatgacgagagtcatatgaaaataaagacaaaaatccttgtcattaagttattctctttttttatttttcattttaaactggtcagtacgtgattttcaaaaaggcgtaggccagcataagggtaaacaaatcatctcctttttttcattatatatattttgtctaacgttatttatgttattcgtaacgcataatattttctaaattttttatgaaaattaaaataaattgagtgtacccaaagaaacaccacatgcacatattatccatccaacaagaatctggtaggcccagccttgagcactgggcaagtagccagtgtagccacaatcccttctcaaataaacaagagtcaagagtactaacatttgcttttaatatatatgctaaatacattattcttgtttagttgttaatatataaacatttttttgtggtgttaatcgtcatatgtaaacttaaaagtacaactaagcataccatagaaatgatgtgttttatctacagctttataagttaaataagatgataacgtttgaaaaattgttcatattaatcgtcgcaagctagtgctcatcttttaacataatagtagagacaatgctggtcatctaaacgttatggcttgttttgtcaaattttggctatgaaaatgtgtttctaaaatcaaaattaactaagtgcaacttctaagcttgttttaataccaaaatttcatagactttacatatgtatgactatgagtatatatatagataacctttaaaagaaatttgtataaacgtaaagtaaatctataacgctatattcgatcattaacgggaaactactagattacaactatttggttgaaaaaatgatcaatattaaaaaacatttacatgaatttttctaaatagccgaaaactagaaggaggtgatttatcatattcaacatgaaaataacaactctgtgacctttgttatgtatcatatgtgaaaccaaaccaagtctcctttgaaaatgacatgaaaggacgacaaacatagatctttctatagctggagatgcgaacaaggaagagaggaagattcgagtgttaaaatgtaaaagccggtcaccggcctcttaatgagatattgcgatcataattaatgcaaagagctgttgtaaagttgaatctataaaagagagaatttgtcttttatgattgacaaagctttcatatggtcaaagattggtcggcagagacattttcacttgcatggagacaagcttgtaattcgtaattctaccactacattaatttatagcagttcatcaactactatgtcaagactgtaatacggatttggaattttctgagacaaaaaaaaaacaaagaaaattcggatacaaacaaaaaatgaaatactgttaattattctttgacaatagctagctaaccaagtgaatttgcaagctagtgtaaaatcgaggaacaaaaactattgacaataactttctaattatttggacatggaaatgaaatcgatgtcgacgagtctgtattgaggagaacgtccaccaattttatagaagagtaaaatttgtttttttattttattttttgttgtatatatattattatttggtgatatgggtaatagctagaacagagttcaaaaactataatgttttttatttatttataggaaactataatattaaataattggttgttcagaaaaaaaactcaccaaaataattataaaattgaattataaactctaaaagaataaattggtcatgttaaattcattgcgatccaagaaatattgaaccatatcccatgcactacttttaggttaaggtattttcacctgtacgtgtgtggaaaagaagagttggtgttctgaactttatgtagtgaagagaatcagacacactggtcgataccaaaaatggaacacaaaacagaaatggttggagcgttacgaacatatatttcttagatggttgaaagttgaaacaaaaacaaattgggaattctttaaggatattgcagatgatcgaattaatcatataatatctaatctaatctatattattattaattaggataagcttagattagattagatatgatttgcatctttacccaacattttatgtttatttttttttgatgtgtgataagcattgttttctacttctttttatcacgacccctcttttcgttatctcctttctcgacttctttaattatcttttcaaccataccaaaaggattcctcgcaaacaattgaatccaaaaaaaagaag

SEQ ID NO: 1026 - DNA, 93735 bp, Arabidopsis thaliana
aagctttactactcctcactgtttgcaccaaaatatgtgaaagagctcatcgcatagaaaaatgtaaactgatttgcactgttgacagatgtctgcagcggcttttgctaaaggcctgcttgacctagaaggacagctgacgccaatcctggtttgtccttttctctcatgagaactcttggtggttggtaaggtcatatggtcactaatttcttttcttttttttctctaggtttctttggttagcaaggactcttccatgttggatggtcttgataatgccagcattgaaatggaagcggccaaggtttttccctctgtttgatatgtcattttattgtgtatcagtcacgttttggtcaacaagatcgaaactgtttctgaaagaccgtactatcttctcaaaggaaataagtactcttctcaaatattttttgtaataattttaacagttttgatttctctaatttctttccctgcaggctagattgaatgagattgtaacgtctggcacaaagatgatagacgacgaccaagtctcctctgaagatttcccttggatgactgatggagctggacttcctcccaacgctcatgaactcctacgtgaactggtactcatacttttccatctaacagtagtttattgctaatgtgaagcagatcaccaaccattattgagtttgtttgcacaacaaccactgtgcacattggtctcgctttatggttgcatttctcttccattttttccctcgcacaagtgatttactggagtccaggaaaaaactcttatctgttgaattactttctaaataatcaggtgaaattaactaagaatgtgactgaacaagtaagactacttgcaatggatgaagacgagaacctcactgagccatacgatataattcctccatatgatcaagcaaaagcccttggcaagacaaacattgacagtgatcggattgcttctggattaccatgtggtagtgaaggattccttctgatgtttgctcggtggataaaacttgctagggatctctacaatgaaagaaaagagtaagtttatcatcggatttggattttagcgatgcttctcaaaattttcatctctttgtttccagtaaagttttgtgagtagcactgatagttaattttaattgcagccgatttgacatcacacagattccggatgtttacgattcatgcaagtaagttgtttttagtgtatctctagatttacacctagctttagttactcgtttttgaataagccgtaatatgttattctcaccaggtacgacctgttacataattcccatctcgatctaaaaggattagatgaactcttcaaagtagcacaggtaaacaaactgaaattcctccttccctttcctgaaactttaatcatagtttgcactgaaacaatgaactttcttgttacatctctaaaatgtatggttgactgtgctcgcttatagctaagttatgtgttatgtggttgcagttacttgcagatggtgtaatcccaaatgagtatggcatcaatccgcaacaaaagcttaaaatcggttcaaaggtgacaatctaagataagagtagttattttcctctctaacaattgtttttccaggggatctcacaacttatcatttctataatttttttccaataaaacaaaagattgctcggcgcttaatggggaaaatcttgatagacttgaggaatactcgagaagaagcactgagcgttgccgagttgaaagaaagccaagaacaagtcttgtcattatccgcctcgcaaagggaagatagaaatagtcaaccgaagctatttatcaatagcgatgaattgagacgacctggcacaggtgataaagatgaagatgatgataaagaaaccaaataccgattagatccaaagtaatagtctttactttctctctcactcttatatagatagttatttcggctactaattggtggttttcatttcgcttttaggtatgcaaatgtgaagacacctgaacgtcatgtgaggactcgactttacttcacatctgtaagtttcctctttgctccattgcttgtttaagtctgtctatgagtgaaactataatgtttatgcctggtatgatttggaacaggaatcgcatattcattcgctcatgaacgtccttcgatactgtaaccttgatgaatctctcctaggagaagaaagcctcatttgccaaaacgccttagaacgtctctgtaaaaccaaggaactcgattacatgagttacattgtcctaaggctctttgagaacaccgaggtttaacattacattccctttgactctcacacatgcttcaatatatgtatatgctctctcagtgtctgactctagacgtaaaaaacggatgcaggtatcacttgaagacccgaaaagattccgcattgaacttacatttagccgtggagctgatttgtctcccttaagggtaagagcaaaggatgtctttaactaattagaggaacatattataaacttttggtaatattgaaacatgatgcagaataatgacgacgaggcagagacattgctaagggaacacacacttccgataatgggaccagagaggcttcaagaagtaggttcttgtttaagcttggagacaatggagaaaatggttcgtccatttgctatgccggcggaagatttccctccggcgtccactccggttggtttctcgggttacttctcaaaaagtgctgcggtgctggagcgactcgtaaacctcttccacaactataagaactcttcttctaatggaaggagctaagcagagaccaattgttttttccacttatatatattttgctcatgcttttttctatgtgcagtttttaatcatcttcttgtttttctactgatgttttaattttctatgtgaaattgtgaaagggactagtgcagttgggtttgaataaagatatgattacatggaacataaatgagtcacccgtgacgttgtctagtgtttacaataggactcatctattataactcaagaaatgatgatgagtcttattgtaaacactgtgttttcatatcatgctgttacgttaaagttgttgcggatttgttggaatttatatataatctgcaaaagaataggctgatgatatcggataaacaaataccgaatctaaaacaatctaataatcggtggatttttcgttttgggaaaatctcaagacattaaattgataattgaaatacaaattattattattagtaagaatagtactaattgattggaaattgtaataaacgacttaatatacaaactgaaaaataacaaatgatcatgaaaaacattttaaaaaatgaccaaatgaaggagatacatagatagttttatcaaattttaaaaaatgttggtaatgcaattagggaacatttgtccgtgaaggaattaattagtctctgtttaaaaaactacgaaaaatgcgttttgtaactgttgttgagaagagaagagagagttagcaaacaaacacatatatatttacattattattgcccaacaaatctctctctcttgcccgcttcgtgcccgtctcttctctcttcttcgtattctctctccacagacatgaattccctttttgactaacctcctttttcccctaataagtgaatcttacttcttcttctcgccaagatcaaatttctgggattcttcttcttctctctaattcccttgcgtttgtttcctctgatcaagttccgtcctttttcctttttttgttcttgagttctcgtttgagctgctttttgggggagatgggtttcgattctgttaaagttatggagaattggcaatccaagacatctaatgagaatgagaagaagaagaagaagcggaggaggaagaagaacaacaatgtcagaaacagtgaacattatgaagaagaagcaaatgggtgttgggtcaaatttaggtatatagtctgttgcgcttcttcaacatcagacgttgagacctctctcactctctctactagcactggtatgccttcttcttttggctcttttcttctctgctctatttggttctgcaatttagtttcctgtgccgttagagttaataaaaacccttcctttgagattcaaatcttcttcatttttgtttccatatttgtcacaagacgtatctttccatctagggttcttattgagcaaaacctttaatgtcattgtggttggtttacctaactttgagctacttcatagattataatgtatatatattgcagcaattgtaggaactgacatttgaatggttttttataacagtgggaagtcagtccgcaattgtgcaatcaaatgaccaaccggttggcccagtctcttctactactacaactagcaatgcagaaagctctttgtccactcctatcataagtgaagaacttaacatctattctcaccttaagaagttttctttcattgatctcaagttggctactagaaatttcagacctgaaagccttctcggagaaggtggctttggttgtgtcttcaaaggctgggtcgaggagaacggaactgctcctgttaagcctggcactggccttactgttgccgtcaaaaccttaaatcctgatggccttcagggtcataaagagtggcttgtaagatccttccttccttctcttttcttctatatatatatatccttttccactgttaaacacacaactaaaggttcctgtttgcaggctgagattaattatcttggtaatcttctccatcccaatcttgttaaactggtgggttattgtatcgaagatgatcaaaggctgcttgtatatgagtttatgcctcgaggaagtttggagaatcaccttttcagaagtaagtaaaacaactacaaccttcatattctaattacactgtagagttattttctttccttttctttgttttcgatttgggtaacaagtgtctacaatttagagatgtgtctactccatattgttaaagtgattagaatctatacagctaaaattggaacctttctgctctatatggtaaagttggtaccttttagtgctgtcttagatggtttatattgcttgactgtattgacccacgaagcaataagtaaatccctcgcattcattgtttcaagatttttcggcgtaaaaaatgtgtttaaaaagacacagtgcttttgtatgatttatcttctcagttatcattgatgcaaatctttttatttgtgaattaacttgtgcttcgtgttgaagggtccttgcctcttccatggtcaattcggatgaagattgcattaggtgctgcaaagggtctcagtttccttcacgaagaagctttaaagccggtcatttatcgagatttcaaaacctcaaatattttactggatggggtatgttttcctcttctttatatcaagggatcaacatcttatatacacgtctgtttctttgcttctaaagtcttaccatgtcccaatttcaggagtacaatgctaaattatcagattttgggcttgccaaagatgctcctgatgaaggcaaaactcatgtgtctactcgagtcatgggcacttatggttacgctgcccccgagtatgtaatgaccggtaagttttgttttttgtctttgcatttcattcactcctctacttatatcttctctgtatggttgaatatagaaaattagaaacctacacatatggttgatgcaaagtattactatgatgaaacatacatctaatttctttggtttgagattatatataactactgtcctcttattactccttaggtcacttgacatcaaaaagcgacgtttacagtttcggtgtggttcttctcgaaatgctgactggtagaagatcaatggacaaaaatcgaccaaacggtgaacacaacctcgttgaatgggcgagaccgcatctcctggacaaaagaagattctaccggttacttgatccgaggctggagggtcatttctcagttaaaggagcacaaaaagtgactcagcttgcagcacaatgccttagccgtgactccaaaataagacccaaaatgagtgaagtggtggaagtacttaagcctctcccacacctcaaggacatggctagcgcttcttactacttccagacaatgcaagctgaacgtttgaaagctggttctggttctggttctggtcgtggattcgggtcaagaaacgggcaaccagtgtttcggacattgtctagtcctcatggtcaagctggttcgtcgccttatcgtcatcagattccgtctcctaagcctaaaggtgcaactacttagattggctcgcaagtgtggacgcaagcaaacgtcttttttaaccgatgtaaaaccgacattgttaaccgatttaaagaaggaaaattaaggttgttccgaagaagatccgaatttgtgtatttactacctttgtgacctcatgtttcttcgtctgttgtaactcttgaacaaattgtctgttagggtaatattgtcattatgtattagtcgtttcgtatcgcttcaccagcatgcaaccaccacttcttcaatgtaaagatagatagatatcaagaatggtaatggaagatgtgggtgggggtgagagacattttgctttgaaattttgaaaattttcttctctttgatttttggacttatctacttgtagcttgtcgataatcgagttattaaaatataaatacgaaagaagaaaactgacaacttttcttacgtgaaacttttatactcacatacaagttatccactttcttggttaaacatgcgagccgcaaggaccaacgacttttatatacaaataatttccttataaaaaggattacagtaagatactttgcacactagcaagcttgatgattgtatatcaacatcataatttttcttattaagttatgataaaaaacattcaactataatttaaaatataatggaccgttccgaatttccataaattcggttaccacctccaccattttacatcaaacagaaaccaaaaaattagatttagatatatatatatatactagtagaagtagaaccatcttgttctcgtatattattacgaaaccctacagttaacagctgcagaataatataaataaagcgacactccacttttttctcctacattttgttgaatttgaacctttaaatcaatagtatataagaacatacaatgtaatagataacgcgtttactcaatcaaaaggaacaagtatatactactagataactcttgtttattggcgtctgacaaggctctgtagtatattcaacgatacgattatcctcttttcttcgataaaagtatattcgattctcttactacagaaacatagtttacattaatgttagtgaaaaataccatgcacggaaaatcaaagatttaattctgtggtttgtataatttgaagtgtataatgaaactattttttagcctaacccaaaaagaattaaaaagaaaaagtaattgttataaaaacgaaaagcatatttatcaaatattattattgaatattctccaagatataaacaatttgacttttcaatgaaaatgccactattgaataataaataggaaatttccgaggagtagtacaactagatgacaacttgacatgatcttcttcttacttttgtctatataacactcctgcgactttcttctcttcaacaaacttacagagagacaaatacctataataagccattcataatcttcttgcttcttgttcagaataatggggaatcttttctgttgcgtgcttgtgaagcaatcagatgttgcggtcaaggagagatttggcaaattccaaaaagtacttaatccaggtctccaatttgttccatgggtcatcggtgattacgtcgccggtacactgacccttcgtcttcagcaactcgatgttcagtgtgaaaccaaaacaaaggtaagtaacattgaacacacataatgcaaaacttcttcttctaatggaccattaattcatctatgattatgtttcaggacaatgtgtttgtgacagtggttgcatccatacaatacagagtcttagctgacaaggcaagtgatgctttttacagactcagcaatccaaccacccaaatcaaagcctacgtctttgatggtatatatatctcctcttcatttctcaatacttagggaaagtgatgatttatccggtcaagttattgattttcgttttgttttttcagtgatcagagcatgtgttccaaagctgaacttggacgatgtgttcgagcagaagaatgaaattgccaaatctgtggaagaagagctagacaaagccatgactgcttatggttacgaaatccttcaaaccctaattatcgacattgagcctgatcaacaggttaaacgtgccatgaacgaaatcaacgccggtaagtcctcaaaatcgtaaaaccctaaatcaaaatctaaacaaataaatggtcaaaaccctgaattcaattgttgttacagcggcgaggatgagagtggcagcgagcgaaaaagcagaggctgagaaaatcattcagatcaaaagagcagagggtgaagcagagtcaaagtacctgtcgggactcggaatcgctcggcagagacaagcgatcgtggacggtctgagagacagtgttctagggttcgcaggaaacgtgccagggacgtcagcgaaggatgtgttggacatggtgatgatgactcagtactttgacacaatgagagatatcggagcaacttctaaatcctctgcggtgtttatccctcacggtccaggcgccgtctctgacgtggcagcgcagattcgaaatggattattacaggccaacaatgcctcctaatcactcaagtcaaattgtcttggtcgtctctttatatatttttgtatcttcttattaaaaaggtaaatttgacttttaatataatggtgtgcttattgtgatttgtcattatgtttgtacctatctcttttgtgagttgtgtgatagatatactttgtattttttcttaaaagtcaatataaatttctgtttgcgagagaaaaatcgaatctttgaatagtgaactttgtggcgataaactaatataatgattaatgaagagaatgttgcgatataggacactttcatataatgaagagaatgaacctgatcgataaacatgtgggcctaaaatgaagcccatctcaatcaactctctggacacaggtccacttactcaacacacaggcccatctgaatatgcaattttcattatgacacggcaaataaaaagagaagcagaagaggaggatcttaagagtttcatcaccatctcaagatgatcattttcaacctttttattcttctacaaatccggcaggaaaatgggaaagatcagtagttgcccactcaaaccatgaaccaagcagagaaaaaacagagtacgtagaaagaaactagtttaaaaaaactattgcaacttcttcttccatctcagtttcaaggcttgagtgcgagagccaatccaactttagcactcttgtcaattgactttgtgtcgacttctccagagattgtgaagaatgacttgggtttccactcgtgttgaatgagagcacttgcaatacccgcactattgacacgagccttcacagaggtcaaggggtcaagcgagtgctgtgttccaacagttatggtgctgtccttgctagataacttgtggctcacttcggctccaaccgcagtgttgaacagcgggttcacaatgtgatagtaagatgcattcaatagatcgcccttgtcgttcctaacaaacaacaaaatcaaaagatattaaatggaaacattgagaactccatctttcatccagaattctcactaaaaatcacttacacagtaagggaggcaattaagtcctccttggtgaagcttaaaccagcattgatcttggtgaaatttccagacttggtgtcaaatgaaacatcagtaccaacagccaagacattggagccaatcacaccagagaagttgacagttgggttctgagtcaatcccatgcttgtgctgataccggcgtactcatgcaagtattgcagctcaacctgtttataagacgaaacacgataaaaatgagaagtcaactctcaactgatgaaactttaaaacaatacaaagaaatgttgttgaattaataaaatataccttgccagaattttggtcaggaaccttgaagctgaagattgacctcagtccgggtgcagcctcatcaacggtagcggtgatcagaaactgaaaccaatacacacaaagttgtaaggtaagtagcccaacaaacaaacaaaaaactataactcaatatacaagaaaaacaggagatgaaattgagtacacaaatacacttacagtagaatcagtgcaaactttcaaatcagtagtaatgttctttcgcctcgactgaaaagcgacatctcccaacaataagtcacctttcttagttccggttgaggtgatggcctaaaacaaagaaagagccagattatgagcaacgatgcccaagatagaagaaatccaatgtttaccatcacacgaaacataagaacaaagtaagaaatccgttacataagataacaatgctaattcgacacaaacctcagaagctaatgaataaagcaaaagtggaaacagaatacagaagacgacattccataaaccctaatcatctataatgaaatgagaaacttacaacaccggcaggagagaaagtggtgatactgaatttctggtcactgttgtggtctttgtacagaagatctgcaaatacacagagcagagcaacagttttagacagcttattaacaaaacattctcaaaggggacttaaatggtgagaaatgctaaacatgaaagagaatcacagcattcaaattggctattccagatcaacgataaacaaaacagggtctattgagaaaggtagagagcttaaacgagagtgacggagacattgaacccaaggaattactcatatcagcaccaatgattgaaatccattacttatgaatctctacccgatcgaatactcgaaatctacgcatgcatctatgatctatcccggtagccaaatcgggaccgggaaaaggaaaatctaagagatgagcaaatgaatcaaaaatcctaaggaatcaaaagaaagtccagattagaagacagaacgggacactaagtagcaacaatcagatcgtctacgccataaacagatttaattgaacgaaatgaaagagaagaagtgagggagataataaaaagatacctctggcctttttgccgatttcggtgtagagaccgggacctttcaccattgttgcttatctgagaaagttggaggatgttctgaaaagtcttctctgagaatcgaaagaacaagagctggaaaacgtggttggcgtctataagagagagagactgaggaaaaccctaaaatgttttttatttccgaatattatcagagaaagaagagttttcctgtttatcaagcataattttatcagccgttggatggagactcgcttgcttcagtattccttatccacagccgtccatatatttattccccactcaccaagaaatttattctcatttattacgtggcaactaaacggcgtcgtttaataacacatttttctttccacgcctaaaatgagaaaatcgtttttttcccttgatgattagtcgcataaatttagctatttcatcctttattttagtcatgaatgagtaatcgaatgtgatggtgaaatcgtgatttttacatatttatcaaactattttcagaaaaatatcccaactagttagcggctgatatagtaaacgattagtcaagtctccgttatggtagcaatttatactacaagcagtctgacattttcactacttttagatgcatcatgagaatgtaaacgtaattgtttcttgttgctaaaattggtcgaaatcataatgttagtctctccatagaaatatccaaatataggaaacgaacaaaaaacaaggagatgtaaaattaaaaagaaaaaaagaaaacaaagaaagctgtccacaagtaaattatggtggctttccatacataacgggaaatttttctaaatatagtagttcactttcttcaccaggttttttttatcattatttaaacaccaacattcatgtttgtcaaacttcgcaatacgattcatctaccaaaaaaggctttaggtcaaacagaaataacgacctaaagctatgtttaaagcttagcagttctccacatatatttcaatatataaaaagattacccctttttaaaaaataaaatagatatttgttttccgtaaaagaaaggggtaatcaaataaaatggagacggctaggcttttcaaattagtgtgtgtgatatgtattgccagtttgattccgaccatacgagccaatgttgctgatgagaccgatgagtattgggtaaacaaggccaatgaagctcgtaaacatacccttatggcttatcatcccgacccttatgagatcgtcgaccacttccacgagcgtcattacgagtaagtcaaatattagtatctcgatctatatatgcattgtttttgaatcctaccgatttgtcgtctcgttgaaattaaccaggcttgattgtaatcattagagaacggtttggattagtttattctgatttcattcaaattacaaatatttattagtagaagttttttttgggttgtaaaaaggatgttggatttatgatggttttggtttggtgtatatcttcagcaactcgactgacgtcgaggggaccgaggaagagaaggcggtcgcttccgaggaagaggacgtcattgagatgatttctagtccgacaaacagcacaaggcggagcctaaccggtaggggcaagggaaaaggaaaaggaaaatggagcaagctaacgggaccttgcaccgcaagcaaccccatcgataaatgctggcgttgccagcctgattgggccagacgtcgcaagaagctcgttcactgtgtccgtgggtttggttacaggaccaccggaggcaaacgcggccgcatctatgtagtcacgagccccagagacgatgatatggtgaaccctagacctggaacactacgtcacgctgtgatccagaaagaacctctatggatcgtttttaagcacgatatgagcattcggttaagccaagagctgatgattactagtgacaagacaatcgatgctcgtggcgctaacgtgcacatcgcatatggtgctggtatcacgatgcagtacgtgcacaatatcatcatccatgggcttcacgtccaccacatcgtgaaaagcagtggtggtttgataagagattcgattaaccactttgggcatagaggagaggctgatggagatggtatctctatctttggggcaacaaacatttggcttgaccacatttctatgtctaaatgccaagatggacttatcgacgctataatgggttccaccgcaatcaccatctctaactctcatttcacccaccacaacgatgtgagcattccacaacgtaattaactcgaccgttatactattaatgacaacccaagttaaccaaaggatcttgttatgtttttgggttctgtctttaggtgatgttgcttggtgcacaaaacaacaacatggatgacaagaagatgcaagtcacagtggcttacaaccatttcggaaaaggacttgtgcagaggatgcctagggtccgatggggtttcgtccacgttgtcaacaatgactacactcattgggagctttacgcgatcggtggtagccaaggtcctaccattctcagccatggaaaccgtttcatcgctcctcctcacaaacaacactacagagaggtccaaaatgatttgagtgtgcacatatatatatggcatcaaatcaaagtactaatagaaaacatgtgtatatataggtgacaaagagggattatgcttcagaaagcgaatggaaaaactggaactggagatccgagaaagatgttttcatgaacaatgcatatttcagacaatctggaaatcctcatttcaagtgttcgcattctaggcaacagatgataaagcccaaaaatggtatggccgtttctaagcttaccaaatacgccggagcattggattgccgggtcggaaaagcatgctaaaaatataactcactactaaattttttctctttgtatcaaagcctatataagaactgataaaatcatggggtaaaaatggaaattaattattctaatttatgaaaggctctgtgtaaagaatctatgcgaacggcttgatactttgtaactcttaatttgtttgtgtatgtttttttgtgctcgttaatttgtttttttgcaaggatgacaaaatagaagtaaggtaattaattttaaaaacgatgacttgacgaaatacatatatcaaagacttagaatcaaagaatttcatacaagaagtattttttcacaaacatattcttttttctgaattttttttcattttgattaatagtgtccagtgacatgcagcgcaatttttaattcttaaacaaaaagaatatcgagcatggatactgccgaaatcgtcgaagatctcatattttattttatctgataatacggacaagtcaaaaaccttattaataggctcaaatctaattattaatcagcttcatatttgacaacaatatcaaaatcttgagtgcaaatgacaaaaggctcaataaccgcacaaccaagaaaaagaatgataaatagcaccaataagtgttgtggtgattcatgcagcactacaatactaagataagatatctatattgctgatatttgtcaatttaagtaattttgaattttgaataaaaccaaagtataatactaaacgatgcatggtgcactagctcactagctagtaatactcggaatagtgtgtttcttccaaaagaataatatgattaagaagattaaaacccgcctataaatatctactaagaaattatagttactcacacttacattatacacatacaagaagaaaaaaagaaaaatggttaggatttcagttttagtgtgtttggttcttttggttacaataggagtcatggttagtgtctcactcgctgacaacaacgaagagaaatcgactgatctgaagaaattcaaaggaggagtaactgatcactcgattagtaaggcaaatgataatgatcacgacgatgatgatcatgatcaagacgatgataatgatggagatcacgatgacgatgaccatgacgatgataatgatcatgacgatgataataatgatcatgatgatgatgataataatgatgataataatgatggagacgatgaccatgatgatgataataacgatgatggtgatgacgaaaagaagacgttgagggtacacgagctaaagaaggggaatctaacggtcaaatttacaaaccggggtgcttctatcatgtctctccttttccccaatataaatggttagtggaccatatcatatatatatatatatatatatcgttttgtacgtattcatatatattatttagtgaaattcgagtaatttccaggaaaattagaggacattgttctgggatatgacagcgtcaatgaccacatggttagtaaaatactttacttttaggtcaaaataattttggtatcagatcttgaaaagagatttaattagctttgtatcagattgacacggtattttgtggagtgacgttggcacgtgtagccagtaaaaaggaaaaggccgctgcaaacgatggcaaaaacacgatccatggtaaatatgttttaattaattacgttctaatttaagtggacttcataaatcataaatgacaaaattcataattaacatttttctctaattaatcaggtgggacgaaagagtctagcgatgtgatttggagagttaagaaacacaaacataatggcaaaaaaccttatattgttttcacatacacaacaagtcctgatggcgatcaaggttcgttttttatccttaaaaactttatctgtatatcttcttttttctattatatatgcataaatgttaagatagagaaggtattcatgttattcaatagggaaacttgaagtcactgtgacatataagctggtaggagaaaacagattgaaaatggtgatgcaagcaaaggctaaagagaaaactactccgttgaatttggttcatcgttcttattggaatcttggtggtcataacaatgaagatatcttctctgaagaaattcaaattctcggttccggttatactcatctcgacgataatctcactccaaccgggaaaatcctcgccgttaaaggaacacccttcgattttcgccaactccgacctattaaagacaacatcaatgagcttaagacagggtaaaagtttcaaacaaaccggatctatcttgaaccggtttgtgctacataatttttttaattattaatgttggatcaactaatatgtattatttgttttatctttcgaatgcaggtatggtataaattattgtctagatggtgttgcaaataagatgagaaaagtcgtggagcttgtggacaataaatcgaagataaaaatggagttatctacagaccaatccggtctaaggttgaaaaccactaaaccaaaaaatggatcggttcataaagcttactctggtttatgtctagaatcacatgcaatcaattaccaatatcgttcttcgcagataattgaaccgggggaaacttataagcatactatgctctttaagttttcttttgttccgtaaactttgtaacgttactttttctggaaagtttatgaccagaaattttttatataataacccaatttataatgggatgatctgaaaaatatatattgtaatagtttggtactaggtccatttgccggtgatttgacaaaatatcgaaacaatttatttttagtattttcgaccaaatacaatttggacatgctagaagaaagcatactaattacaaaatatttgttacacaataaaaccgttgatacatgcgtagacattatatagatagacatgcgtttgaatatcatatctttttgttaatttaaaggttactaattaaatatcatgaagtaaccgattcttcttctaagttttcttcaccaacttgacaatgcgttttatggtagacatatactctttctccttctccggaaccaccgaattataggcattctccttccatgctctgtagaaaaatgattctttttcaacaaaaatgtttgctttaatatggttgtacgttccattcttcagagaatctgaaatttcattaagtaacgattcagatttcaccaaagatttcaattcgcttttcatatcaccagttgattgcttctttaacgttttcaattctccgagcaatttctttgccttctcaatttcctttagaagattgtttttctcctctgcttgcatgagttcactttctttttctcctttcaacttgttcaaagtttcgggttttacatcgcggagcttcactagcttcacgtctctcgctgcagcgtcatcaatgttgcataccaatgcgatgactagggccacaattaacccagacagtgcataagaattctttgccattgtaatgtttcaattaagttcttaacacaaatctttttttcttttgtatgttttttttttttttttgttgataaaaacaattaatacctgttgtcaaatatatgaaaggactgaaacttgtttcggtggtagccctttatgcaagaaaatagtatctaaaaatagaaggtaaaatttggtattttgatgttcctaaggtaaacgctattagtttaaaagttttagcaaatagtttgcgagttgtatggataaccaaagaaagttgagtaacccgagtcagtacaattctaatttgaccatcaattgtacatactattattagtcataaataatgtatataagatactctagaaatcaaaacaaaacacaagaactcacagatctcttctcacctcttttcctttaacaaactatttgaatctaaattcaaattgatttgttaagggaaacctgagctagaaaaaccatggcaaagatctccttcgtacttttcgttgtggcccttatcgcctttctccacgcttatgaagctcgcaaagtagtaaatctcggtgaagcatttgaaaaagacttacataaagccgaggccatgatcgcggaagaattaaaggctaagaaaacgaacattcaaggtttgaaatctgaggtgaaaacgttgagcaaatcagaagtgatgttgaaggaacttggaaatgcttacaagaaggatatggacttaaggccttacgaaaagaaactcaaaaacttcagcaggatcgtagccctcaagaaagcacctatgaaaaacaacaacaagaaacctgtatccataatccaatcgattttgaaggacttcggattaaacggagggaggaactgacaaaaaactattaataattagggtgtgattaatgttttaatgaggtttcgacttcgccatggagtttagctttacaagtgagaggagccaataattctcccatagtatattagttacattaaattgtatttaatacaattaaatgaaatattactacttattatgatcataatatgtttccataagaatatattctgattacagtttgcggatacatagttaacattgacattgccggaaaaaaaaaaaaaaaaaaagtagttgcagtgaatcgcaataatttacagactaatgaaatgattgtcaaactaaatatttctgatttaatttggttatgacaatgtgtcttttttatttctgtatgataatgtgtcttatactctaattaatatatatagttacagatcaacacgataaagataattgttttaccgataaatataattcaggagtactcgatcagatacgttgatatatccatcaacataatcatgtgctcttcaacaaaatcttcaatagcatagaagacttgagaaattaaacccacaaatacacatgctaaaatttagctagaaaaaaagaaacacacacacacacatacacatctataccttatgtttaatagtaaatttaattaaacaaataaagtccatttttatcactatatttttttataaaaattatgattaaacacgtaaagttatgtagtttattttcctttctatttgccagatgtgcatacgacatggtttctggtaataataaaattatttacaatttaaattattaattactggtccaccaaaatcactagaaaattaccgtaatttcttaagtttttaatattcctaaaatctttttacttaatcagttaattcataaccgttacgaacaaatatctaaaaatagaaagcaagaatcttattttttgacattccatacttgaccgttagagatttgacattaatattgaataagatacccaacacttttacgaatattatgggtgaccaaagaaaatcaagtaacgaagtcaataaccattcattgaccatcaaaataaggtgacatctacatactatttttacgcagagataaaactataaatgctttacgaaataaacacacgaactcactcctctcatcacaatatatatattttccttttaacaaactataatttgaaattatttcaaattacgttttagggaaaattaatctttaatcatggcaaagatctcctttgcgcttgtcgttgtcgctcttattgtctttcaacaagtatctgaggctcatcgtccgatagatttcaacgaagaagtacttgaaaaggacttgcatgaagccaaggacttgatagaagaagacttgagagagaaagaaacgagcatcaggaacttggaaagcgaggttagtttgttaaccaaatctgagatgatgcttactcagctcgaacttgcttacaaaaatggtagaaatcttgagcatttcgggaaaaaactcaagaaattcaacaggaggatcaagcgggctcctgaggaagtgagatacgtttccatcatccagtccattttgaaggatttgggattaaacggagggagacattaaaaacaagaattagggtttgatgcgttcaaaggaggtttgatattcgcccatggagtttggctttacaagtgagaggagcaaaatcatttgcccatagtatatatatttatgtatttaattgcatcaattaaatgaaatgtattactatactaatattgtaatttgtatttttctttctttttttctgcgctgagattttgttaatttagttatctcgcaatgtatcttaaaatagttacaattaatataacagatactttttgtttttcatacaaataaaaatgattcatgatcgagtttgatacccgtctcagcatatagaatcatgtgcacctgtcctcaccagaatatttatgttcatatctatcgatgatttcatatatatttgagaaacattataattacatattaattctagctagtccaagaaactacccatcgtatatgtatgcacaaatatttagtccgtagggttgacagttgctacttctcaacttgggatagcaatgtcctcttatgtaaattccgctgaaaaagaaaaacacaagattcggcttaaagagaaagaaaccaaaagaacaagagtgaactctttcaacactgtttccacttttgttttcttctttttggtctgttcttctttgtgtttggaacgtgtgcttcttaataatcttcttctttcctaaattcactattctttcttatatatttttaaaatgaattaacgtaattatttttataaagtaatgtaggatagtgaccctgacacatgttgttgacaaaaagaagaagaaggtaatgtatgatacctctcgctgattaaaacttagctcacaacaacaaaattactaccattgaatagattcatttcactcaaaacaattttgaaccaacaaagaatagatatgtctatgtagatgaagtgaacgtgaatactgtatttggtattacatgcaactacgtgacgcatggcatagtttttttttttttttataataaaaagttaatggttccattaatccattaagatttaaattgcaacttgcaaagataaaatcataaaatataaaatatatattaaaataatctttgcatataatattagtcatggatcatgttatgtcaaagacagagctggaatcccactcgaagtcacatgcatatgaatctttctcacttttatatccttactttcttaataaatttgtaccaacccatcatatatatataaaattggacatataagttgagaaaaatcatgatttttaatctcactcaattggttagaggagagttttgttcgggaagtaaaagagagtggttatgcttttttgaaccatttacatatattgtaaactgtgatcaatccacatacatctaacaatgttacggccgaatgcaaagaactttatgatttttattaaattaaagcaacaacaaattttcgcactatacaccaatgctctacaaacccaaagaaaacaaaatgctccattaatttaaattgaaatgagtagcaataacataattccaaagagaagaattgtgtcttgatcttctcctgatgatatgatgatgatgattatgatcatttgtcttgatgcgtgctgatgacttttttttgagctttagaatcatgaatcagttgaactggtggtggtggtggttgtggtttgggtcagaccatgcccagtaaccagccggcgtcgtttcatcaatgccattaaacatgttacaaaggctttcttcttgaactatttcatgattctgatgatgatcatcatcatgtgcagatgatcgaatcgatgaagggaataggtctttgatcgtgttcacatgtgttgtaatggtctctctaggcatctccagattgatgtctgaactattctctgtgcttccgttgttgctccatgaagcttctgcttctctctttactatgtttccttcattacattctttgttctttaaagccattacctttaaccatcatcacacacaattcaaatgttaagttttagaaattcagatattaaaaattatcatttctatatatcattaaaataaacataattatatataatttaaattaacaaaatatttttaaaatgactaataacttaaaatagataaactgtaagactatatatgtaaattatatatttacatatacttagcttaagtaatttttgaaaatcttgtaactattacatttcaataagtagtaaaatcatttaaaacacacaaaaatgatatgatataaaaatcagtattcttgtcaaatttggttagcgcacacatgccattacttgatagtcatatgggaatgtattaattaaattgtaaatattgatcaagaatcctttttattaataaacaaaacacctactgtcttttgacaaacatcttatagtgttggatcatgtgcctaacaataatctattgcatttcgtattaaacgactttaatacacacaagatacatacatatatatatatatatacactgatatatatacacatatatatatactacataaatagtaccaatccaagccaataatcagaaaaatatttgtagtcctagatttattttacgttggttattactattagtgcaaaaccaaaaataaaaaaaccaaagaaaaaaacaaacacaatcaaattagaaatgaaagttgaattaaacaccttatttactatataaacacacatatatacttacttatatagatacatacctcagcaaggagtttcttgttataggcaagtagagaagcattgtcggatttaagagactcaaactgtttcttgagtgaatcataatctctctcgagctgtctagtcttccacctagctctcctgttttgaaaccaaatcgcgatctgtcttggttgcatccctaatgctttagctagttgtatcttcctctctggctccagcttgttaccaagctcaaagctcttctctaatgccttaacttgctctaattgcagcctcttcttcttctctcccagcatagtatgtgccccatcgtctgatagattctcctcatccaaggtttgattatgatcttcttgcacgttcattaaagacatagatctgttcatcatgtagtttcctcctcctatatacaccaacagaattcatgactcaaatctatttatgtggagaaatagtgagagaaagagagagtatagtaccattgaagagatgaggaggacaagaagggagctgatcttgactgttgtcttcatgaagttgttggaacataaaaccatgttgaggaaacgccatctctaatctcaatccagcttctgttgttggatcaaacacatacatgtatgtattccaccaaaaacctatcagtgattaatggattgtgaaatcagtatagtgatgatcaaatatactttgttgtttgcagatttggaaatcactatcaaatgagttaggtgtttcttgtggatctcatcaacctctcatataagagaaagagagagaaagaatgaggaaaggatcaagctagggaggtttctaggacccatccttaatattttaaaagctttaggcttattattatatttcatatatattctccagttcatgtaataaagttattttatagtttctgcctcaaatattttcgatcatgtaacgttactaatcatatcttcatgatggttttttttttctttttcttttcacaacaccttttatgctttaaaacctcacatatcatttatttatgttttccaaggaagcccaaagactttttacatcaattgcttcctcctccaccgatatgggccgctgcttttgcagcccggcccaaagcatctgagaaccataaagccccattagcaaagtaacgactgttgaccacactagtcgctgcagctgcagccactttccctgtaatggtggctgcggctacagcagctgtgcccgtgacaagaaccgcggatttagtgaaatccgagaaatgatacttctcgtccgctgatctcacgagttccatactcgactgaatgttctgtgtgaggccaaggtaatggctgatctctgccaatttggtcgctaccaagcttgaaaatctctgagactcatccaaagctttggctttaccaatcgcgtctttgcttaaaacgtagcctttagctaacatcgtctgcacaacttgttgagccacggttatggcctctccaggcgatgaagcaaacgcgtctgaacgagtcacctacaaagaaacattttcgagaatctttggcttataacctaaagtaacctagtaagtattgtttttaatgttaccgtaacactatagtcttcttcttgtctgagattgttagattcatgtaaatagacaccgtagaccgatatccaaacggtttgatcaacgatcgtagctccctgaagatcaacattaaaatcaatgccaagaagatcatactggaaatttctagctaattaagggacttacgctaagtaacacagccatatccagagcatacgcatctctgaaggttacataagccgttaatgcatccccttggcacctgaaatccatggagacatgaaacaaaatataaacagattcaagaatgattaataatttactgaacaatgaacgttgttgttacccggtgatttcaacgagctcgacgataccacagtgagagaagaacctatgaacatctttctcagtggcttgaggagacaagttggtgacttgagcaacgtaaccacaaggatacattatattgttctgttttctcacacgaacctagatacctaaatcaaagaacaaacataaacaagattcttgaatcacattccgtgaaccgttgagcgattttctagagatttatacagcaagaaatctacaaagctacgattactataatgattcaaataaaaaaaataaaaaaggtgtccaggccaaatagttagcggagagggaagaaagaagaagtaagaaccctagattataattgaatgagataagagatgaaagtaacagtaacaaagataatcaatgagatatgtatcaaccaaccacacaatcggaaacttcgagaagcagggcacgaaaaaaaactgatagtgtatgttctgttttagattacccgattaaggcacaatagaacaggacgtcacaggattgaagccaagtatcgaaagagacggagagaaaagaagacaagattcgtgtgattgtgagagagaaagaggattcttcaaatttaaacaaaaaaagaaagaagaggaatgttaacatttaaaccaaaaaagaaagaagaggaatgttcacataattttttttcttttgtcggctcgatcgatatcgatgttgtggtcgacgatacgcgtcaaacgtaagctctagcgatgcgcgtgttattattgtttccacgagtcttttgggcactttttacttaggctttttaaagcccaaatatctgttttcaagcccaagtaattagtgaggacattttcgtcaatttttcatcggaacgcaatttagcggttaacgccttaaccgtcgctcagaaaaaaaaaaaaaaaaaagttatcataaactttggcgatatgaatttacacggcgtctcgggccatcacgagcctaattccgaacctccaattccgacaggttcgtcgagtccgaagctgaagattagtcccaaattgaatcggtggtctaggggccgagctttaagatctggtgttaagcttgaccgtccaattccccgttccgataactcacctcgccgtcaagtaacggaagcccaaccgaccgatgaggctgataagaagacgacggcgatcgacgtggaggtaacggcgggaaagtctatatatttggtttccgacggaactgggtggacggcagagcattccgttaacgccgctttgggacaattcgaagatttttcgttgaatcgtggctcttctgtgaatacccatctcttctcctgggtaaatgaaaatcaaatcttcttactttcaggaaaaaatatgtcctttcttagaattctctgtgaatgttgctagtagaattgctcataggatagataaaattggatcattacatggaaactgattatatcttagtgaatgctagttgcaattagtgatcatctgagcaagaaaaaacttgacttttaaaccgaaagtgttaggttttgagaattgtcattactttggttttgggttggggattgatcaggttgaggatgaggagaggcttatcgagattattaagcaagcggcaaaggaaggggcaatgtgtttctacactttagcaaatccttctatggcaaaatccgcaaagcaagcttgtgatcagttgggtgtgctttcggttgatattctaggaccaatcatcgaagggattgcgtctcacttaggtgtttctccgtcaggtcttacacgtggagcacctggtagggtcaagactctcaatgatgcatatttcaaaaggattgaagccattgagtttaccattaagcaagatgatgggactttacctgagaacttaagcaaggctgatatagttcttgtcggggtttcccggacagggaagacgcccttgtccacttacattgctcaaaaagggtacaaagttgctaatgtgccgtttgtgatgggcgtggaaccacccaggacgctctttcaggttgaaccgagaaaagtttttggtttgaagatccagctcgttgtactgcaagcgattagaagaacaagggttaaaacgctaggcgtagatacagaggcagagaacaattactcggggattgatcttgttcggaaagaactagatttcgcgtcaaggatctatgagcgaaaccccggatgggcagtgataggtaaacaaaacttaaacaccattctcatttgctactcaaaatgctgtttttttctttccttttaatgctagtaagaaaaaaagttaacaagtaggcagagtattctcatgtgttattcttggggttgtggcgcttgcagatgtgacgaataaggcgattgaagaaaccgcggctgtgattctgcggctgtaccatgacggtagagacactagtactacggtaccgcgtatctcaaaacgctactaagcacactcctttgaccgtagagaggatgaaacaccagtgtcgataaagtatcaagtgaataaagtaatatatgtctataataataagttgaataacaaatccaaccgaggcatgatgaatcatatgttttagtcaacgaatgtaagaggatgaaggataacgaaaactaataattgtggctactctgaattcttttattactagtctataaaacaaaagaatatctgtcattagcatttagttgcaacgttgcaatttgggtgtgtttagcaagttcaagaaaagtcatccaaaacttaatgtcattttagttaatctattttgactctttctattcgtttatgaatgaatatttcggtaattaccaaaaaatcttctgattatccaaagtagatgatcagagatttgtgtccatcttcgatttatataactaattagtgatattttcttcctgtaagtaaacgatgaacctggaaacatgcaaggttttttcgactgtcaatttatgtggatgattattgctattcaatctgttcatccacatgattaataagatgctaattggtaacacatggcgtagtttagaaaaggttaaaacgttgcggtcaaatgattgacgtaattggaagaacatgcacgaaacattacaggaaacctataatgcatggatgcatgtgggatcaaataattgttatcgataacgtccaagtatcaattgatatgcatatatgtagatattttaatctacttgataagataaaaacttaattttaatttaagttattcttccaactgttgttggcaaagtattgtcccactctataaggcaagtaatacaaaatacattgttttaactatatccgaactctatatgtctttttcttgttaagtagaggaactagaggtgtcttagtgacgtgagacacacgaaattttcaattcttaaaaccccatttgtatttaatttgggcttaaagaaatttaggcagccattttttttggtggtagcaatatacaccatgcataagacaacatcgacacaaatattatatacacatatatatagtacgacttgtatcaatttgcctcttcttatttctacaaacaatgattggtcttaagaacaacaaaaatacaacaagcattccaccgcagaccaatgatagtcaactacattttgatgttaattaatctcaatcttctaaccacaaactcttataatattgcaagttagtttaaactacttacataattgagtataaaatagcttcaaccttcatcaacaattcattatcaatcgagcaaaaaacaaaagctaagagcaacaaactaaagattttttaagaaaatggcagcttctaagcgactagttgtctcttgcttgttcttagttttgttgtttgctcaagccaattcgcaaggtttgaaagtaggtttctacagcaaaacatgcccacaactcgagggtatagttaaaaaggtcgtgttcgatgcgatgaacaaagcaccaacacttggtgctcctttgcttagaatgttcttccacgactgcttcgttcgggtatgtttctgtaataagtgaaatgaataatgattttaatatatttcatgatgtcacgttcttaataatgtgagtgaatcgtgtatgatcaacagggatgtgacggatcagttttgttagataaaccaaacaatcaaggtgagaagagtgcagttcctaacctaagtcttcgagggtttggcatcatagacgattccaaggcggctctagaaaaagtgtgtccgggaattgtttcttgctctgatatcttggcacttgtcgctagagacgcaatggttgcagtaagtaattttcacataatacaaaatttctacatatatacaaatataatagagctctcttttaatttattatatatcctgaatatgttaatttctagcttgaaggaccatcatgggaagttgaaacgggaagaagagacggtagggtttctaacatcaacgaagtcaacttgccatcaccttttgataacatcaccaagcttatcagcgattttcgctcaaagggcctcaacgagaaggatctagtcattctctcgggtacgcaaaagtgaattaatgatatttactatagtctgaaaaatgaataattaatgatggagaatatacatgtttttctaaaggtggtcacacaattggaatgggacattgtcctttattgacaaaccggctttacaacttcaccggaaaaggagacagcgacccaagtttggactcggagtacgccgctaagctcaggaagaaatgcaagcccaccgatacgacgacggctctagagatggatccggggagtttcaaaacatttgacttgagctacttcacgctagtggctaagagaagaggacttttccagtcggatgctgctctactcgacaactccaagactagggcttatgtcttgcaacagataagaactcatgggtcaatgttctttaacgactttggtgtctctatggtgaaaatgggtcggactggagttcttacgggtaaggccggggagatccgtaagacgtgtcggtctgctaattaagagatatagaaatgaaaatatctcaatatatgtgagtttgattattattgtttgcttcttttattttgttgtcatccctatattaaatgtgattgttttcttgggtattgtttcttgggaataagctgtatctaaaatttataaaagtcttgaaagttcagaatgttattattaagttataacgtttagtcattttgaaaagccaaaaaaaaaaaaaactgaatcaccatggatttgaatattgagaccataattaagttaaacaatgtattttttattattaattaataataaaagttaagatttgaaggaaaatggttaaaaaccaccaacttcagcagaacatctgttccaaactttaagaatcctgggacgacctttagaggcaaatggtttgtaataataagtctgaaacaaaagattcctcagcaccatgtgacattcttggccatatatgatcattttcagacaacaatacctcgaagttggtatgttttgaagaatctcagacatgacttgatcgctacatttttctccccccatcaagccagcgcaagtcccggcaaactgaacaagttctgttgactgtttattaagcatgtctatattgtattcactcgtactcggagatcttgcaaacgtggaatctaaatcaatattgggatctatcaacggtttctcatcatctgccaaacttggataagcaaacagtaccaacgtggtgattagaacaaaagccatgtaaacgtgattatttttcttcatttttttattttataacttagcctcctctttcacctatttactccttgtaaataaaatttgtatgtgtatagagattatataccctaaacacacagtagtcaactgaatgttattaacttatccgttatattgtaattaataaaactacgttttgtttctttgtttgttttctattaacaaaaaaaatgatttactctataaaatttgacgtttttttttgtaataaaaaatatgttcagttacgttattactattttatgtattaaatgtaaaattgaaaaaatgctttatggaattctgaatttcttgaaaacaatttggagggtggcccaaatcatcaattttcttttaaggtatttattattcaataaagttttattccggagttatgctaaagaaaagagtgtcgatatctgtattttgtggacgatttagattacgaagaaaatctcgaggaataaaaatttatgtggcgagagatcaattgcatcataatattatgctcatgaatcacgcgagagtttatggtgatttcgctcattgtgtccccattctctcttcttttgtttgattcctcctccctcttggttaacaacaacttcactcacaaagcattcccttttttatttttatcgctactctccgacaaagccttcttctttggatcatctagtctaggttcggttttctcaattagctctgttcgatttcgcggatgaaacttgttcaagtttgtgtctgatctgctctgctctgctcatacttaaaaaaggaaactttatttttctgtaaatggcatcagttgccgagagctcttttcctcttctctgtcaaatcaagactcagcgtcgcatcaattcctctacgctgaggcattcccgtgtttcttaccatgatttgccttctggctcgctgtcttttcgttctcggagctttgttctgggacatcgatgcaagtgtgtgagccgcgtcgaggcttccggctcagacgatgatgagccagaggatgcgcttcaggctaccattgacaagagcaagaaggttcttgctatgcaaaggaaccttcttcaccaggtacatcctccttccttccttccttctatttgggccttttggcaatgatccaatgtgaagattaggtcacttaattgttttctactgatctttattcctaaaaggtccatttttttaacactatgagctgtaagtgagaatgtgatttgaatatcctaatctgctttggagcctgctctcgagttagttttatgattaatatgtgttaaattattatttgacatttgtgtttaacaatctttcactttatctatcatgttacccttcagattgctgaaaggaggaagctggtctcatctattaaagagagcacacctgacttggatgatgcaaaagcttcttccaaacaagagtctgcttcttctgtgaatgctaatactgatgctactaaaaaagaaattatggatggagatgcaaacggtagtgttagtccaagcacttatggcaagtcatctttaagtaaagaaccagaagctaagactttctctcccagtactgaatccttgaagaaccgcaaacaaagctcggcctctgtgatatcttcttcccctgtaacctctcctcagaaaccatccgatgtagccactaatgggaagccttggtctagcgtagtagcgtctagtgtagatcctccttataaaccttcatctgttatgacctctcctgagaaaacttctgatcctgtaacttctcctggaaagccaagtaaatctcgcgctggtgcattttggtcagatccactaccgtcttatctgactaaagctcctcaaacatcaactatgaagacagagaagtacgtggaaaaaacacctgacgtagctagtagtgaaactaacgaacctggcaaggatgaagagaagccgcctccactggctggagcaaatgtcatgaatgtgatattggtagcagcagagtgtgctccattttcgaaaacaggtaattatttcctttatcatctttgatcgattgtgcgggctatgtttgcataagtagtcttctcttggagtacacaaaactgaataccaataacttttataggtggccttggagatgtagctggtgctttaccaaagtctttggctaggcgtggacacagggttatggtaatatttattagagagtgccttttttcgtgtcagataagctctctggttgattgtggacattgtaactcaaacctgttagtcaatcattttctttgattttcttgttaggttgtggttcctcggtatgccgagtatgctgaagccaaagatttaggggtacggaagagatataaggtggccgggcaggtataaaagctgttaatgtatcaacattcaaagtttcttcttttccatttaaaattccttgacaaggtagagaaaacttcatgtggagcacactttgctgcaggatatggaagtaatgtacttccatgcatttatagatggtgtggattttgttttcattgatagccctgaatttcggcatctgagtaataacatttatggtggaaaccgacttgtaagacttatcttattctccctgttcttcaccgaaaaatcaatttctgcctacatgtactaagtttgttataattgaatccaggatatcttgaagcggatggttttattttgcaaggctgctgttgaggtaaacctctgcgtcaagattgtgaacgggtaatcgatatttagctttcttcttatactaatgttggtttctggagatttgtttcaggttccgtggtatgttccttgtggaggtgtgtgttatggtgatggaaatttggcttttatagcaaatgattggcacactgcgttactaccggtgtacctgaaggcctattaccgggatcacggaataatgaaatacacacgatctgttcttgtaattcataacattgctcatcaggttagtaaattcttcactcagtagaaatgacttactttatgcttatctatccaagagaagtatgcataacctagtggtggaaaattaggggcggggaccggtagatgatttctcctacgtggatttaccgagccattacttggatagcttcaagttatatgacccagtaggaggtgagcacttcaatatttttgcagctggtctaaaagctgcggatagagttctcactgttagccatggatactcctgggaggttaagaccttagaaggaggttggggtctgcataacatcataaatgaaaacgactggaaatttagaggaattgtgaacggtatcgatacacaagaatggaacccagaatttgatacttacttgcactctgatgattataccaactattccttggagaatcttcacattggtaaaccccaatgtaaagctgcattacagaaagagctcggtttgcctgttcggcctgatgttccgctgatcggttttattggaagattggatcaccagaaaggtgttgatttgatagctgaggcggttccatggatgatgagtcaggatgttcagctggttatgttaggcacagggcgaccggatcttgaagaggtcctcagacaaatggagcatcaatatcgagataaagcacggggatgggttggattctcggttaaaacagcacacagaataacagctggtgcagacatattgctgatgccttctagatttgagccgtgtggtctaaaccagctttacgcaatgaactatggaaccattccggtggtccatgccgtgggaggattgagggatacagttcaacaatttgatccctatagtgaaacgggtcttggttggacatttgatagcgcggaagcaggtaagttgattcatgccttaggaaactgtttgttgacatatagagagtataaggagagttgggaagggcttcagagaagaggaatgacacaggatttgagttgggataatgctgcagagaagtacgaagaagttcttgttgctgctaagtatcattggtgagttaaataaaagttaccttttttactgtctataaagaacatgtctttggaattgttaagaagcttagttgtgtagatttggtgataaagctacattggagcttggcaaattctcatgccatgtaagctccttgtggtaaaggatcaagcttgttaatctcttgctctctcactcttagtaattttaaagtgatattacgatttgacaaagtaaaacaatacttacaaatggtgaaaaccctaacttgaagaaatcaagaagatgggaataaaacaggagagaaagttttagagatcttgtcaccattaatgtgaatgttgtcgagcttgtgttgacaccacttgaggtgagaagatgagaccaaaggcatgtgtaaaaccctagatacgagctttaaatctattgttatgcatctcactaacataaaatgctcatctttctcaatcttatcttcatccatgttgaaagatttcttcttgaaccaaatcttcttcttgttcccttgcatttccttcaacaattgttccttcttcacaaatcaaaatattaattaatattcttaatagaaagtttaaagtctttaattgactgtaataggaaattaccttttggagtgaaatttttaggtcaagaaagagcctaaagtctctaggatcttccaattccataagaggagaattaaccaaagagttttgaagtctttcccacatcaaaggttttttaatgtctactttcacaaagtcataaaagacttcaatgcatgtctctattgctttcaacacttgtttgccctgtctttctttttctccttcatgaggtccctctctattatatccttttgagaaaaaaagtagatacggaaagtctataaattagttaaaaaaatgcgtaaaacaaagctacaatgtcatgagaaatcgaccaaaaaatgacttcacaatggataaatcattgtaacctctaaatttgaaatttcttttgagtttcgtcgtaagcacatttgtttcttggtcaacatatagagttgacaatttgcaagagtataattgattaaaaagcattgtagataaggttgttcctgtgacttgtgagttgtgtgacttatctaccaatttacgtcgacagattctgtcgacacataacccgttagagaccaaaacttgactgtttctttagaattacaaacaacaattccaaattataaggtattttatttgtttttgtttaaaaataataatcgatagggtagtcgtatctaaaatgaaatatgtcggaattttaaaatgttttcttaaggagtaaagtcatgaatcttgatagagagattttagactttagtcaagaaatctgttaaaacttatcttttgaccacatctttatataagttgataagaaaaagaaagattacttgttattactttaaaaagaatatatttgggttcctaagattccaatcaacgtaattaaaaattatattatatgaactctcaatttatactcgatgtaacccaccaagaaaagtaatatttagatctatagtataattttagaaaattcttacttagtattattaatatatgaggtgaatgtttgtgataaataaggtagagtcatttacccgaaagtcttgggacttgaaagaagctaatcaactcaaatcttctttgaacaaagctcaagactcgttttccttcacacctctcatcttccaagaacctctctaacaagacctgaaagttctgaaactctctagatatatcatcatcgaacctgcctctcgaatcagcggggttcgaactatctctcactaaaatgtactgatgctgaagagcttcccatgacaagcacacttgagcaacatagactagctcaaggtccttcttcatgctttgttttatcctcttctctgccgttttcccccataagctcaaactacttgccgttagttggtttgtgatcacatctagaaatgaaaaaaatgaatattaacatgaattttgacccaaaaaaaaaagaaaattactaatgaaattaggatatggttagtaaattgtagattaatgatttggttttgtatattattgatgttggtcatctagatataaaagtaaagacttacttagtccatagcttctatcgcggctgaggatgtcataccatctcattctttcgcaatatttcttgtatacatggtcatcttcaactccttgtgtttgaatattctctatcgtaaccgaatcttggagcgctgaatccaagcttgcaatagataaaggcgagggatgatctcttttgctagaaactagaaaagatagatcattctccacgtctgagtttacaatttcttcttcttcgtcatcgttggttaaagaagcttcatcttcttgatgtattggcatagtttgaatttcgaactcaagattcttctccatgtttacaccatcaaaaatgtcaacgtcgtgttcctcctcaacctccttagcatcaagaagctcaacaacatcttcttgatcatattcatagaaaaaatcatccacatcttcttcttcttcaagaatcttgcctttttgcatagatatacgaacttttaaatgactatccacttgatatttaaacgaaaagctaaatgcaggaaccgggttatgagtacttgtagagagttccaagttatcaagggtattcttgatctcttgcctagactcaatatgacaagtaacctcctttttaaacataatgactcggaaagaactactaactagcttagagaacgtgaacaagaccgatgaaaaggcgttgtaaagagcttgaaagggtgggagaagccataaaaagaagagataaagccatataagaagttgacaaagaaagagaacaagagggtgcatgtataatttcatgtaagacgatttcaagaaaccatcttgaatcactatggattctatcattagccaacatgctgagagtaaagccatcaaatgtctgagagagagatgagagaggggggagagagagagagagactcaagagagtgtctttataaagaagaagaagaagctgctgagaaagagccttgttgaaatatttcccccaagactaatcattaataaataaagttggtaaaaggtcaaattgattatcttgagtgttctttcctatcagttccaagactttggttttaaacatgtttggaactatccggatattgaattaaacttgttcaatttgtaacagaaaatattcgtctttagtgaattaactaaacctataaggccatgtattggctataatcatcttttttaattaaaagagccaacttgaccctccatagttgtaactgttaatcacttctcaagctccatcacaacgcacatatgaagaacatagaaaactaacaaacacacatgatgatgttcttcaatgtaagtaacatctctttcgcaaccttcacaattgaaaacctaaccagatcataccatattcaacatcaatatctatttcgatagggctcgatcccgaatgcgaaaaaaagcaagcaaatcagagagtataaccaaaatgttcttcactataacctggttcccacaatatccttacaatgcttattccaattgtacattatttaaacacatggactataacatatataagtttttgtaaaagagtgtgtatgagagaataaaactaaccgaagaaaagtgtagtgatccaatctcatttccaaagattgaacctttttttatatatataataactttgttcgcttattcatttcttgatcttcctctgctgcttctttggcccggaaacgactaatctccttacagaacaaccacacctcgctctgaaaacaagcacggctcgcccattaggcggagccatcttcttcagctcagcttccaattcacggtgatgaacacgaggcaactcaaacattcccctcttgttgctggagctcttgacgcattcctcagtctcaagctgaatatcaaactcaacagctttcctaaggcctttacaattcggtttgccgcatctctgcatagtacacaagagtataacaagccaagtagagatggcagcacagaagatactcaaagctaatgatccatacacaatcgggttctgcaaaatctcttgtttgactaaaagagagagatctgaaaagacctcaatcgatttgagggtgatgagtttgacgtaagggaagaagaggaagccgcaggcggtgatgaccgcgataaggatcacgacgtcgatagcagcggactgagatccgtcgcagacagggaatttggaacaggttggtgatgatgaagatttattacgggtgtttctggatttaggtgaggagtgagacatgatcattgggtcgacggaattgcagaccgagattgagctatgcaaatataccatctcactcacaaacacagagaggccttgaagataacaaacaacaatccaatcgaactagtgatagagattggatctccacgagtttaatcagaatcgatctatgagactagatttgaatcccaattcttcagatcgagcataacgtagagaaatatccaagtcacctgattgaaaagctcggtttcaatctgatcgacgaaatccagcagatgaaaaatcttcggaacttgtcggttactacaaactgatcgaatttcgatccgcacgaggttgaaggttcgtgaagccgattgaaattcaacgtgtagagagaggagactgaatcgtcgtcgtcgtcgtcatgatgaagaattcaaaattttaatctctttagtgttttaggttccaaatccaatcggaatcaatgtgaatagtagtaagtttattcgtctagtgacacgcaggcttttttagataactcttttttacacatgacgtcatgtttttttttttttttttgagcagacatataaaaaccctaattttccgattcttcttcgtctaccagagtcctaaaaccctagaagctccgttgttcctgaatcagtctaacgatgggttcaaagaataagaagcaaaggaaaggagagagcattgaagaagctaaaggatccagtggagtcgcagaggaaggaaacgaaatgattaaggatccaaggttttcgtcggcgcacacggaccctaaattccgtaggatgcggaggcgtgactccaaagtcgccattgactccagattccagcctatgttcaatgataagcgatttgccactggttctgctcctgtcgataagcgtggcaagcgtagaacaggaggcactggcaaagattcgcttcgagagttttatcgaattgaagatgaaggtaagcagaaaactgaggaggaatctggggatgagagcgggagtgagacagagataaatgatttgaaatccgaaaaatctagccatgtagaatctgaggaagagagtgagagtgagctaaaggttgcttctttggatgatgaatctgatgagaaagcagactctgaagagttatcctcgcaggaggaggaagaagaagaggatgatacagatgaggacgatgaagctatgtatgaagatgagggaccagaaattccggtaaattgctcaactttgattcatgtgccttgttcttctactagtttttgacaagtaattgattttctcatgttgcaaatttggtgatgatgatgatgatggcttctaggaagagaacataccgcttatccaagaagaaactcatagactggctatcgttaacatggattggagacatgtctctgtaagttctctcaatctatgatgttttgtttcaatttggccttctttgacgttaatatctttgctatggttatggaacgaatctaagattaagtagagcttgtttctttctctgccttgtctagactctagagtcactgctctgtgatttttggagttgttcttatggatgatatcttattttgttacttaggctaaagacttgtacgtagtgttgaattcgtttctgccaaaagatgggcgcattttgtcagttgcggtctatccatctgagttcggacttgagcgaatgaaagaggaggaaatccatgggccggtaattgatggcgacaaaaagaatgacgctagtgatgatgaagatgaagaagaggaggaagatgaggatgtcatcaaccagaagctacgtgcctatgaaataagtagattaaagtaagttcgaatctgcccgtcttaagctatatgtggtggagagggactattactgaaactctgcttttactattgcttcaggtattatttcgctgttgccgaatgtgattcaagtgctactgcagattacttgtacaaatcatgtgatggaattgagtttgagagatcatcaaacaagctcgacctaagatttattccggattccatggaattcaaacatccacctcgtgatattgcatctgaggtgtgttaccgctacttccttttacttgagatcttttggtttcattgtgaatacttgtgatcttatagttgttataaaaatataggcaccagctggttatgaaggtttagattttcagagccgagctctgcagatgagcaaagttaatctttcttgggatgaagatgaaccgcaccggattaagaccttaaatcagaaattcaatcctgaacaggtctgtatacgggtttataatttatgtgattaggcttaattgcttgcttaaaagcatctccattgttgtagtgttattgttctgataaaattttctcaaatcatagttggcaaatcttgagatgaaggagtttttagcttctgatgagagtgattctgatgaggaagacgacttgggcaatgaagttattaaccagagtaaaaaaaaggacaagaagaaagataagtaccgagctttaatagaagccgaagatgttgattctgataaagacctggaggaggagaatgaccaggatatggaggtaacattcaataccggtttagaagatcttagcaaagagattcttaaaaagaaagacaaccagtcagaatcggtgtgggaaacatatctaaggcagagacgcgagaagaagagagccaggaagaataaacagaaggatgatgattcttctccggatgatgacgacgattataacattgatagaaaggcagtgaaagatgatggagatgacgatttctttatggaggaacctcctcttaagaagaagaagaaagaaggaaagacaaagaaggaggaagtagcagcggaagaaaaaagtagagcggagcttgagttgttactagctgatgagaatgcaggagatggtaatggtctgaaagggtataatattaaacggaaagctaaaaaaggaaagactgatatttcggaagacaagatacctgctgctgaacttgatgatccgagattctcagctctattctcgtctccttactatgccctagaccctacggatccacagtttaaaaggtacattgatgaatatttgaatttttctgagaagtggaattgcgaaagtttaagaattttgggggatatttgttttgcaggagtgcgacttatgcaaggcaattagctttgaagcaaaaggaagatccaaaaggccacgaggatgtgaaagcgccaaaggagaaacaggagttgaattcagatggtaacttggggtctaagaaggagagacacgaactgacttctactgtcaaatctttgaagatgaagatgatgaacaaggattctgagaagaaaaaagcgggaaatccagcgtcttcatcgactttggctcagcgaattaagaagaaagccaaagatttatccaagaaataataatgtctttgtttccttcttcaaatcaattttgttttaaatttaaaattctgaattaataacaatttcaacctatattgtaccctttcaaatctgtttatgtttcattttgaggacgtttcacatcttgatcatttgttatttgagtataatagcaagcgcaacatattcgatttattattggtctccccacttaaattatgtcaacaacaaaaaagaaagaacaatcacacttttaacctcaaacaacctaaacatggaaatactccccattggcagcaaaatccgaaatttttagtaaacaaatatctcatccatagtaaggaggttgacctgagggtgaagccccgttgggatcagatgatgggtacatatatgggcttccgccataacctgagtattgactttgcgcttgcgggttctgccaacctgctggtggtgcagaacccgacaccgcgggacctttttgtgccacaagtaggcttagatcaggaagtgtatagtctctgcttttgtcgctaaaagccttcattcaatcacaggaaaattgaagaagataattagacgttgatttaatattttgctgcgaaatgtagaaaagaaagaagcatacgcaattccgttactattctcttcccctcacaattgtttttttttttaggtacacatctcaaaaaagcaacaaatcttatgtaccttaacattcagatcagtatgacgagagtatgatagtcgaagcttacagtagccaccgtcataaatgcagtgtccttccagtgcttctttggccattgctgctgttggtatatctacagagacgaaatagaaagcacgaaactgaagatgattgtacagtaacaaataaatgttcagaatttataaaacggttgaatcgggtcacaatcaaacattagtgcagatcagcagtcggatgtaccagagtattgaattaatgcttgcgttgaaccattcttctcaaatatagcaatcttctggacagttccatatgcagaaaacacctatgagaagcaaaggatgttatttttgagagactaagaatgcttagaagcagaaatgtgcatgactgttgttccttaccgtgtgaagaacatccacagtgacagcatactgcatattctcaatcaaaccgagaaggacgttgctctgagattcaactttcttgccgtcagcacctaaagcaggctgaagacaatgtcatagaccacgtaagaaaggtaaatattggtggaaagcgatagataaaagtgcagagaaatgcaggggacgaaaatgatacctgcatagacccatccattgcggtctgattcactggaaggtatggatttgtgtaatctctgagtacaccaacgaatcaaacatatgaatcaactattctaacataaggtgttcaacattactggcagcatatgcagaaactctacctgctccggtgggactgaaacttgatgttgagatcagtatgagctgaataagacattcgcaaactgcacgaaccaacatgtgcggaaagcagatacctgggtatacttctgccatccaacgcactccttgccgcggatgcagtctccacatcagtaaattgaactagtgcctggcaggttaggaaagcaaaaaataagattaatatcacttcattcatctccatagatacaagacagtcaataccaatctcaacatctcacctggaaaccagcagctttctcaaatgtggcaattttatgcacaaatccaaaagcagaaaatacctgaaacaagtttggactcgatattaatcatgaccatacattggagggagaacaacctagggaaccaaatcaacagaaagaaactcaaatgttcccggattggggctaaaaaagagaagcccagaaaagtacagagtgacacctgtccaattatgggcatgatagagcatagataggagaatgacgaacacgatacaatttccaaactctctccagaaagattttaataaagaggcatcaacatctgtgattcgagcatttcattaatgttgatatactgtaattggaatagtatatctaagtaaaaattactcgtagaagtttgcttgattagaaatttttatatattcatctgctcgaagcacaacacactaccgcatgtattgccacacccatctaaaaccatcaatctcaacaattttcatcaaaaacaaccaattcccacagagaaatacccattgattaaaaaaaatcagtgaaagaagctcacactcgaaatcgtaaaatcaagtaaatgcactcaccagatggataacatcgatgctgacttcgtgagattccactccttcaaaggtaaccaagaggacatttccagggacatctccaggactctgattgttaacaatctcatggcgattagagtactgaatatagacagttttcccacgaatctgtgcgggctctgaagatgaagcataatacgaaaccattgatatagcttgattcaagtcagcctgtaaaatcaaatgaatggttcatcaatagaaatcgccaaaacgaaagcttgaagagtcaaccatcatagctataaaacttgagaaacctattcgatactacaattcgagaaaagctcgattctagggtttgatgtttggcgctgcaattccaatttctctttatcctttcctaaaccaaatcccgggagctagaaattgggggactgtaagaacaaaaacaatttcaattaagctcacaaattcgacgaaagcttgattgcgattggcgccgacattgctcttggtattgacgatcttgccgaatcgtttgcaaaggtcgatgagctcctcttcgacgcattcccatggaagattccgcagatgaaccaccttcgacggcgtctgtgtataacggaactgagtttggcctgagctcgacatctccggcaaggcgttagatacttgtttcagatttagtaaacgaacgatcacacacacagcaaagccggcggaggaagtagctcgattcgatgctctttgtgatcggaaccaaaaccatacagctaaaatatcacgaatatttgctaatcacccctacaatttgtatcttctccatatttgacccttaatcttctaaggccgtaactactagtccaagtgtctatacaaggaagtatattaaaaaatgaaaaacaaaaaagacctaaataaaagggccttataacgtatattactagaaaacgccgagggtgatttgttttgggcctataacgtacattagaatttggatccaaatcattcaaagcccacaattgataaagcccatgaattaactgtccaataatgccctctcgcccatcctctctctaagtgcatccaagtcaaatttccatctcctctttattatggtttctttaagtttttttttttaaatggttttgttttcattcctacagatttgaaaacatttttcatttttaattcaagtttttctaaaaaattcgtttcaattttaactttaaaaaataattttaatactaaatttataaatgatggaaacactaatcagagtttagatcttgtcatttgatctagttatttgatcgttacagaattcacaaattcaatttgtttccattgttgtatagatttagcattgtagtttctaatttctatcttaaaatttaaaaattgttatttccgatatttaaataaagtttaaattttgacattcatgtatttgttataaaaataattaagtcaaattgttttatttgccaagattttctattgttgaccccttcagagaaatactatcattaaaccccaaaaaagcaaaacacttttcatgtgatcacagagaatcgggacttcaaaggtcacaagttagaggtcctacatgaactaactatcagttaaatctcatatccttacttccaatcttaatattacttgttgtctttgtcgagagggtctcaatagtgtgtactgtttgtgaagggactactaaattactaatccattaatacaattttaattctatcattaactaggctttaacactgtactaagtttgttgcagtttctttctatcacttgcgtggcttgtttcttgccttaagttggctaatagtaattgcttatgcttggtctactgtgattaagatgaaagttgtcttgtttgcttccttcctctttgttgacttttagttggatgatttggtcatgtcttgttgatgaagatagtgaatgaaaaaggttggaccataacttactgagagatgttttgattgagaacaagcaagtttgacttgctttttgcgatgttaaatcatcttctggcttaggtcaatggacaagaaatgtctagatccagtgacagattacagtctctgcgtttgtatgtcttgagttcagtaattactaagcgaacttaaaagtgttttacattgtttttctacgaaacagtttcgaggaaaaagacttgaagcattcatgcatgtacttgttgtttactgttttttccatgcgtgtgactgacttgttgttctattcggtagaacgagcacacacagaagcaaaagacttggagcattgatgtgagaatttaagaaactataatttctggtccaaaaactgatgatgaagaaaagcaaatggttatcagttgactttaaaagctttggcccctcttcttagctcactcaatctcagctacgttacgtggatggatgtgattttgacaagtggcaacatcatcatctatgaagtttattgagcactgtttggaccataaaagatgaaatcagccaagacaattaaagaggtgtccccattgtcctttacatcttttgcagccagtatgatttagtttttccaaaattcaattttgtttttattggtacaattcgttgggccttatgattttgtcttatggtttatctttgtgttgatgaagatactttcttctcttcctagaagcttggagcccacctcaataaatcctttctttgctaccatggcacacactaggatactcttttctttgtttggtctggtaaaatctctttaatgtcaccgtcaccgccattactcgtctacctttcttggcagccaaagttacctttgtcgacaacatttgatcacctgtaaactatccaaaccatgtatgccactaaaattttgcataatggtcagtaagtaacaaattatacaattctgattatggtcaaattttaccttttgtggtatgctactagttaaagggtaaccaaatagtggtttttacctcatcaagtcgctattttgatggttaagtttctgtatacttttcatcattcattgtctatgttagtttatctttgtgaaaaaatagattttgtgatgaattgacaccaagaacagtggagcagccagtgggactttcattaaatggtaaaggaaccagacaaggaaaggtttttcacctcctttcttcttgctcccaccacattagtgtttcctctcttcatttataagggttccaaatttttacaatggttgaaactcagtgtttaccgcggtcatagttttctgatactttagagacagtgactattagtgtaaaaatgtgttaccataaaactattgttgcttccacagggagaattataccatttgcagagcaatgactaattgaataaacaacaagtctaagctaatgacatcattgacaaccaattaattacttgcaactactttgcattttcccttttttttccttctataatcagggtttatgaatcattaagactttttgctctaagttactccaaatatcattaatcctctgtgtctgatttgcttttcccattatagtgccagcttccacttcttcaccgccatctaacagcatttactattgtggagtttctacaaaaagctaactaaaatgtgaaacgaagaaatcaataaacacgtttccataaagtagtgtaacttattagggtaactagttgtaggcaagaccgtaagtaagacaaaacaataagaactttgtagctttcaagaaaccatcactcaataggatacctgtaataagaaaccttgagcatcttttagaccctagtgtaagataattgagttttagtgagaagtgtttaaaacttgtaactagcttaaatgggtttagtgcatttggggactgtcgacagcgaaccttgacgcgagaaaaatgcgggaaagtaacaagaatggtttaaatgtcaaaactgttaaaggaccacaaagtttgtttaaggctaatgagaaaaacattcttctcaatgacattatcctaagttgcagggttatcaaagtgagagctattgatagatgttgaccttaaaatttactccaggttctgaaattcactgttttacttttgtgttgagaggtacaatttcaaggtaaagatggctacagtaattgggtgctctgttgagtctttaaaaggaaatcaaggtgttggagccacaaaggtaataatatctctcgaccccatccaattgaatgccaatccatgtcagagaccgggaaaaggggcgcttacagaacctaaacagagacatcttctgttgtgtttctccatctatatatcagagtgacgccaagagagcagcttttgtgatcatactgatcatgatcatgtaatgacaactatctcatacactaggttattaaaccgtggatcagattgaagctagctttttcttcagtagattagactaataacttgtgtgggaaaacaatgggcagatcgccatgttgtgataaggccgggttgaagaaagggccttggactccagaagaggatcagaaacttttggcttatattgaagaacatggccatggaagctggcgttctttgcctgagaaagccggtaacttgctcgctcttttctcttcaacaaaaccacacattttcttctagctctattcaaagctttgcttcaaactccttataggtctccaaaggtgtggaaagagttgcagactcagatggactaactacctaagacctgacatcaagagaggcaaattcactgtacaagaagaacaaaccatcattcaactccacgctctcctcggaaacaggtgactcaatcacaatctctgctttcaaaccaaataaccaagtgattgctttgaaagcaaattgatcgtcgtcctttaaatgtcataggtggtcagcgattgcaactcatttaccaaagaggacagacaacgagatcaagaactactggaacacacacttgaagaaacgtctgatcaaaatggggatagatccagtgactcacaagcacaaaaacgagactctttcgtcttccacaggacaatcaaagaacgcagccacgcttagtcatatggctcaatgggagagtgcaagactcgaagctgaagcaaggctagctagagaatcaaagcttctccatttacagcattaccaaaacaataacaaccttaacaaatcagcagctcctcaacaacattgcttcactcaaaaaacatcaacaaactggactaaaccaaaccaaggtaagggacacatcgtcttaaaaaaaactctcaactttgattggttttggtaacgtatcaatggaaaattgtgacaggaaacggagaccaacagcttgaatctccgacatcgacggtgacattctctgagaatcttctgatgcctttaggaatccctacggatagcagcagaaatagaaacaataacaacaatgagtcctcggcgatgattgaattggccgtatcttcgtcaacctcctccgatgtgagtctggtcaaagaacatgaacacgactggattaggcagatcaactgtggtagtggaggaataggagaaggattcacgagtctattgatcggtgattcggtcggccggggtttacccaccgggaaaaacgaagcgacggcgggcgtggggaatgagagtgagtataactactatgaggataacaagaattactggaatagcattctcaacttggttgattcttcaccgtccgattccgcgacgatgttctgatctaagggtcttcaaccaaacatttttaattctcagattgttttttaaatgtcgatagctttccaatactttttacttatctttattttctttataaactattatatatatatatatatatatatatatgggatgaaaatgagcttaattttagtattcgtttttgcagaattgcatgtagcaaacctgcaaatccaatttacaatttatatattatgcttttatgttgttggtatacagtttgttagaaaaatattttaagtgataacgtcgttgtcatttggccaaatacataaaccataataagggatcctccttcaaatcctaatacgtttttgttttgggaatgagctttcttgaaaagcctatcggcacaaagatcctttttagtatcattgctttgttcgaatttaaattactaattttgggaataattaggcgctttaactattgagttatagaagttgagctttccttaatcttatattgataagatgtttcaaaatataggattggaaccactccataattctttaaagttgctgagtgcaagcaattgaaggaaatagatattcatattacttatccaccggttgtggagtatttttgtctaattttcaaatttttctatatgagagatgtctgaacgaagaggctgtaattataacaacaacacgttgacatgtcgagtaaaagaaagaaaattcaatgcttggttgtttcatgtccttttctttatcataaatttatttatatacagtatgatccatagtaataaaacacagatattactaatagattcgagtccactaaacttaagacatttttaacaaaaggttacattacatccatcgaatttgatagtaaatccttaatcgtttacttaatgtgcatgcaaatttgggcgtaatagtaagaaggatatgggcctgacgtttggtactattgaataaaggcccatataaagcccaataatttgcttttctgagaagacggagacaaaggagtcgctctggtctttcattatcgcgaatctgagatttcggaagattcgatcgatttgggggttttagggtttaatctcaactgctaatcaatggcgccacctccaggactttactccggtaccagcactcttgctctggtaaaccccggatcaatttctcgatctgtagccttgacttgtcgaattttggattttgaagagttcatcgagtcttttctttttggtatcgatttaggttgctcgtgcttcggctttcgggttgggtctcatctacggcaacatcaagctcaaggctttaaaggtacatctctctatcttccttgtcttgtttttatcagatgagaaattattttcattgggtttcattttgacatcctaaatctgacacttgccattatagcagcaaattcgaatgtttatggcttttgaattatgatattctcgatcgaatcatgtgtgccgtgactattagtatgctactttgctccttttggtttggtcatctatacacaagtaacatgattctttgaccccaatgtttctgcctgagttctgatctcctattccactgaatgatcatagttttgacttgatgtttagtagaagagtttgtcaatgatttgcaacttgatcactgaaatgtaatttcttgcctttgtaaagcataagtttgcgatgttgtgtctggtttccaaaccctaagaaaatcggtatgaaagtagagcctatgttgcttcctttagagcatcccaatccttattcattcagattgtggaatctaattttctactatgatgtgatttgctaataagttatgatgataccaacaaatgcttcttcttcatatgcagataaagaagaattcgcagattaaggccgaagcaaaggctcatcactaaaccaactcttcttctccttctcaataagattatgaagccaagtgattgttatctctaaatgtagttcttttcctccttaagctatatctccctcggtgacattttttccatctttctgtttttttaatcaaaatcttctgtctgacaaagcaatcgtatacccgttttggtttaaacctgagttcttctttggtactttcctgctattcaataaacaccatatttttatcatcttaaccagataaataatttataaaaaaaaaaaaaaaaaaaaaagaatttttattgttttcaattaaaataaataaatatccgccgtggcgcagagttaaaagtaagcagttggctattcaggacgaccaatgtggtcactgcttggtggcaagaacaagttgtgttcgagctatacaaggtcgtggcttcgaacattggtcacactcacacattcgctgtctctctttctcacgtaatagaggcattcttaaatgcctttttctgttctctttcattctctacaatttattaagttatttgaacttattgtagaaacctaaatgtttgcacccaaaattaaaggttacaagatgagtatcttctttgagattttgagaagagtttctctatatggcgttctatgtctagtttgaataatcaaatcatcatttatattcccatcttgaaactttaaaatcactatccatagaatattcaaaaccataccatgaacactacaataatacaatactatataatatattcatcattatacttttaatgggagtcatgggacacgcagtaatcggttaatttcattgtgttggtgctttcttcattggacggatgagaacttaaagaataaattagtatgattttcaacatttaaatataaataccacttgaagtgtttttgtggtccattggctaccatcaacttgaggtatattaagtccctatatataataactaactaacataagttttggatttaaattactaaaagggtaaagaaaatataatctttactattaatagaaaataaataaatatttttatacaatgaggatattatataagtctaaatcctgagttaaaacctcaaatcctatgtttttttgttgtcattgcttggacataacatattgtttcgaccaaaaacaaaaaagaacataaaatgttcttaagattcaagttctttttcatatcaattaagaaataacttacggcatctttaatttatgtttgttttgatcaatcacataattatagtgaatagtatatttttagtgctattacctatccttacaaatccataatcgaatttcaaagcaacgcgacctaccctcaggtctcaaaacgcacgttcaccaatacaaagtggcattttcgtaaataacattaagaaaaaaacaaattaaaacagttttgtaataagatcaataattatatattattagatgactcggataagccattcggctttggtctttttgttattgccaacaattaagctcaggcttacgaaagtgattgtctgattgacgttttctttttcatttccttttttggtccctgaatacaccttttgagtttgaggtatatctgtcctctttcgaatctttttcttagtgattcctgattattaagaccatctccatcaatggtttctcattaaaaaactgttcaatataaaaataaaatataatcaaaaagtatgagagagagtagaattagtctttcaagtgagaaactctgagaaacccataaaaacacttgtatatcatctatttgtcaaatattattttattgttaaaatttaattatataactaatatttattaaaatacttatatcttttattttttagaaactaagaaagtatctcactgatggagatgcccttaatacaattcggtttgtatttatttctatttttcccgtaattttatgaccctgtaaaaaagttaccgtgtttttttttcacttttcttacatgacataattaattacaaagtatccatcaccacacaaatcaatacaaagctttttgaagtgtgatggtgtgtttatttaaagactttgaagtttggacccagaccattatcacacaagtggaccttattttatatttcgggtccagttgttagaaatttctttttacactgaattcattaattaaaaaaacaattatttaattagtacattttgatcgttcgttttcatgctacatttgagttttaaatagagaaggtctcaaactcacaactatttttttgactttaaatgtataaattagctgcaactttaacaaattgtgagtagttgtagttgcctagattctatttgaagactacagaccttaaaaaaaaaaaaaaaaagaggtcatagtcaaaaacaaaaaaacaccacatttggtaaatttatgatgtgttctctttttaaaaataaaataaatttcatgtaaaaaatctgtacgttcaaaatatctcaggtgattaatctgtaagtacaaattttaattttcaacatgaaattgaatgtttaacaataatgagtagttggaacttggattgaaaactcaacaacaactcattgtttggataagtaagtagaaatctggcaataaacgtattctatttttgtaacgtagaaaattagaaaaataatagtaagaggaaaaggcatggtttagtctggtcaagttaatgtaaaccagagtggttaaaaacaaaacgacaaagcaatttggcttcttaaaaacccgcccatggagaaagccctcacgcacctctaaaccacaaacaaaaagagagagaagagaacgagagaatcattgagaaacgaaacaacaatggccgtctcatcattccagtgccctaccatcttctcctcctcctcaatctccggctttcaatgccgttctgatccagatctcgtcggttctcccgtcggtggatcatctcgccgtcgtgtccatgcctccgccgggatttcttcctcattcaccggggacgctggattatcctccaggatcttaagatttcctcctaatttcgtccgtcagctgagcattaaagcccgtagaaactgtagcaacatcggtgttgcacagatcgtggcggctaagtggtccaacaacccatcctccgcgttaccttcggcggcggcggctgctgctacctcgtctgcatctgcggtttcttccgccgcatctgcagccgcagcctcgtccgccgccgccgcccctgtggctgccgcgcctcccgtcgtgctgaaaagcgtcgatgaggaggttgtggtggccgaggaggggatcagggagaagataggtagtgtacagctgacggattccaaacattctttcttgagctccgatgggagcctcactgttcatgccggtacctcctagatccaccagattcagtcatttcatatctgattttgttgttggagattgataaattaggttttacacaggtgaaagattaggccgtggtatagtgacggatgctatcactactcctgtagtcaacacatctgcctacttcttcaagaaaactgctgagcttattgacttcaaggtccgttgattgattcagtctctttcttttatggattagaataacacctattaggttgaaagaatctcttactagttttattgactttgtttatcttcaaaaaattgaattattgtaggagaaaaggagtgtgagtttcgagtatggtcgttatggtaaccctacgactgtggtacttgaagataagataaggttattattattttatctttaataatgtgttttataattgcacttgcctttcctgaagattatgttgttgatgcttttggatttgtttgattaatatattgctgtagtgcacttgaaggggctgaatcaactttggttatggcatctgggatgtgtgcaagcactgttatgcttttggcattggttcctgctggtggacacattgtcactactactgattgctacaggaagactaggatcttcatggagaattttcttcccaagttggggatcactgtaagaagatttccattgcatctaaattttttaattactgtcttcctttttccaattccagtttttcaacttgattgtttaacatcatgtttatgtccaggtcactgtgattgatcctgctgatatcgcagggcttgaagctgcagtgaatgagttcaaggtcagttctgtaacattattgtcctttttacagttggaaagagagtatgtgtctcaaatttattccgacttgtctggcaggtatctctgttcttcactgagtccccgacaaacccattccttagatgtgtcgacattgagctagtttcaaaaatatgccacaagaggggaactctggtttgcattgatggcacctttgcaacacctctgaatcagaaagcccttgctcttggtgctgatcttgtcgtgcactctgctacaaagtacattggaggacacaatgatgtgagtaaaacatgttccatatattgtaaaacatctcaaaagagcactcactggttgtttagttattaacaaagattgtttctcggtggtttaggttcttgctggatgcatctgtggttcactgaagttggtttcagaaattcgcaatctgcatcatgtgttgggaggaacacttaacccagtaaattacttgactgtctcatttatccctcttattatgctgttaattcatgaattctcataaaaggtttgttaacagaacgctgcgtacctaatcatccgaggcatgaagacattgcatcttcgtgtacagcaacagaattcgaccgcttttagaatggccgaaattttagaggcacatcctaaggtatgcaatatctcttttttgagtaaatatcctgacactatccaggtgagtcatgtgagtaaatatcgatgcaattttgatttgcaggtgagtcatgtgtactatccaggccttccaagtcatcccgaacatgaactcgccaagcgacaaatgactggttttggaggtgtggtcagtttcgaggtaatatgatctatcaccaacctaatctctatctactccagattagcatttaagtatgatcctgaacaccttgattatctttcttgggtagattgatggagacattgaaacgacaatcaagtttgtggattctctaaagattccttacattgcaccatccttcggtggctgcgaaagcattgttgaccaacctgctatcatgtcctactggtatgtctttggcaaaatcgaacaaagttatctttgattccatatgcttccgtctttgacaaaatcgaacaaatttccgatttctaatgggtggttttgatttcagggatctgccgcaagaggagagactaaagtatggaatcaaagataacttggttcgtttcagctttggagttgaagactttgaagatgtcaaagctgacattcttcaagctctcgaagccatctgaaaatgacacatcacacaaaaacgctgtcgtttctttgtcctttatttatctctctttgctgttttcagtcaccgtaataatgatgtctttgaactattgttccgcgacatttacgttccgaaataatcgtgtactattatgatgtttgttgtgctatataataaattctgtttagttcgttttgcgtcttaaagaggttaaattagataactggtcccatgtgaacgaccattgtggccattgctttgtggtaagaactccttgtgcttggaacctcaaggtcacggcttcgaacaatggtcatgaccctctagcttctgcttcttcttctctttgtttcaacaacatataaggcattcataaatgcctcgtctttttttgttttctttcctttcaatacgtagttcgatttcgatttcgatttgtagatctcagcaaaatccatgtcttgagagaatgattaatgggcctttttaataagtccactgataaagacgagagcccaaaacgtaattgtattattatcttctttatttgcttttaaattttaaattgacattaagacaagactaacttttgcttgtcaaatccatgtgttgtccagcgggtaatcaacccaaagttccggatccggacccaacagtaagcaacattttacgattcgttgtttttgaatcccaatgaaaaaaaagatggttatttttaaggaatggaaaaatcgagaaaaatggtatcgtgtcgcatcgaggacttattacgtatggcgagagagctcaaaccaaaagatcaccgcctcgactgattcatcttttctcctggtatgtattttggaaaattcgtctcttgctttttatttgatccagatcagaaaacgttgtgcagattgattctgggtttatcagttccttaccaccatagtactctccatgttcttctcaattgtaaattcctttcctttttgtgtgtcaatttacacatatctgatatcttcttcgtgttgctcccaaattttgcagattcttggcaggcttctcttggtctaagtgaatttggagttatgcttctgtcagcacttttaacttcagtgggaatcaatcttggcctctgttttctcttcttcactttgtattcaatattgagaaagcagcctagtaatgtcactgtatacggtccacgtcttgttaaaaaagatggcaagtctcagcagtcaaatgagttcaacctcgagaggcttttgcctactgctggttgggtcaaaagagcattggaacctaccaatgatgaaatcctctccaatcttggcttagatgctttggtcttcattcgtgtctttgtcttcaggttgattgattcattgagcatctgcttcaagtttgactttttttttgtgaaacttcaatgcttttttgtttggcagcataagagtgtttagctttgcatctgtggttgggatcttcatacttcttccagtgaattatatgggaacagagtttgaagagtttttcgacctcccaaagaagtctatggataacttcagtatctctaatgttaacgatggatcaaataagtaaagaactcgaagctatgcttaaacagtatcccgatttctacttgtccgtaaccgatctcttatgcttgtatgtgttttgcttcaggctgtggatccacttttgcgcaatatacatcttcacggcggttgtttgttctctactttactatgtaagacgccttttgttttgtccatccattctactttatatcgcctatatgggaacataaaataatgtttggactatctttgcaggagcacaagtacattttaacaaagcggattgctcatctttattcatccaagcctcagccacaagaatttacagttctggtcagtggcgtccctcttgtatccgggaacagtattagtgagacagtagaaaactttttcagggaatatcattcttcctcgtatctttctcatatagttgttcatcggacagacaagttgaaagttctcatggtaagcttctacctactaaggattctataaggccttaccttttgatatttctggatttcatatatctgttaatatttgcagaatgatgctgagaagctgtacaagaagcttacacgagtaaaatccggaagcatatctcgccaaaagtctaggtggggtgggtttctagggatgtttgggaataatgttgatgtggttgaccattaccaaaagaagcttgataagttagaagatgacatgagattgaaacagtctttattagcaggagaggtgagaatttgtctttttgtgactacttgcattcttcaacatattcattcctttttttttggcaaacccttttaggaagttccagctgcttttgtttcctttaggacaagacatggtgctgcaatagcaacaaacattcagcaaggaatagatccaacacaatggctaactgaggcagccccggagcccgaagatgttcattggccatttttcactgcatcgtttgtgagaagatggatctccaatgtagtggtgcttgtggctttcgtagctcttttgatcctatacattgtccccgttgtattggttcaaggtcttgctaatcttcaccagttggagacttggttcccttttctaaaaggaatattaaatatgtaagtaaagccctatttagataaagatggttcttcgtttcaattgaacaattacaaaatcttcttttttttcttatgattgcaggaaaatcgtgagtcaagtgattacgggatatcttccgagtctcattttccagcttttccttcttatagtaccacccattatgcttctactttcctcaatgcaaggattcatttctcatagccagattgagaaatctgcatgtatcaagcttctaatctttactgtatggaacagtttctttgcaaatgtactgtccggatctgccctttatcgtgttaatgtgttccttgaacctaagactattcctcgtgtgcttgctgcagctgtgccagcacaggtaaagaacacaaaattcagtattgaggtttccggaattcccttttcgtaccacgagtcatgtttattgtttaatctttggtgtaggcatcgttctttgtatcttatgttgtgacctctggatggactggtttatcatcagagatcctccgtttggttcctcttctttggagtttcataacgaaacttttcggcaaggaagatgacaaagaatttgaggttccttcaactcctttctgccaagaaatcccaaggattctattttttggactcctcggtataacttacttcttcctttcgccattgatactgcctttcttgttggtctactattgtcttggatatatcatctaccgcaaccaggtaacggaaccaatctcactcctaagtataattctctgttgatctctgataaaatcatataggaatcagctacacatattttcgttatatggaatctcacttttatcttctctttatatgtgatcccttttctaaattctcgaatagcatctttaaaccgaaagtattttttggagcttcagtcatgacataaacgttacatcaagaatccattttctcgtcacataattctttttcttcttaatgaatccattgcaacttgttgatagaaataacatcacctttttgtgctgcagctcctaaacgtatatgcggccaagtatgaaactggtggaaagttttggccaatagttcacagctatactatcttctctttggtactaatgcacattattgcagtcggattattcgggcttaaagagcttccagtggcatcttctttaacaattccccttccggttctcacggtccttttcagcatttactgccaaagacggtttttaccaaatttcaaatcttatcctacccaggtaaaggctttagagaaatagttactcatatttttgatccaatggaagaaaaatatggctagataatcttttattcctaacctaaacaaaacaaacagaacatgatgcatagtcctttattacattacagcatctactctaaacctttatatggtgatgatggatgttttacttttgcagtgtctggtaaacaaagataaagcagacgagagagagcaaaacatgtctgaattctattcggaactcgttgttgcttaccgagatcctgcactttcggcatcacaggactcgagagatatctcaccttgagatcacctttttacttgagctattgaagtttgcttatgttgaagctgttggtttactatacctggtgcaatccatgaaagaacacactaaaccggttgtcttgtacattgggtcttaaccgagaatcaagcggtttttgtcttgtacatttgcttacacttggcttgtgtaaaaaagaaaaaaagtttatgtcaatgtatctctctaaaccggtttaagacggtacaaactttttgaaagatgccaaaacaaaacggtggttaataattttaccacagagaatatttagcaaaaagatgatgactagatgccacgtccgcatgggggtatatattgtaattagtcgtaactctgggggtaatttagttaaagattgatccgtttatggaaccaaaaatcaaataatttcgtctttgatacttgcttgcgccttataggctacaggagcgagagcaatgaaagcgagaggaagaatctatcaataatttctgggtttaagctgatctctggatcttcctcaattttactttttcagctcagaaaattttgggacttttttttgctgcattttttggttccgaattttctcctccgccttttttaatttttggtaagtttcgatatctctcaattttcttatttcggaaataaaaaaaattctcgcccttttgcaaatcaatggattgatcttgaaatcgtcatttctgaatcgggtacgagagatccagtaatcctctgcgattgaattattattagggttcatattccgaattggggatagtctgaaaattgctattttaagctctcttcttagtgttggttggtttattctggataataaaagggatcctaattctcgctaaattctcatgttcaaacgagtagatgagtttaatttagtttcttcaacgatcgatcacagaatcttcaaaagtgtaaaaattacttgctttttgttcctattactcttttgcagtttgttttgtgtgttgtgtactagtagatctaatatctctctctctttttttgtagagaatggatggatcaggcacaggcagtagaagtggggtagaatcgattctaccaaattacaagcttgggagaactcttggtattggttcctttggtagggtgaagatagctgagcatgcattgacaggacataaggttgctatcaagatcctcaatcgtcgcaaaatcaagaacatggagatggaggagaaaggtacaagttttgttttgtgtatccattccaccttagttgtgacttcacggtactcttggaatatataaatatatagcttctttttcgtcttccttcctttgaacttatttggtctttgatgcagtgaggagagagatcaaaatcttgagactatttatgcatcctcacatcatccgtctctatgaggttatagagactcccacagatatttatcttgtcatggagtatgtgaactctggtgagctatttgactatattgttgagaagggtagattgcaggaggatgaggcgaggaacttttttcagcaggtatgtttttattttattttatcaacatgtaactttccaagcaaccattcgattttatattatatttgagagttaagaattagctacttggctttgatgtagataatatcaggagtggaatactgccatcgaaacatggtggttcacagagacctcaagcctgaaaacttgcttttggactctaaatgcaatgtaaagattgctgattttggcctgagcaacataatgcgagatggtcattttttgaagacaagttgtggaagtccaaattatgccgctccagaggtaagtgcttcagccctcaggtatctgaggaatactataattaggcttgtttcaaatgataggttatagtcgagatctataaattgtttcaggtaatttcgggcaagttatatgctggccctgaagtagatgtctggagctgtggtgtgatactctacgctcttctctgtgggacgcttccatttgatgatgaaaacattcccaacctttttaagaagataaaggtacattctattactcctcctctttcgtctatttgaactaatgcttgaattttttattttatttttcgtatcacccttcgactgtaaccttttttttttctcttttcgtcctatagggagggatatacacattacctagccatttatctcctggtgctagagatttgatcccccggatgcttgtagttgaccccatgaaacgagtaaccatccctgagatccggcaacacccttggttccaagctcatcttccgaggtatttagctgttcctcctccagatactgtgcaacaggcaaaaaaggtaagcctaacgtatctactcttattttcattagagaaatctctattcccatttttcgataaaggcgtaaaagcgctgtcttcatttgtagattgacgaggagattctccaagaagttatcaatatgggatttgacagaaaccacctcatcgaatcgctccgcaaccgaacccagaatgatgtatgtgtttcccacccacttgttcttttgctgtttctttcatttcaaagattaaaaaaaattccatcaaaagatcttaaatactgtattcttaccgactgtcttccagggcactgtgacgtactatctgatactggacaatcgtttccgtgcctctagtggttatctcggggctgagtttcaagagaccatggttagtcttttttgtccttttcgactttagcaaaagatctttgacgtaatgcttcattgtttgatttaatcaggaaggtactccccgtatgcatccagcagaaagcgttgcttcacctgttagccatcggcttccaggactgatggaatatcaaggagttggcttgagatctcaataccctgttgagagaaaatgggctcttggacttcaggttttgatattttctgtatttatggtataaagacttcagcttttgatatatatgtgattaatattgtaacaatttgatcgcacagtctcgggctcatccccgtgaaataatgacggaagtcctgaaagccctgcaagatttgaatgtatgttggaagaagatagggcactacaacatgaagtgcagatgggttcctaacagcagcgcagatggtatgctcagtaactcgatgcacgataacaactactttggagacgagtccagcataatagagaacgaagcagctgttaagtcgcccaatgttgtcaagtttgaaattcaggtaaatcctcttctccacttcatgatacatatcggtttcccgtacgacattgtttctgatgtgtgatttcgagtgaaagaaagctttgtgtattagtgtccatggccatttttgtaactgaattagaactagagtgaatcttcatgaatctaactatcaatcaatattttctgggcttgatgacgtttgttattgttgatggtgaaacagttgtataaaactcgggacgacaagtatctactggatttgcagagagtacaaggtcctcagttcttgttcttggatctgtgtgctgcttttcttgctcagctccgagtcctctgaatactaaaccggacctcttcaagaataatccccacttattcctttttttttttttttcttattcgtctaagaaattatttagaaaacgtaaccctttttttcttcttctctttctttctatttctatatgcgtgctctactcaaatacctcttttaacttaaatgtaagactgagcaagagtaaaaaaaagacactttgtacataacttgtagtgcatcatgccaccaagattgatttttgtttttgtttactccatatttcttatgattaaaatcaataagttaagggaaagacattttgacaaaaattgaaggaaagatgtttaaattagtttcattgaaaacaaattagcaaattcagaagtagttgtttttgtttcgtgtattatttgatgggtcaatattacactatattttttgtgtaaacaaattagcaaattcaaaaatagttgttttttgtttttgtcatcctactaatattaagacattgaaaaacgaacatttaggatgagcttgatgtgtttatttcgaactaagatccaaaaactatacaaactcaaaaacaagcccaaaaagaatttcaaaagtttccaacgtgtggttttacctaccagttaatcttctcctgcaaaaaaaaaaaaaacacatcaagtgtgagataaactctcacaaaaatacaaggaaatttgtaataataataaaaaaagacacaattatcttttggtaaacctgaaattgaataatttcacactgacttgggcttttttttttaaatgaaaaattaaacaaatatggactacaaatcatgatggtaggtaaaaaatgtatatatatctttggctaaaaattctggtaatttaattcgctttttccccaaattttaacctctctctattcgtggtggtcttcgaacaccaactctaacatcactttcagtcctccgtaatatttcattcatcccatttgtttgaaaaatcttcggattcgccccaagattcgtcaaatcctgcatgattttatcaaaaattaaaattgaattccaactgccggtttagatggtaccgggttcaatttgacttaccatatcttcttctgttttcttgtgattcacgccagagaacaacaacacatcagaggggtccagagaaacgtgcggcctaagaaacggtttgtcttcgtttatcgttaacccgaaagtgttcttagcaaaagccatgctcataccactcacgtggctcgcagatcctggctggatataagtcagcgttgaagctacgtcattttctttcctcttctttgtccctgcccacgcgaacccgctcgctggtgccgtggtttgagacaaactgttatacggaaactcgcttcgtgtcgtcgcctgagacgtctctgacggcgtctggacaacaatttctgtttcggcttccttctttgtttcctgctgaaataatgaacaaaaattacaaatatcgaaccgggaaatagactcatcggtttattccggtacatgaaacaccataatacctggtgggttggtaatctgttgagatttgtaggctctttgactgttgccctacgagatttacccaatttctttgttgccaagttatctcttttcttgatactaactcttctcctgcataacaaagtttaattaattaaatacaaccaatgatatttatacaatgcgcatgctagcaatcattgataccttcgttgaagttcttcgcggtacttagcatccatttctttattaggaggatacttaggtaatgtcgatggatcgcaagcgtaaggctgtgtgttaaagtactgaagaacaacaacaaaccacagagaaaacaaaagagtttcagcttatttgattagagtacatgctagggtttcgtttaggaagttttttcacctctgacataagagcagaagaagcagttcctcgtttctcaggatcaatagacaatagattctccaatagattaatcgcggttttcggaaactcatcaaatctttctctcaaacaaccttcatattgatgttgtggtctaaacatcttagtttgaggatgaagcttgttcttttcccagaattcttcatctggtgatccagagagtttataaatcttgtgaagttgttcaatctacagagaatttcacaaaaacaaaacattcagaaacataatcttttctccggaatcggtttggtccctaattcctcacctctgttcttcctttaagaagtggtcttccggtaagaatctcggcgaagacacaaccaacactccaaagatcgaccgatacgctataacttgttgaacccattagaagttctggtgcacggtaccataatgtcacgacccgactggtcaactgattcttgtttcttggtgttacaatgttggctaatccaaaatcagctagctttaaaactcctttgttattcaccagaatgtttgcggcttttatgtctctgtgcataatccctcgtagatgacaatgttctactccccatagcagttgcttcatgtaacatttgatctggaaacgaaattagggttgtcagagtaaagaaagaaacagagtcacttgcagaagagattagggttttgtgtgtgcgtgtctctctcttgcctgtgcctcggtgaatttgatgtcgggagatgaacataagccttcgaggtcgtgttccatataatcaaacacaaagtacatgctgtttgaattccttgatgcgatgatcccttcgagtttcataatgttgggatgatctaatcttctcaagatcatgatttctctcgcaatgaatcttatattttctgtttcaaaattttggatccgtattttctttaaagccataactcgtcccgtcgatacctcacaagcccggaacacgttgctatacgtcccttgcccgatctaagatttttagagaaaattattcgttgaaatcattgatagggttgtttcttgtcttgcaagaaaatgtaataatctatgcctctatggataggattattttaccttctctcttttctcgaagtcctcggcgcgtaatggaacccacccatgaacggcctcgggagcggcagagctgagccaggagggccaaccagccgccacctgctcagcctctacattgctgtgcggcaatcccgatcttaggctaacaccagtcgtcctcgattttggagcatcgtcgtcattgttgcgatgttttttcggagatgagttgacgacacggcggtgagatggtggaccgggaagaacatggcggttatggggatcttgggtatgacttcggtggacgttggtgtccaagcgacggcggacagggcgtggaggacccgccggagaagaatgcttggagttgaagcaacccataataaattaattgtcagaggagagtttccgggtggcggcgtgagtatcgacccgggtcgggtaaacgggtccaacgcagggagggcaatccccgcattagaccatagagaaacgaaaataaaggagaaaaaaaaacaaaaaattgaaggaaaatagtttttgttgtaaaatagagaagagaaccgaatcgagagagtgagataatcacggacaattcgacaatcctccttaaactttggacgacaaaagagacaagaaagcaaatctttaatctctctcttttgtaatttaaaatagatttatcttacaccctaacaaaaaaatgaagatatttttttactaaatttttgaagggaaaaaactgtaatgaaaaaaataatctatatgttacatcaaacaatgattaggtacaaaataataaattcataatttatgaagaaaaagaaaaaaacaaaacaaatttctttcgtttagtcaaaagcatgcactcaattcacatcacacatgttgttatacaagtcatcaataagtagtagcccggttcagaatcaatcaccaagcggctaaaccaatcctaaatatcaatctcgaaatctttggttcttaaaagtcaaattgtgattttctcttctttcaacctcaaaagaaccggagattggcctgtgttattattgttaccgaaactcatatgttgttgcatattgttccccgacattgatctcatacgatggtggtcagacggccccaccgcagctgcggttgctgccgcggtaccgtttctagcggcagggacatcgtgattgtgtttaccttcgtaagttgtaatcacagccttagcatccgtggaagctctctctacatgtttacggaccgtacaatttggcgttgtacatttataatagctcctaataataccaaaataaaacgagtatttaaacaaaatgaatgtgaaataatgtatacaataatcaaattatttctatatagattcaataagcacaaccctaagtattagtaccttggatggggatttcctttgacaactttttgtccgtacttacgccacctatagccatcgtcgagaagatcgacttcactttttgtctgaacgataatcttaggctcggtcaccgtccggtgagtcgtcgacacaccgtctattcttctataatcccgatatatattaactaattaattggcaatgccatgaccattatactaatactatgtatgataatcagatgcacttctactataccttatctttgaagccggaagatcttcatcatcttcatcatcatcatcatcatcatcatgatccttacgataaccactatcatcactagattccatcatttgccctgcaccaccaacctcagtggaatctctgcctccaccgccacggcgattctgaggcctctcgtgatcatgttgacctttgtaaatgatctgagtgatctgtccatccgatgaccgttcgactttcttcttcaccggacagttaacatgtgtacatttgtaataactccttggatattcacaccctttgataggcttttgtccgtacttcctccagttataaccgtcatccgccggtttatcaacgttcacaacgttatacgaccggttattattgttattccccggattattataatggtttcgagctctttgatctacttgtgaaacgtctaaagattgacgaccatggacggcgacggatgtcgatggtggcatatggtgaggaaacgtgtctggtcgttgtggttgcggttgtgactgctgccgtggttgaataaagccggtatgagctgacgactgcagtgtaaatcatactctcgatttaattgataccaatacgaaaaaggaaaattatatgaaaaatgtccaaacaaggttgtggtctatactattcttgtcgtgtttttctcaatttttagacgattgcgtactatataagttttgagataagccatgatatttcattaagaccttattaactattaatcataagacaaagtgttaatcatgaatttatttagaaattgggttaattaaggtttattaattattcattaagattttaagaccttattaacttctaacgactatgattatcaataaaatgaacaattaaagtatctagaaaatgagatagggtttaattacctgcgggggaaagaacatgggcgaggtgagaagactagaagggctgaaaccagaagggattgtaaacatcggacctcctccggcgaacatccccgccgttgaacgtcctccgccaccaggagacaccgacatagttccgttaagaagctgagtaaacgacgtcgtccgttggttatccggcgtcaagacgtcagggaagttatcaacaaacaaagaagagacaaaagaaagtggccctgggcttagactaagcccatctccaccgccaaagaaatacgccgccgtttcgatcgccggaggtctatgaggaactgtaatcgtgggtcttgttggtgccactaacgtcgtcgttcttatcaaagatacatcgtcttcaaccgccattttctgaaagataaattactttaatctcaatttttgtagatctctctagatatggatattactgtgtgtatatatacagagagaaacaaagagacaagagtcttctgtttcaatgtctaattttcttagatcgatttcgtgcagccttgacattggtgttcaaaagtctacgggctaaacatggaatttctttaataataatattattactaatttattgtggtccaatctctctgttctaattaattttcgcatttaagctatcttttttttattagtcttatgaaaaatattcaacttgcatcttttgttattaaattattttgtttaacaggttgatggaataaccaaatttatggtgtttaacttgtaaaagccatcttagttgctatttgtacattaacatatagtaaattttgtggaccaacaatattcggttgtttactagactttttccttgttgtaaattgatgttaagtatttgagtgaaccataatcaatactttctttatattatcaggtacggaaaattatttacttggtatttcttttttaaagttcgagttgatgtcacgagtcttactatccatgttaatctctctcacatcttaaaacaacaataatcatcagaagatacaaatctaggttttatttgatattagtagtgaaatagtgggttattatattgaaaccattatatatgtgataagaatatcaataacttaaatggatcacatatatagaagcttgttttttttcttttccgaagcttgcctcacaagaccggcactacgaggcaataactccaatggcgacaaaatgcactttttagtttaaacgaatgtaagtgtaagtataatgtaattaagttctttgagtcaatggttgacctagtgggtatatgttacgttcggactttgatttccaaagaatacaaactattgtagtatactataaataaatcgaaaatatatattaggccgtatggtagagcactagagccttatgtttatcgtgtatggttctatgtagtaaaaataatgttgtacgtcgtcttgtcgatcgtataagtgttggatatagaactgtttacggttccaagtatatgtttgatcttcttttgttcactatttttacaggtcgatattaaatgtgagatatggaataggcaataagcattcaccttattcttttatgagccaaacacaaaaggaccaacttgcatttgttataatatagttcagaacatcatcttcaattaactaaaatagccaacagaataactactatgtgtggtctctctagttattgcttcaccaaagtttcgaaaatctactaatggtatctcattagcttatgcgttgattcatctatgattattttatttgtataccatatgatgcccatttgagaagaagatgaataaagttaacattagaataactactatgccatttataacttttttgttataaataaaggatttgtatgtgagatatgtgtaaatatatctccatgcagactggggtttgaatggatacaaaaaaaaaaatcctaaaaggatttatttgattccaaaatcataattttgatcattcgctaattattaacatatatattgcggcatgactttggtcaatttattgatactatatgttacaccgttcgaatcattatgagtatttttcctgtgcctaaactgaaattttgaagccgaaaattgtcaaaagactcaaaatcaaagtatactaagtctgattatacagatctaatctctttgatattaaatgacataatgaataataacgtaattttgggaatattcggccaacgatttgcgtttcataaattatgttttcggatttgctgaaacaaaacataactagtgtctgccttgcatgttcttcagagttttgagagaattaaaggaatcaacttaaactaattaactgacatttgtttttgcaatgagtatttctattttattctttttttgacacctaaggaacagcctattgataccttatgaataacggaaagtatcagttccattttcttaatcatgtttccatatttttcaaattagattttactattcgaatcgatatatataaactcaaaaaatttattttagaattcactcgatatggagttgttatggacgcaacagaaaagggaatcaagtatattgaaactattttctgaaactaaatgaaaacattaacaaaggtttgacatttcttgatatatatacggtattgtatccaaacgactaagacgtttacttaaactcgagacaagaagggtcaagaattgtaacctggttttagataattttaacatggatacatcttaaagaaattgaaatctatgtttgcaagaaaatagtcaaaaataaaaaatataatcctaaagttggggtcagagaattttaatatcgtaaagattttgatgtttgaagaaacatggggaacaaaaatcttatgaccaaaaaaacccttcaagagctgtttgttttgtcgggacgtgtggttgacttttggataagggtcaagctattatctaactaatttaggccctttacatagtcgaaaatccggaaagtaccacaacaacaataatttaaaattgaaagtgaattcttttatgggtttgaactataaaattaaacatcttcaaatgatcaaatctcgtggtcagattagtttacaatcacgtcattttcgatgtgatgaacaaatgatacaatttaaactgccagctttagtcaataaactaaatagtctgactagctggttaatttttaattattttttaatttaaaccatacaaataaaaaatctagggatttgataggctaaagtgtctaatcatggtgtccactgtttgggacatgactagattaaaccctaatcatgggttaagtgtaatatatatatttgttttgcatagtagactactagtattagtgtattactaattgtttggaagaaggtattaagcgagtcacaaatattatcacactgcaaatatcgtatatggagtttatataggctaaaaatccagattgtttggatttaacgagaacatggacaaaagatcctcattttttttcgttgtaagaaataaattttgaaacaaaatatttaattaaatatgaatataactactaaaactaaacattatattttcttcaaaatagttgcctaaaaaacgaagaaggatattcttcaaaatcaacgtaagagacttggattatgatttcaacaaaatggttattttgtctaatggatttgcaatatttttgatagtggcgtattgatctagaccaaaatttcttatcatcaacaaaaattagttactcggaaaatattcaacacataatccttttttttgtttggtcaacttaacacatacataaagacgaaggaaaaagatcaaagaagtagagaagtaagaatacttgttttttggtgtttcatatagaaagaccttggtcgatgtcaaaattcaagacgaatctatattggacttggtttatcaagtgattatttttacccattacaccataaaacgaatttgtacatagatcgcagagatagtgtggccatccttgcgtaaataaaactcgactaaaacaaaataaaaatagccaagaaatataaataaaacaagttgagcataagacgacttgaagatggagaaaagtgtggtcgttgaaaggacactaaaaggataaacgtgttcccaaacatccttttgtctttgatgtcaagtggcaatgcgacaaaattgcaacttattattatatcacctatacatgacaaaacttcaattattgtttagttactttctcattctacgtatattttgttttaatacaaaaaggtatcggagctcatttctcttacatccattatctaaagaccgttatctgataagtatcttgatatttttgatcggtgtatataccattttcgtaaaaatgtaactaaggtactttagtttggattcgaatctagcggaataaaactaccattttccagctgattagaaatttagaaaacgatcagctgtttggactttgggttagatttcttttttgagtttttttataaaaaaattaatttgtgtggtgtgagctaatattttttttttggtatttgttttgttgacagcgcaaagcgagcaaattcttatagtaagtgataaatatagtcaaatgttctaaagcaaatactaaaatgaacgtggaaatttgatcaactgatgaaacaagtcaaatgctctaacattcctttttcacacgtttatatcataaaaatctataaccatacaaaaaatgtgtgttcaagaattagtaagattttgttttattcaaagtgttaaatgatcgttcggataaattttgtagttattcaagggaaacatcagattactgtacatacagtgtcggtaccactggccaaagtcatctgtatttgcatttattaatttttgaaaaacaaaatacatatttttgtcaacaatcaaaacatacagtacatacatatcatcgatatggacaagtaccatttatgggtccacgatgaaaaggatatctaacttacaaatcgaagcccaagtttgtttgtttttttggtcggtcgaagcccaatacataggcctaataaagttttacaagattgttcagttgttttttcaacacatgatttttccccctaacaaaagcaaaagcatgaacaaacaaattacaactacaaaaaaaatcgaagcccaatacataggcccaaaaaagtttttaaagattgttcaaacaaattatattacaattgtttatttcgacaaatgattccccccctgaacaaaagcaaaagcatgaacaatctccaaagacacacacacacacccgagtgtagaatgactagagaaagatccaagaacccaacataataaaagagtaacactaaaactacaaaagagcttcactttgcgaagatatcaatcgaatcggatttcaccgataacaatcgttttctctttaaagattgttaccacaacctcagtaccgtgtcccaactgctgcgaaaacagctactggaataagaaactgataggcaaaaccggagaccgagaaggttcttcttgcactgttcttgttaggtgctgcagctggtggaggaggcggtttctcaactaaaacagcgagcttcatacctccgtaacatccaccaccattaccactaatcagatagtaatgccttgtcacattgagatgaaccaagtcccttccagctccacgactccaatttgcgatcgggttattgggattgcagcttatgtagttcgtctcgttcacttctataacgttgtattggtttctctcatatacaaaatctgaccagacacaatgagaatgaaacactatataagtcaacaagattcatgatttgagatcttactgaagtacagaaccagaacctaatctatttccaattacaaaggatgctgtgaaagaagcatccttttttttaataagaaaacagagctagtgaagaaactagtggtcctttttcaaagttgtaaaatttgaaaccattcatttgccaactgatgtaaaacgtatattaagtccgaaagcctgtgataacaagtatcaataagagttagagagcgtacagagccaatcgtcgaggtagaaatgtttgtcctgagcccaaatggtatagttgatattaggattccagaacttgttatcacccaccgtccacctcttcgccgtcacattcgtcgccgccagcagaaaagccagcaccgcccctgcaaccaaaaccgcaactctcgccatcgatcagtactctaaaaaaaaaaggatgagtcgtcgtttgtggggggggatgggtttatcgaagttcaatctgagagataaatatgtctctttttcagggaaaagatctctctagatccgtaattccttcgactaaccttcgaaattttaattaaacctcgaggttgacgaaaagtacaagataagcgttatgtaattaaccaaaagtaatattttccttttcattttggtcatatttcttaccttttttccggatattaatttcctttttttagtcatccagttggtctcaattgcttaatcataaagtcaggatttatttacttaaataacatagtattgaaataaaacgaatcttataaaaatgtgtttaatcgatgatacttttaaaagttgtaactatatacagtatactgttgatagccgttggggaatttcacattttgaatgccatgtcacatatgacaagtagcttttcgtgttctattattttccatcatagcttccacgcgcaagcttgaccaccgccattaaacttggtaatttagtataattcacatgaatgaattagtaattttgttaaaatgtgtaaattaaaaaaaagaaattgagaaagttctctaatgttcctttcagtttgaccaagaatatattcttaatttgtttcctttcttttgacgtttcaaaatgatataaacggagtaacattttatgtccacacaatatttcttgtaatatccacgtaggatgaaatatccatttaaaccggtccacgtgtccagacatcagcttctagttccattgtacaataataataaaaaaaccttacctgaactaaaaaaaaaaaaaaaaacgaactgagaagcgaagaagaaaatggcggcagcggccatggccgttcatctcccgaaacattcttcgtttcttccgaaacccaaacttccattggataaaaaaaccaactttctcggtgggtcatttaatttaggtcgacccatgtccgtaaaccgggaatttaacagtccggtgatggtctccgcttcttcgacgagcaagaccgtccttaccgatgacgtagacggcgatcaaagtaaacgcttttatattaacttcactggctttccttttcctcttggtcctttccttaaccggcgcaccatcagaaccgaggttagcttttgctccatctctcaattccgttagggttctttaatcagtcatctccaatttcagaatcacaagtcaattatgcccgaatccctcttaatttttacaaaattttgaaccttgtttgtttgcaggcggttaaaggttgcatatggatgtttgaacaagaacaagctttagggtttagcagcgtgtccactaatatacgaatgactgtcatcaaactaaaatctggaggtttatgggttcatgctcctattgctcccaccaaagagtgtgtccaggttctattttgttctcttttttttttttttttgacagtcaaaacataagttctattttgttctttgtgtttactaatatagtagctccaaagaattgttgaatgacaaagtatcatactttttgttgtcatttctctacttacattgacatgtaacacttagtggttgataaatagagaatgattgaactctattggttgtttcgcttctcttttttgtgtggcagcttattaaggagttgggagctccggttgagtacattgtcctgccaacgtttgcttatgagcacaagatttttgtcggtcctttttctagaaagttccccaaggctcaagtatgggttgcaccaagacaatggagctggccattgaacttaccacttgagtttttcggtatctttcgtgctaaaatcatcaaagacagggacttatctacgccatgggctgaggagatcgaacagaaagtcctaagctccccagaagttggtatgttcctttcagtatttcaatctggtttggttggaagatttagaaatcatactttctcattgtgtatccaggaattggaccatatgtcgaagtagcgttctaccataagcggtcaagaacccttttagtcactgatgctgtgatcttcgtcccgcggaaacctccctcgagtatcagcaacgaatccttgttggcctcggctaagaatggactagctgtgaagatacttagcaaaggaaaagacattcctaatgatcctgtggttgataatcctaacacccgccaaaaaggttagcagttcttaaaagtcaatttcctatttcttgatcttagatctcagtggcctctgtttgttttaccacttgcaggatgggaaagaatggttctgcaaatcctatttcttggtccctcgaatctcttggaaccaaacgcaagcttcgcacgaatgtcacagaagctgatcgtttctcccattgtaaagactttggtctttagcaaagtccctgagaaggttccttatctctgtttaaatctttgttttggttccaaaatgtttgttttgatttgatcatcactgatgattcaggtgagggattggatcgatgagatagcccgtgactggagatttaaaaggattatcccagctcatttcgaagctccaataaacgcaggaagatcagattttctagctgcgtttgggttcctagaggatcttctaggggaaagatatgtaactcgtccttcgctctctcttctcttcacttcactaatgggaaaagctgcgagctattttcctccagacgatatgagaactctctcttcacttgatcagttcttagtctctgttggggctgtgaaaaagacagtatccggtagaaaacgaagatgatggcaaaacagaaaaatggaagatacagctttaatagtcttaaagaatatcgaaaggccttgtaatgaaggatatatatagccagaaacaagtaaaagcttccatgttggataaagcattgtatttactaaagttttgcagacattgcctccaaccagaggcgatcgcattgatgatcaaaccaagtctaatcaaactacaactaaccatcgttcattaaccggtatataagaattgagctgaatcactctacgccaaacaaataacgtgcagctgaatccaacaatttcttcttgctccttagctcaaaacgacctcgaattttccataaccagctgataaccggtttagttattagctcttaaaccaagtgtgataaccaggtagaggatatcagaaccaatttcatcaagagttttatatttgacgtcttcatttttgataattacaacaaatttatatagcgcttagggtttcactatcgaaatagatgtttgtttgagcaaaaaaaaaaagcaaatcgtgggagacaagaagaaaaagaagcaaacgggtcggagctatgtccggacttgctgcgatgtgttttcaaacgattgagtttgatatctcttaatcgagctaaatcggtagtggcactctgcttcgagaggctgcggccctgaccaaaatcagattccatggctgattctcttctctcccaaggaggaatccaacaaacacagtagtagttgtgtgttgtacgttccggaggatcaagacaacgtttacagaagtagagaacttggtgttgactttccccagagaccagagtcgttgtctgacgacttgtggtagctggctcttgttgttgaaacctcttagtatggatctcctttagctggtgagaggattgatctacccgatagcaataagccatatttaaggagttacttaagatacgaccgagcttgttttcggatggacaataaaaccaaagattacctagttgtaatgttggagtacgactttcgtgtgtttaccaagaaaggagataacaagtggcacgactttcccttggagtgttttgaagactttgtctacactcatcaaaagctctaccttcgttatgcccattctcttgtcactatttggacccttgattggtattctgtctcttgattggtattcgttcaatcatcacgattttgacccttttcttcagcaaaaagatcaaaaactctattggaaattgatacgccgctccaggacacgcattgcagtcacagtatccggagagtttttggtggtatcaagtatagtacaagacagcaaaacattatattttcacatctagaagaaaaaccaagtgggtggcaaattggtgaaagtcgattctttgggcgatgaagcattgatctatgacatgggtatcactgttgtccccagtggcgtcccagggatcaaaaggaactctatctacttcagtggcgtccaaatatttgtgtatgatctcaccacccaaaagatggaacctatgcctcaatgtgttttctcctccataccattctctgatgctcgttgattcttcccctgctagtcgtctacctgcgcaacagcaggacagatcgcctctgttacttttaatgttttaagctttatatgtgctttaaacttgttttatttgtctctttttgctttcaattctaaatctttgatgatacattattatttcttcatctgttgttgagagttcagtctcacaattctctgccaacagagaacaacagtctacttaattcatctctaccgatgatttggagatatttctagttttagtctcacaatactaatattctggaactcttctatgataaagagggtttcaggtccattttgttcccaatgcagaggaactgagaaatagagctaaaacagagactccattaagaggaactgaatcaccagtaccttgatttattgatgatctctttcaatcttgcaacaagctagagtagagctttgatttatactatttttttttattataaaaaaaaatggttcaatactctttaattctgtatctgtattagtaaacaatctatactaaccacaagaaagaccaaacttaaggaccagaaatctgatgagtctctcttgagattttgctactctcttacatgactgaacagacgcatttgttcatcttcgggtcacctttaggcttcttttctgtttcaaacacaacaccatctctctgtcaggaggtccacaacagattttgatcctacactagaggctgctgtctctttgaatatgaaggagctaagaaaacaagagaataatctaaagaatgttttacctttttccgtaaccggagcttggatgataacgtgcattgtggtgacagcgcctgcgagattagagacaggacttcggtagtctttaaccgtcttgctgttctccaataccttccctgcgcttatcaacttcacctctttcactgttttcggcccattctccttctctatcattagtcaaacacaagagaacaaaatgacaagtagtatgatcagtacaaagagttgaacacaggttcatgttaggctcaccgataacagaacaagtaagcaatcacaggaacaggtacaactctacggatggtgagtaacattgtgcgaattgatctactcaaaaaatttgtgaagtttcttttgcataagatatagtattgggacatgattttcataactagcaaaaccattgttccaagaagattcaagcctttacaatctcaaaacacagtgcctaaggatattacaatttattagccataagagtaaataagcataaaaaaaaactgacctcttggccattcagaaataacagtttccttcaaagccgaaacagttgtagcatcagggaatgctttaggaccgatatccgaaccatcggttaaccgaaacttgatctctagttgattatggacttctgccatttatccaagaagcaaccaaccaacaaacaatccacagaaccacaagaaaatctcaaaagacaccacagcactagacagtttctctatgtatcaaattccacagaggatcttgtttgctatttattctatctgcaaagagccaaaaaaggaacaatttttttcttcaataagtgtgattgtgaagatgaacaagaaacctgagaatctatatatataatggtttaaagcaatgatgatgatcttgtaatcagagaataaatgaatcggcatgcaaaacagcaataaacagaggattctgaaaagagatacacatgtaaaagatagatagattgcatataaatgttaaaagatgagagaaattaaagaagaagaaaagagatctaaacatgaatgcacaattaaacaggggaatatccaaaaaaaggaggaaactttaaaacgaggaatctccagccagatttgaaaggaagccggaaaaagaaaagccctaattaggtctctctctcgcaggtgtaatcaaaatcttacttggtgactgatctgagccgatgaatcaagaacacgcatcagacagagaggagagagaagaaatacaagaagaagagatctcgtgagtgttcaatggcggtcaaagtttccatttttctctcattttcttcccatatatgcgcctatctctctctctctctcgattccttatttttgttcttcgtgtaaattcgacaatttgatattgatatcactacttggaaacaacgcactacttacttaatccagaaacaaattttaattttttattttatttctgttcccagaaattctttatgcaagtaataatagttagttagttacttgcatgtaaaaagcttttgcttctttgtgggacaaatcacagcaaaattaaactaaaaagattaccttttgcatgacatatatatcattttaactttattttgtaatatctgtcattcacataaagaatacaataacttttaatttatccatcaacaatcattattatctatttttggttccaaataattcttgaaacactttttattttaattagttatttacttgcatgtaaaaagcttttgcttttgtgggacaaatcactgcaattaaactaaaaagattacttttttcatgacatatcagcaatcattaattaatttatccccaccaagtttacaaataattggcaagtattttttggggtcaaatggtaagattcttacaaaagacattaaattaatattaaaaagtgtggtatttacagtactaaatagtgaatattgtcataaacacatattttcgttagatatcttatctaaaataacatcaaacggagagagataggagaggacagaggaggagataagcacattgcatctgaccaaaaatcttctgcaccaagaaaagtcttatgattgatcaattagagaccttaacaaaacaataatgtccatataaaatccctaaaactaaatcatttagtaaaaaatatgtggaattttaactgtcaaaaatcgaaccaaaaaaataaaaagagtacaagtggagcaaatgcaacagtgtgttgttggtccttggactgttgtgatcatgaccaaaatccaatttcttctggtgatgtccttaaaccttccttgttcttataacagatccaaaattggaatctttacttcaaaaccaaaaagaatctcaaaaagggtaccttctatttttacagaagaatgaatctttatttctatctttctctttctctgctgctctgcaactggtctttcatggtccagctaaattccgagtaaatctgcagaacccgcaaaatccccagtctgcttcgagattatatgcaagctttctgtttgctattccaagatatgacaattcttaatgaaatcattggagtagttaacatattttgtccagaatggtctgagatgctcgaaacctatctcaagccacggctttgattggccattgtaatgaatcactgcagctttcttcgcattttctaagttggtcttgctctgataacctaatccaagcatatgccaagaggaatctattggctgaacatgacctttaaatgctattagagcaggaggcaatgttccaagtttccacattgttagattcgacttcagattctgcacatcaaagcaaaaccagtaagcatgatcaataatttgccaatttcgaatctaaaactcaaaacattacaggcttctctgatactttacctctttaagccaagaatgatacgtttctctgatatttgtcttcctccaagtccgtagatcaaagatattcattccataagcccaagcacattcttcgggatctaaatgctttgcgatgagcgggtgagaaaaattgaagtagttcctaagacgctttgacataacccatacgtcttctcctcgacaagtctccacagctccattaaccttcccgttaaggtcaatatcccaaagcggagataaatctttctgtatcactatatcatcatctaagaacactaccttgtctaagttcggaaaaagctgtccaaataggcaaaaaaagcaagcattacattcatatcctcaatccgaacatttaaaataaaaggacagaaattttcatcctagacctacttcatttttacgaaatggcaaaattttgaaacctatacattaagagccatatagttcatttagacgagaaaggcgaactttttgaaagtaaaaggacatattttcttttacctctggtagatatattctaagatggttgagcaaagatatgtatttgggacttcttgactgcagtttcgaagcaaatgttcgaggggttgtttcgctgaggtttgcaccagcaatatgattcccatggtaataatttctgatactgttatggctttccacagcttcaagaactggaacattctctcttgttaaccaatcaaactgatgaacgcttttcacttcaacaatcgcaggagcaacagaattgagtgcaaaccaagaatgcatacccgcataggttttcttgtctgtgataacatggaagacaattttctcgggttttgaagatgattgaacagcagatgagaccacaaccgatgcagctaagatattatctgtagctagaacaaaatggtggtaagcattgtctgagagaacagggagaagctccggggaaggaagctgtctccgggcatgagcattggaggaatattcatcggttagtcttaaagagagacagtgaattccttttggaattgaacttgcagcaaagtgcttgttcatgagttctgcaaatttggattcccttaaatccctttcaaacttctctacctgttcaaaaagagtaatcaaatcaaatataagtttcggatcaatctacaatttaagcttttattgaagattagagaatgtaccatagctcgaaatacgagggcaaatgttttagcatcatagtggttgttcttcatatccgaaaccagttgactaaaagactctggaagctttaaaccatctggaatttcttgagtgcttacttcatttagaattttgtaaaaatctctaactagtctctgctgcaacagaacgtgtgaaaagaaaagaaatccggacttaaacatactgatacagagagttttagatcataattcaaacacctgaaaagaagcaatcactcacctctgaatcatctatcctaccaagaagacgtggtcctagccgcctcccgaaacaatctgagcaaacaggaaaaaaggcaagaaagtttcagctcatcatcacatgagtataacaagggatttgggttgcaaagctaagcatacgaactataaaagtgaaaaaggaacaactctaagattcatctcatcagtatttggttctgatctagtaatactgatacaaatctgtaatttttagttcacacaaacacaacaatggaattctcaaaaccttaacttgatagttgaacaaaatgccattttgccatgaaatctgagctcgaagcttcatactatgatacaattgtaactcaactgatacatattcatggataccaaataagaaaaattcaaatgccgaaactttgttgacttcaacattggatccaaacaacttaacaagatgcaaaatacgtagctgagcaaacaacatttaggtggtagatccgacggaaacaagtgcacatcaacaaaactagaatgaaactagaatgattgaaggagaagaaaagaggggttaccaaaagaggagcacttgttgacaccttcaagggtaacaacagcggttaggatgaaaacaaaaggtaacaagaaagcgaggattaagatagtgtggaagagagttcggtaagagatgtgacgagctgcgactttgatcttcatcaaatcaataaactcattgctgctcgatatcgtaatgcttctcatgctaggcgatatgtgaagctgcatccttgttcgtgcagccccgctgttgtattcagatcaatcgaatccaataaaaccctaattccacccaatccccaaccaaacaacatcacctccctacgcgattcctcttcttctccgatctcgatgattgcttttcgattctcgatctagtcgtagctcccaaatccgatgatgttagactccgattcgctcttcttataatttgtagtcttctctcagaccgcatttggatttacgacaacccagcaaaattctgaatttgagattcccgccgtctctttgattcaagaaattcgatacgagaatcgaaatgggttgtcctccgaattcgtgatacaagcaggatcaaagacaaagcaatgagcttgtcaaagaagaagaagaagacaaaaaagatgagaggagaagaagaaaaatcaagccttttttttccttaagtgatttcgccggtggatctaaacaactaatgcacgcacagccgaaaaaagaaaagaaaaaaaaaacgtaattaataaaagatctcaattataaatgggaatcaaaattttaattctaatgataaaaccgtgtttgagattggtgtcttgaccttgagtttagggtttttgtatattgctaattatagattctttccgactttcatgcccaatcgaatagttttgctctttttctttccaaaaacaattatctaattttgatagaaagtttgagaaaatatagatagactaataacgtgcaaatttttcagaattctgatggatctgatattcctataattaaacttgaaataagtgtttttgttttgtttcttatcgacgtaaaatattttcttaacagctgttttctttacataaatagaaataagtggctgcaaaaagaagaagaaaagtatacaattaggaaactctaatattatttcaacacctcacaaatatttctgaaaactatcgtacgattatctttctgtcgtagtcatttaatatacgcaagaaaggaatgtgtatttagtttcatttataatgaatattcgtcatactaattttgaaaagttttaattttaatgcgaagaccaaccgacacgatatgatacggtcaaaaaaaaaaaaaaaaaaaaagatactgtactttttccagtatgatctctcaacttaaagttgcaatatcattaccaatatattgtatagttgaatacaatttagaaacgatttacgagtttttatcatctgatttgtttatgattgtattcggctcctcaagattttgttgtaattcaaaatattagtaacacattcaaaatgcacaaacttaagggaaaaagatttgaaagaacgattaatgctaaaaccataacacagctacaagttgctgtacaactttgaataccaaaccatttgagaaaaccaaagacgaaacctctctacgtatgaaaatacaacaagtcacaactccattagacaacaacaacaacaaaaattccaaaacttcattattcattagaggggatcttcttcttcagtactcctgctcaaatattccactagtaaccatagaaacatccacatggaatctaaaggtctctccatcatttgctctcgtgtggtgacacttcttgtaacctcttaaagcatgtactgacctaaacagccttcagcaaactctgcacttattgtcaacgtcactgaaccattattaatcccagcttcagcttctatcgattcttctctgcatctcttggtttgacttttggatttgtttctcattctatggaacgtctgatgaccaccaagagtttgataagtcgagaaaaccttgtgacagagcccacaccgatgctctatattcatctcaaatcctgatactgaatcttcaaatgcagtttcttgacgaacaagtttctgttcgttatcagtttcttctctaagtattcttgctccagcctgtttctgctgacccaattcatcatcttctctgcccttcttgtttgccaagtaacccgaaagctctttcgatgttccaacagatgctctgcttatccccacaagtttcttctgctcattactcaaaagcccatattcaaagtctccatcttttctcaaattcacctctggattcgaatccagagcttcaccaacaagtctctgctcatttctcaataacccgtcttcaaattttctctgagtcgaacccagagctttaccaaaatgttccaaaccattcacgaactttccaccactcatggacaagagaatcagagactcagcgacttctaataatcctccatcatccacagaaacaggaaacatagtacacgaagaagaagaaacagagaatcgaggaagaatcttcttgtacctggaaactctcttcgatctttttctcctctgcacaatactaaacctacaaaacaggcttcttcttgtagattcttcagaatgcgtcacttggagatgattaaacagacatttctcgtaaagaaaccctttcccgcattctttgcatcgaatcaggatctttttatttctcctcctcctcgtacagaatcgatgatcgagtaaagatttctgggttttcttcgggttttccctcaatccgtagttgcaagagagctcttcgtaatgattcatagattctctgaagccagtcttcttcatgagatttctcgaaactcgagaggttctgagcttcttaggacggaattcgaagatgggtttctcaaattcttgttgttcttccattaaaacgaagcttgttggaagacgagatgattggcgaagagtatgagggtagaaatagttgaaagaatcgatcttccgttacttttctcgagaaaacgcaaaagaaatcgccggagactgagcaataactgttgagcaagagtgatacgtaatgctctgaatcaatcggattaagaagaaaacaaaggaaatttttggtttttcgtagttctctgggaaaatgagaagagaggtagagagtgagagcgagcaagagagaaagtggaaacagagagatcaataagcactgagagaagtgagagcagctacggaagaagaaaggggcactttcgtaaattgctttgcctataagaagtggaggagaacttttgtttcagttagaaggttcgacgtgacaaatggtgactgctgtggcaaggctttgggcttttcatttgttaaggcccttatttggtgacttgatcttattttgtgaatgttcaggctgaagcttgtgtcattataatctcacagctatgtctaacatcaaatgatcaaaattatcaatatcacagcaacaaattattccataagacattgaagaggaatcatcacaatgcagaaaaaacttgggatctgggtcacatgctcagctatttttattcaaagcacttaaataaacatttgaaaagaagagaaaaactaaaacaaccaaacacacctctctttgtaagtttgtgtaattcatcatcagcagcagcacaatgcggtataagtggaatcatcaggccttgacggtttcttctgcagcagcagcattagtctttgcttgcttctccttgtagtctctgaccgcggacttgatagcgtcctctgcaagcatactgcaatgtagctttaccggtggcaacctaagatgcttagcgatttccctgcaaatttaagaatcccaaaacaatgactcattcatcaaaatgttaaccatatcactagatttgggatattccaagcactagaacagagttagagataacaatcctgacgatatatctaagagacatgattttgatggttaaaaggcacttacgcgttcttgatggtcataacttcgtctaaggttttgcccttgatccattcagaagctgaaccaaacaaatatacaaattataacctgtctacatctacctgactctgatcatgagcctcttaacgaatcgatcaaaattgaaaaccctgattcgaaggcataccaacggaagatgaggcgatagcggagccacagccaaaggtcttgaatcgagtatcaatgatctgacctgaatcatcgaccttaatctggaggctcatgaggtctccgcaggcaggagctcctaccaatcccgtgccaacgttagggtcattcctgttgaaggagccaacgtttctagggttttcaaagtggtcgattacattctcgtggtataatcgacgacctaaccctagaggagacgcctgtaaccctaggtaagcctttctcgacgtttgccttagcatcatcatattctctctttctctttgccggaatcaagggcagttttgttatatatgcgatgtcgaggggacacgtgaacggtgagaattataacaaatattggaaattaatcatctcttttattttccacgataatcagtaatcagaatcactaaaagctttatatatgaaaatgtagttagcaataataaccaaacctagtctcttgttctaaccaacataataagtataggaaaatatctcgtcaagaagaaacagaacaaattatttgatataagcaacagagagaaaaacaatccaaatcttgagaaagggcaaagagtctgagctaagcaagagcaggcatgtgccactggtccaacggcttaccaatagagtaaacaataaaccctatcttcctcagcttctctgcatcaaaaacatttctgccatcgaagacaaacgctggtttctgcatgttttcaaaaatccgctcatagtcaagcgtcttatactcgtcccactcggttaacaagcagattccgtgggcgtctttggtggcagcgtaagcgtcccaagcaactgagacttgtttcacagtggttggactcatgggttggaggtgaagtggatggtcccagtcgaatgtgttcatggttaagtctctttggatttgttcttccgtgacttgtggatcatagatgctgattcgggccttgtctcctaacaaacctttgcagacgtcaatggctggagtctctctcgtgtctttcttgaaggcgaactcgaggacaacaatctttttgttggaaacagtattgaacatcgatgagacaatgcggttcacgaaccggtttttttgtataacaatcatttcagatcagtttaacaattgggtttgggccagcccaaacaaacatattagattccagcattaaactaattttttttgaaattaagcaattaatcgtagtaattacgaaaatccagtaaatgactgagcgagccgttacatacaaagtcgagagcttcctcacaagtcgcaacggtcagacaattccctcctctccctctctcttcttcttcttcccttcactcactcgaaaagacaaaaccctaatttctcacatttttctgctctcatctttcgatggagtcgacgaatttgaagaatgctaaacacgagactctggtgatggatccgatcagttttcaatccaaggctcaagaggtttcacgattctccgagaattctaaccctaacttcgtctcacactcgactccactcgagaaatcgagtaaatcttctgcgcagaagaatccgaaatggaagcctaatcctgttccggcggttttctcaccacggaatcggatcagagagaggaggttcgtggtggtgaagaagaattcaaggaaggagaagaatgattccgcgtctgtggattgcaaatgtggagctaagaccatttccaatatgaagaaatgtgtctgtatagcatacgaaactctacgggcgtcacaggaagagttcttcaacaatcgaagagaatccgtatcagaaattggagaatccagccagaatttggaggatggaaatgaacaagtcgaatttggagattctgatgaaactagggtttctttgatgaagaggagaagagaaaaagtattggaagaagcgagaatgagtatacctgaatttggtaaagtgatgcatctagttaaagcttttgagaagctt

SEQ ID NO: 1027 - DNA, 140064 bp, Arabidopsis thaliana
aagcttaactaaacataaattcttcaaacaattctccaacgtttactgatatgagttcctaaatgtagtttgtgagagatcaaagctaccttcatgtgaggcagaacacttttttctgcagctttggctattcttatgaaagatgtgcaaatctgcaatcttgcagctctagatgtactagtagctggatcctgccaaagaaacaagctattagataactcatccacaccttgacatgtgcaatgtcaaaaagttgaaaacgtcttatttgtatatacgagcgcatgtatgtaaaataaatacaaaaataataaaaataaaccttcacaacgtgtggaagagaggtgagaagctcaaataatttattgatgagacttccaactgcatctggaaaatacttgagaaagggacccattgcatccagatagtggacatgcactttcataagttctggttcattccatttcaaagagagaagctgctgaagcaatcctgggccatcaacagcacaataccgagtattagtattgtacaagcccagacatagtaaacaaaacttgagaatgtgaataaatgctgcaatataccctcaaatattccacgtaatgcataatgaacttcagaacttccaccagcaaactcatttgatccatcaaaaagcgttgccacaatacagtcaagtgctaattgctggctgtccatcactgctacatgctgagaatgtttttaccatgagtttaaataagaactggatcatcaaagaggcctccatatagcagaaatctaagagtgcatgtttgtcaaaggaagtcaacagaggaaaacaagtgctcgagacaaaacctgaagaggagctggagaagccaataggtgcttaatgagtgtaatcaccctttcagatattttggtactggagatgagaggcttgtgagaagcagtaagcttgatcaattctagctgcacgaaagaaagaagtttctagttaagtgtttttctggaaagtaatacccaatgcatttgattcaggaacatacaagctttgatcggtacgggccaaagtctcccttcccttcaaattcatcactccagagttctaggggcccaagcgaaagagcaattccagtaggaactttttctttcttgagcatccgctggaaagatacgtccagtatagcgctcgagatgtcatcattaataagacttaaagtctttttcttttcactatcaacctggcttgaactatcatcaccgccagttgatgatcccccaccacttggataagtcgcagccttgggttttggaagtaaatcccgcatcagtgactaaaacccaaaaggaaaaagacgctgaaattagcagcaaatatgtctgtcttagaaatttcccaatgaagaaggttggattagagaagaccacataccagccaaaagagaagtgcctcgaagtgaaggcccaacttgaagtgttggaaaaagccaagcatctataccaatacaaacgattaaggcaacataaacacaacatgattattttgtggggaaaaaacactactaatgcataatattattgctaacatgaatagaacgattttaaagttataattggcttagatccctcaaaatatatcagcaagcattcaaaatttagtatacacttggaatcgggtcattcaagaactaaaataatatctcaaacttattctgtttcagaatgccattgcaacacagacagcgggtttttttccaatataaattaatagctccaccttcttcactgaaaacatccatttaagtatcaaaataacacattaaaaatacgagatcagtacctgctgaagataaacagccataacaccaccatcagaagagatgctttgcaagttagttgagcctaaagaggccatactctcacacatgcatacagcaaaatcataatcattgtcatctataacgctagaacttgaggaggatctacataagaattctctggaggcattcgtcagaatctgaaacaaattgctaattgcagaatcgaactctgcagtagaagcatcactgggtctttttctgcagacaagaaaagcaaacaaaaattaaagctgtctattcgtgctcacgtaagcacatcagatcaaacaacccagttgcataccttgagcagacgagtttgaaaacctcacaagcatgaagacggaagtcagaagaagaaagtaagaagctgcacctgttatgagtatccgagcacgtcatcagcaagatataatgcagggctaatatcaatataacaatcttcttaagggtgtgaacaaaaatcgtacccactaagaattccatatctggcaagatctggaacaggagcccactcagtgtatgcaacgatggcattcaagcaagctataactacatctgcatgctgttttgccaagtcaaagtgctgcataccagcttcactcattgcagctccaaagtgtctctcaagaagctgcatttttggtatattcagcaaattaccacagcaacaaaacaactttactgaaaggaatttatcggtggcatacattatacaataaaggcaaaatctcaggcaacgattgagtaagtccccgcaacaatagcctacgcctgtcacctgaagagatgtccaatacagaagttagacaggaggatgaaaagatttataacccaaaaagtgatatgcatttttggattgagtataactaaactgaaaagcataaggtgagcacaaaaaattacaagactaacaaatattagcatacgggtctgtccataaccgattcaatttggcttaacctaaacttcaagattagaaaaagcttccccctgtggacagactactacgaaaataaagtgtatgctaatcgtaaataccttccaagtcgtcattgtaaattgtaatatcttcaggaagccatctaagagtcatcaataccaattcagcctattgtttaagaaaagaagatgggaacactttcaatgattgccgcgataaataaaacactaaagtaaataaatgaaagaacattttacttgtaaggggccctgagcagacaatgaagttaataaagtaaatatctcttgccaacgatcagggccttctcttctaacaatctgcaaataagataaagatatcaatctgagaaagtgaacgggaacaagtagcaatgatcatagcaagtgaaaaaaactcggaccaattagaactcttacctcagctacaagggcagcagactgactcttaagaggccaattctcgcttgcattagcaacctctgacattagttcgatagaaagattaacaagacccctgcactccggaggacttaattcgtcccatcgtagtctaaccaaatgctgcaaaagaaagatagcttcaccataaggtttcttctatgctcttgccttcagaacctaaaattgtgatttataagtaaaagaaaataaaaaatcacaaacctgtagcatcttaaaagcatggagacgaatttctgaagaccactcttttttcacaagatgaaaagaagtctttgccaaaaccctgacatctccagattttacctgcaagtatttttcaaagaccgcacattactcaatcaaacaccatcataacagtgcaccaactttcaacagctaattgaacaaaattaggttaagataataaacaactcttccgacaacacagttttatctttctgaccaaaaaggtaggaaatttccaattagaaccaactcgagctcaatcaatcaatcaaatcagacaaaaaaaaacgtttgcgtatatgttccaagagatcaaatcatcgaaacgaataaaaagctcaattttttaattaaaccccaaagtacaacaaatcctcctttaagcttgatcacaccagctacatcatcattatatgcaacatgcaacataagtacgcaaatcgattacagaaaactaaaagcgagcaaattgagacagaacaaattacagaatccaggaattggaccgccgatttgcgagtgtcggacgtggagctgaaatcgacgacggcgagaatcgctcgagccacattacttgccgtggagttgctatcttccattacttgcgacgaataattaccaaaagtagagattcccacactttcttctgcaactcgtcttgcagaatctctgatttggctttgggttttggggtttagagcaaacgcatcggtagtttcttaatagaaactctaactattaaagacaagaaaaacaaataaaaattaaaataaagatgagagagaatctctaaaattcctaaatcaaagatcgatcctataaattcacattagtggtttgcatatattaaataaatagaatataattataaaattaaaatattattattttttgattttgtagaaactttcacgatcctaagcgttggagttgctcttatgtctctaaattaataagttttaggtctctctatatacgaaagctacgatttttattggcatctataccaatatacatattttcaatttcaaaaacatttatattacgtcaactcttacaataatgacgtaggcttctagaacaataaatataaggatcaaataaataatttacatagaatgtaaattaattcctctcatttctgtgttttgtcaattctcttgtacaatacacataacaaccaaataaagaacatataacccaccaaaaagataaaatttggaattttgtttttttctcaatctatcaaaaaggaaacttttgaaatttggagatgaataataattattatctcaaacaacgattcttttgcctttgaccttagaagccattcttctctctttgttaatatcgtttcttctccttgtggttgagtcaggtgctccaatgggagccaaagggcctgaccaagtttgaaatggctctttggagtatgatgatgtgaatgagtttgtgctatacggtatctctgatggatccagtcgccttgaagatcccacctgaaaaccgagtgacccgtcttgatgcggtggaggaaacttctcgctcttgctctttgcattcgcgtgtgtgatcatacgcatcctctgttttaagagaacaagttcaaagtactcaagacattaaccaatcaaagattcacttctttttttgttttaaattcttacatcaatgttagactggttctcggcgttggcttcaggagccggcattgctcttggggctcgttctcggggtctcattcttcttccgctctctccttgggccttgcgcgcttctctttgtctgcagaaatgaatacatctctcaagcaaccatataccaaaccaaaacatattctgactaaaactgagattgtaccaaacctatccatactagaacagaaacgctttacctccgatactcttcgtctcgtctcttggcatcaatctctttacttggaggatatttcgggagatcagaaggttgacatgccaatggctccgtcgtgaagaactgcacaacaacaacaacaaaatcggccatggaagttttaaccactatcaagtcacacgcctaaagattcacaagttccaagcatttttcattcttagcgtcactctcatttctgtaatctaacttgatacccctaactagtttgttctattcaaagtttcaaaatttccattgcaaaaaacttacatcactcatcaacacatctgtagctgtctggcgttcagctggatcgagcgctagaagcgtatcgagtagagaaagcgcctcaggagagaaatctttgtaaacctctcttattcttctcttatactgtggtaaaggcttgtgatgagcatgcttatgagtagaaggaagtctaatcttcttccaatattcttctgaaggcgatccacataacttatatatcctatgcaactgctcgacctgctcgtgaacattaagccagttcacatttcatatgaaataactcaaatcggaaagaaaaagatcattacttgagaactaacctcgttacgacctggcattatcgctctaccagctaataactcagctaaaatgcaaccagcactccacaaatcaactccgacactgtactcaacaacaccatgaagaagctctggtgatctgtaccataaagtaacaacccgattcgtcatctcttgcctcttactcgcatcaaaaaacgttgcaagcccgaaatcacctattctaagaactccaccgtcatctataagaaggtttgatcctttaatatcacggtgtagaactcctcggttatggcaatgctcgagccctgaaagtagttgcttcatatagcatttaacctgaaaacatagacattattaacaaggttaggatctgcctcggattttgtatttgtgaatctatttcaccaaggcctaacctgttgctcagtgaattttatctccgggctagcggcgagaccagctaaatcatgatccatataacggaaaaccaagtataaactactcgacatcctcgaagtaaccaaaccttccaatttaatgacattaggatgatccaatctcctcaaaatcagaatctctctagccataaattttaaactctcccgttcattaacatcacaccgcactttctttaaagccacaatgtttcctgtcagcgaatctttcgccttgtacacattactatacgttcctgatccaatctacacacacacacacacataaccaacaaacttcaattacccaaaatcattgcaaagaacaaacaaaaacagattttgatctcaccttatcaatcttctcaaaggaatccgcttttcttggaagccatccgcttaacgcttccccacaaacttcagacaaccacgagggccatccagcagcaacttgctcaccgagcaaattctttggcgggttgctccgtctcgggtcaggaggcttagacctttttctttcgcctttcgatttcctctccttggcctcagtcacaacaaagccattctctttcttctgatccacaacatcttcatgattcctaacttcctcaccattagaagcagaagcaacaacaacagcactagtgctctctgttgtttcggttttggtcacagacacattgttaacttgatgtcgattagactcaatcctagtactaacttcgtctctagacccagaaactgatcctgatgatccgggtcgacccaatacacaacccatctcatcaaacaaaccttcatttgctcaacatgtttctaaaagagagatctctgactcaatcaaacctctttgaatcaactttgactgcaacacacacacatacatgaaaaattgaaacagaaaaaatcagaaaacaaacaagaaaattgattccaactagaaacacatcgaagatcagatttgactaaaacaggagacttagagaaaagggttggtgaaatttacttactttatgatcgaggagaagcgaaattctggaccaagctggtcaaatctgagacttgaacagagaaagaaaattaaaccctagttttaagacaggagacaagtcaaaggaaggtaaagatctgaaacttgtttagaatttagacacaacacaaagctgactcaaactcaaagagacaacgaaaataggaatgaaatgagggatgatttcaaaaactccacaaagagaggcaaaaagataaaggaaaaggaaaagaaatggagtccaagaagattttaaaaatgaaacctttaaagcatacacaaaaaaagaagaaagaaaaatcaattagggctttggagaaaaggcaaggtgatacatacacatatacaacagagtcgtagaccaataataactctactattgtttaagaaggaagaaagagaccaacttgggtaaaaatgtctcaaggagaagaaggattcgttgaactgctcttcgaattttacttgaaaaagaactctctttagttttctgcgaatcagacaagaaaaaggaataaatagaaacagacgaagatctgttggctctttgttattattattattatgtgtaagtaattgtttttggacgcaacaccaatacggtcaaaaaggctcaaagttactactcttcttcagcccccaccaacttaaaaacctctgagcaccattttgtactcatttcttctctcttttctctatcacaattttcaattttaaaaatttgtggagtactataagtctataaagtttgggggagattttaatgtgtaagaggtccaatggtgttaaagaagtggttttctcaatgacattagaatattaaaactgatctataattttgttggtcaaaaacaatatattacttagcatatgtaaagaatatttggtatgtacccacctaattttggaatttattattaaaataaacactaagagttttttttaatattaaaataggaattggaaaaacaaataaaataagaaatatggtatgtaatgagagtttacttcatctatccaatcaaagaagctcctttatcaagactctattgtaaaccaaacaaggaacaaaagcttaaggaactaatgatttacgtctgtcctttagaattagccattttatttcttttatgacttaaagctacatatattatctatttattcattcattcccagcattattgctaactactatgtattcttgtagacgatatactaattttattgacctcattaatttgattaaaatcttgccagacaataaccaaagataaacatgcatagtcaacaaagagaaatacgatcatgaaaaagatactaacgcctgtaaaaaatctttaaaatcaaaacaaaatcaaagagtattttatttggtgaatctacagacacgtttagtagcaaaaaactatttgattttttcagaatatattatttttcttcaattctttcctcttccagatatatataaatcatgcaagaagaatattgtacaactacaaactataaattgaaaaaagagttccaaaattaataatctagagtctggaaggctagaacaaaaataaagttcgggtgaaaaggatttaaatatgaatccatcattcaaaatgacgatttcagaaaatttaagtttcatcttaaaacacctattcctctagataaaatgcaattcaacaaaaacagttattaatcttacactcaagagatttctcaaaatcggtttctctccctcagtccttactcttctttttcttctctttcttatccttcttcttggctggtgtctccgttgtttcttcttcctcatgctttctcttcttcttattcttcttcttctcctcctttgcaacctctactacggcttcagtttctgcttcagctttcttcttcttctttttctctgatggctcttcctcttcgggtttctcttcttctaccttcttcttctttttcttatctttcttctttgatggctcctcagatttagctgaggtttccccaagaagagaatctgcagcagtgttgtaagtctgcacataacaaaaaacagtcaagatcacttcatcataatcccaagaacaaagacaatatgtacacacatccaaaattagaagaaaagatgatgaatcaaaaacagagagaatgatcgtgaccttagcaggagtgataagaccgcctgatcccatctttttatccttgttatagacttcaatcttaggtttgcctttagatgaaccagacagacgacctaaatcttttccttcaagatttctcaaccgcgcttcaagctgtgagtttttaacacatatcagaaacatcatcagttaagaaggaggaaaaaagattgttcagagagataccaacaagaggaaagctattgaagaattttgttaccttagctcggttttcaaggcccatagtgttatcttggctatcaccaagagcatcaaccctaatagcaagaacagttttagcagctaaagaccgcgagatctttcccttgtgctttggtgctgcttgaccaaccagagatgcgtgaaaaatcaaaccgtacttgggtgtggcgtgttttgtcttaagagctctaaagagagctttttcggctccgagtatctgaaccgtgctcccaggttgcttggagaggttcaataaactacctccatgggaaataagacgagcaccaacaagctctcctaccagggcagtcagattgggagcaatagtgttcattctgctctttaggtaatcgtaaagctgagctctgtactcagaaagagagagaacctggtcacagagttcacggatgtgcaacaagtctaagtcactgacttctgttcccatggatatcacagctgcgtccttaagatctgcctcaatttcatctgctaagatctacaatgaaaccagaaacaggagaatattaggtcgttaatcaaggcgtttgttcatggaagcctctacacagtttacaaaattgaaagttacctcggagaagtctagcttagcagcattaactcggtttcccatcaatttaacagatttggcatataggatattgtctgatatgatcttagcaagctcgggaaaatgccatccataccattctctaaccctcatggcgtatgtgttcagctctttgtcaagatcatcaagcagaccaatagcttggataatcatggtatccacctgacaaaaactaaacagttaggagatgcaagagaagcaaaaacaaacacaggaaacgtttaatgtcggacaatcaaaggctagttcaatacagaagttccataatttaacacaagttagcttcgatcaattaacaaattcatatacttcacatatcatatcaccaaataaaaagaccaatacaattagtcaggaaccgaagataccttgtcagaactaaactttagcttatatctggcgagactgtgagacagacccaagctcataggagccaagtcttgatcacccaacccagatatgagttcagtaaactgacttctaacaccacgtagaagctccataacagcattgttgtgaatgcaatcaattttctgtatgaaattaagaactttcattagaaacaaaacacagagcagacaggaatatgggtgtaatgatgggaattacaaaccagtttctccttgataacattcccaagctttgaatcagccacagccaaggtttcaccttgacaattagctttcaaaaacttgcgcagacctttgcttggagctccctccagcaatttagccacagcttcgagagcttcagatgtattgtcaaacttctcaaaagcttttagcttaaccatctggtacaccaataaaaacatatgagaaactcaacactaaatctaattttagatgttctgaaaccacacttgatgaagaagcaaaaaaattacctttcgtgctgagtctggagtgtcgaactctttacacaaatcctgcaaaaaaaaataaaaaataatccatgaatacttttagagccttaaggataagcaaagagagtacaaaagaatgaagagaactcacctcgacgttagccatctttccttcatctttaactttaaagagggcaaaccccgccgctgtctcgtatagcactaagaccatcttcacaaaactcttaagctggacctgaagagaaaattaagacaacacttaactcagaacagtaaagatacgtgtccgagtcacactaattaaactaaaagttcgttttgagattaaaaactagcgagaaacagcattccatataaaccctaatcctacttttagatcacataagaaatacaggagaagaaaaaacagagagataaactacaatagccttaaaactctgtccgagtatgagtattcgaaactccacaatctccagcaagaatggaaaagtgaaacaccgtgaagagagaagatgagagatattaaatacctgaagagttaatcaaagcagctgcgtgagagagaggaagaagatgaagacggagacggacaatcacttagggttttaagagtgtgttgttatagcagttaaagacgagccgagccttcttaaaacgccgcgtattgtaaggggtatttctataacttccatagttagggtttaggttttaagattaatgggcctgactgaatggatattttaatctggcccgtttataatattaatacgtgggcgttttattgttctcttcccccttaatagtttttcttttttaatccctttgtttctctgtggtattcaacaaatttgtctcgaatttatagagctcgaagcttcaaggtacggtttcaaattttctcgttgattttctgggtagatagcgttttccatacttctcttcaactttatttcatagtatagctctgattttgctaaaacttcatctgattagttccgtggatcctgaaaatcacgattttgcgtgttgtttagggttatactctgtagttgtgtgattagtgtttgaagaagctgggctagtgttcgatgtttacgtcgataacctaattttgcaggaagttataatggctagtgaagatgaatcgattgaacaaaaagctgctgctcgtaaagaggcacttaaagctctaagggcagctcaggaactgtctgagaccaaggaagacggagaggatgaagctgtcgaagaagagtgagtttgctttgttctttgcttattttgtttgtcttgactagcacatggagttgttaatgttgtgtgttggctttagcataactaggagcttctcttgtgctttgcttctcgcctttactatcactgtttgtgagagaatcaataatggtgctcttgcagcatctgttacctaacaattttttccaatttcaagttgcattgttgtgtatactttgcttaggtggttggttttgttgattgattattcgaggtagattccctttttattcatatgaattgtctttgattttacagtggtccagccatgaagtttagaaactatgttccccaagctaaggagcttcaggatggtaaactagcgccaccagagctacccaaattcgaagatccgatcgttgcacttccacctgctgtagagaagaaagaggtgtgtgtgacagtttttcttttctctgtacaaggatcaccaaaagcgactctgtttagcattgttgtttcctttacttgtgcctcttaagcttacaaaaaatgttatcattgtaggacccatttgttaacatcgctccaaagaagccaaactgggacctccgaagagatgtgcagaagaagcttgataagctcgaaaggcggactcaaaaggcaatgcataaactcatgggtaagtggcaactgtatctacatactgatatcttctatgtaagcttgataattaagacattagtctgtggttcgtgagtaagtgagtaacatttcactgaatctgttggtagtatgataccaaatcatagaagtccaaaatagagtgatctgttggtgtttgtttattatggaactaacacatgcactttcatcatctaattgcagaggagcaagagaaagaacgtgagatggctgaagctgatggtaacaccatagaaagttgaaacccaacgacgtcatcaaagaaagccaccactgaacagtatattctactcgattttgtttaactgttaaagcattcgaagtgagtagaccatgtaaaatcctacagccattggcatagacatagtaggtttatcttcttgtgtgaatcaaagaaagtcgcaatttatttccgagtagaattaagtgcggtccggtttttctctaaatttggttcaacatcggtggtaatctagtttgatcattaatggaactgcgttttttggtttgattcgatttactgtggtttgataaagacatcccaaactagaaaccaaagttttgattcgggctagacgggtttagtttggagtctgggaaaacaacacagagagcttctaagacctttcttctcggcatgttgcttccacagtgggatgatggagtttagatacaatatttgtttattaataccgaacaatcaaaaatagatactaagtttttttgttttccaaagctcaaacctaatgtacaaattcagtaaagctttcgacaccatctcacctaaatatcttggacctttattggtgcccacttctcatgaatccaagctccaaagaagagaagctaagtaaacactaggccaaggtaaaccaagatatatgcttttcgaaggaacaagcaatgaaaagctatagacttccatgtgattaaatgcaccagcagacagatcccaatctgtagagcaataaatgaatatggtgatattcaatttcaaggcttcgatcaacataacattattgttcctatcatttgtttcaaaccaaaaagagcaatctacaaaggctttggtatcaggagttgtgaaaaagctcacatgaaaaatctaccaactcaagtatctctatttttctttctgatgaaaatacctaatatgaaatcaccttcccaagtaaaaactgtcaagtagatggagccgctcaataaattttatcttgacaacacaccaacataatgcattaccacaagttttcacctttttctaatattttacctcaaaagttatctagctatagccactctgtagttgagaatcagatcctcaggtttcttccatacatatgcccgtacagttgctaaactcatatctggagataagacctgaaataatcacagagaaacagctcgttcagcctcatactgcaaacagttaattgaaaccagaaacagggcaatagttggatctcttgaagtctgacttgcctggctattacataagatctcaatggaaggtctaagtttctgccaaggctttaatccagactgtaacaatccatttcctgaaaacagtggctgaggttgtcctcctgaaacacttgctgcatcaatagctagactatccaacggattgtcaaggaccatcttttccacaacgtaattggtaacctacatagacatttaagaagccattgaataacagagagtgcaagcaaaactacaacttaaaattacagataaatgcaccttgtgaactcttaagatccggggtgcactaagtttccctagtgtaaccacctgcaccgatgaaccttcacatggatgcaggaagaagcttaatctgtaaatttgaagagctttcaaagtcagacattttatgaaagaagttttatctatttataaaaaaatgtaaaaacatatgtgatgaaattgctaaaagtccaaactatttttttttttagagaacaaggtactgccgaatactttgtattttctctaggtggaagccgattgttcaagacagcgtccaagcaccacaatgggaagtccttctcatcttcagttccagtaaactcggttatcttcttcctccatggtcctccttgagaaccctcagttatgatggaaggaggggagacggaagaaaactcgaatggaggatacaccggatcacttgcagcactactctcttcagtttttgatgcacttagattttttttggtatcttttacagataaagtatctccagaggcaagaacttggggttttggtttgtgtttcttctttgccagccagtgacccagcaggcctttcagtgtttcacgagctagattaatctacaaatcacaagatccaatgacaaaattaggtttactttgactaggttagagcaaacgaaaatctaaaatattcaattatggtgaacagattcaaatattaattgcatacagagatttattagtatatgcaacagtaagataataataaaatatctgattagattcaacataactaaaatgcaggcaattaatctaccttatcatcttcaggtcgcccagaaactttaaggtctgctgaatacatttcagcagagaagcattgtggagtctccaaatgtacagataagcatccaagtcgtgtatccacagtaaaccacgatggaatgcttacctaagaaagtaatatgagcaataagtaaacaaacctgctagcctcactaacgataaataaattataacctttgaaaatcgatcaagagacttaccatctcaaacagttcttctttcttctcttcaaatgaaatctgtaacgatgggaacagatatatttctctgacttagtacttctccatttgcgtttggagttgaatataaataatattccagaattacagcggcagatacataaatcaaatatcagaaactcaaaaaagatgtctatgttccataaatacctttccatagtcctctaccacaacacccctagttatatcccatagtttcactgagccagctgcgtcctgcaaaagaaaaaaccaaacacatatcattgacccctctacaaaactatcaatggtggtctcttacaagagcattcagagaaatctattttaccttggttaaaatttgccttttattattcaaaatctcatgttgcacaatcgggtgagttcctgggacagttattgacggctccttgtatgcaggggcctgcagacaagtgaaagttaaccacactgaataaaaaaaggttcaacagcagcatttacaggaggaaattgttttgcttactggatttagtccttccaaagataccctcgccctattaaaagacaaattcccagccaagaaggagccacctcgttgaaagaccgttttaggactctgtacttcggcaggccatctctctacagaggagtctgtagttgcaacccatatactattatcttgcaacgctaattgttgaattggatgttccttagtgcacagcaaaacactctcccttgttgccaagtctgtcaagtataactgacggaaacataacagataaatgaaattaaaaaaggaggttatacgctggaagaaaaccaaagaaagaaacaagtttggtgtctactcacacattggtctcttccaccgctataaacatgactaaatgatgggttgcatgcaagcgcccaaacagaatctgtatgcaccgcataggtatgaagacatcgctgctgacctagatcccatagtctaaacatgaatttagaaccagttagaactgaaatgattcagctatcatagttatgtactagttaagaaaaatacagaccttatcatagaatcagacgacccagacaagcaaaacctgcagtctcaaggtgagaaacacgaggaaacgcaagtaagtcagagaaaaaataggtaccaaaaggccccaaaataaaccattgctggcatgtacaactaaaaaaaaaaaaacaagttacctgccagttgagtccagaagcagcactctaacattatctgtatgccctctcagcttcatactctttgaaccggttctagggtcccagacacgtaaaacctgcaataaataaaaaaaacttagttttaagaaatcaaaaacccaaaaaaattatccgttgttgttctcaggtatactctctgcaacttgggaatgtacgaataccttttctgttccaccagaaacgagcatcgttccggtatcattcatcgccaaagcatacacagactccttatggcctttcgcaattgttggtgtgtacccatgagatggagatgactgcacagagatattgttgcttgaaccaacagttcttaaacttgtaacaggaccatttgcaccatttgaagaactatcttcattagcgtcattaggtttggtaactggtgacaaagcagcttcaatatcccatataaaaacctccccaccaaggccaccagatgcaacaacattattctaaaagttgtgaaatcaagatagaatcagaatgcgacaatgagaagcacatatatcctcaaaacttgcaccaccataccaatcaatttttttcagtgggaactataaagaaaaaagcatgacaaatgagaaattacattttttgccgcaactgccaaacaagtaacatagtcagaatgctgacggagagtcctcgtacagactccatctgataaaccgtcccatgtctagatacaaaataattaagccgcatttagaaaccaatatggaattacaaaaacaaaacaaagtaaaatattggttcggctagcgaaacaaattcacaaaccttgaccgtagtgtctgaagaacaagaaacaagagtgctctcaccagccagagcagcgtcgttcacctgaccagtcaacatggggtttgaaattattagatgcacaatagaacagcatccacctcaggaaacacaggatcctaatcactgatcatccctatacaattaaatttcagtgtcaagaaaactatatacccagtcaacatgagactcaaatgtagctgagcagaaggtcgcatcctcgtcaaatgcccatctcttgagtgtaccatcacgacttccagtgaagaggtagctttgatcattagaaacagacgacttcaacacatccaagcaatttatgccagcacaatgctgcagcttgcaaataacataagaagaacatcatcaggattgagttgagaaggagatgtcttataacttcaaactatttcaagtcatgtcttaatgtataatacgaaggaactagaaaataaatcaaacaaagagtaacacaactcctgatggcaataaaccatattggtgtaaaaaaactaacctttgtatcgttggcatcatttaacacataagtaagctttttctctttgcgagtgcgaacagaaccgccattactgccggcacttccaacccggtgcatttcaaattattctgaaagcctgaaaggagaaccacaaaagggaaaaaaccagcaagtgagggacaagcaatctcttcttcaagcagactagttatcatcatcatccaaaacataacaagaccaaaccgaatattgctactaagaaaaagctggtagtagtagagtgataagaacctaagggacagacatagagatccagctgagagtaagattctttctcttcacgagaatctcaaatattccggaagaaaaaaaatcaacaattatccacatcgaataacagctgataagctcccaaaatcctccattgactcatcaaaaggaaaatagtcggaagaagaagatcaaaatcaaaaggccacactcaattgagatagattacaaaatcatcatcactagtcagctataagaagactcttcagttttgatccatacacagtacccatcaccattgaacatatacgattaattcaactacttgctcaatttctaacaggagaacaaaaactgaacaataacaacaacaaaaaaaaagtggaatcagtcgtgtacgaaatcatcaacatacctttaaaaatctcaacttcagatgaaatcgatgatagtaacaaggtgattcagcaacccaaaacacacagagagaaaccctagaatcgctcgttgggggcgggagtgaataacgagatttgggaatcggattgatctagaaagtcgaaagtttttagcacaaatttggaaattatgagcaaaatttaatttaagagtcaagaaggacaaacaaaaaagagcagcctttttccaaaggcgtgatggcgtttggagaattggaagaagaagacgaagaagaagaagaaacaaaaaaaaaaaagtgtttttttttccttaagaaacacaaactcttctctcaaaggctctcgagcgagacttggtaaaatcagcccatagaggacaaaattgcgtttagtaaataaaatcgaaatagtgtttgggattggataagattatatcaaaatcctcttgtattttcttattggataagtgacataatttttgacctcacacaaaaattagctattgagatttaataaatttatgctaaaaccacaaataatccttaacaaaaatttatgcattttcttttcatttgtattttagtaataatcattcacttgtttaaagtcacatatattcttctaattaacacatctcatattccagctaatattgttagaaagaaaaaaggattacttggttgacaaaaaaaaggaaaacttttgacagtttaaccgttgatcgtgcaatgaccatgtttgattagagtaaaactaaatattgacaatactataattggtaaacgaactcatttccactcactagtttccttaagcgaccagagacacactgagatctctcctctttctgtcttcaccaatggcgttttcctcctcttcttcttctccggcgatgcagaaaggaatctttgtctccatgcctgtacttgttctcaccgtttcctttgtagctgctgtcttcttcctcctctcttcttctttctcctcttgctcctgtcctgaagctttatcttcttccccgaccgacgccgttgaagcttctgtcggtggaagcggtggtgatgtgagatttgaggacaggatatctccgacgcaggatgatattgagtgggttagagatctgattagatccaacggtttgcatatgcagaagaatgagcttcgtaaagggattaatcctcgcactagagatcaacaacttgcagatctgatacagtaatcaccttctcaaaaaatcttttttttttacttcctctctattgtctgagcttcaagctcctttattgttggaaacttgagtggctagtaattgtcttcaggttccatttgatgttagcttagtgcttaaagtttggttattgctaaatccatctctaaatttcggaacaaaaagatggaattgaagatatatgtatgtgaaattcactagctatatggcttcattcctctttaagtgattagaaagtgacattgttctcagcttttgaatccatatctgtgaggtaatctgattgctgcttaaagatttagctgtggattgtattgttgttatagaattgtttcatcaatgtaggctctttgatgagatcctattacgttctgctcttttcttgattcttaatagtcactgactttgcttaaccagtagttaaataatcatttcccgttctgtttttataatctgaagacttgagctttctctgtgttggaaaatcaggtacaagggtatatcccattacgaaggagatgaagcaaacaaccacacagctcttccatgtcctggtgagttactagttgagcagcatcacagcaactatggtgaaccttgggcaggtgggcgcgatgtattcgagttcttagctgaatcatccagtcttaaaccaaactctcgtgttctagaaattggatgtggcacgttacgcgtgggtttgcatttcattcgctatcttagtccccaacattttcactgccttgaaaaggacgagctttctctaatggctgctttgaggtacgagcttccatcacaaggacttctacataaacgacctcttatagtcagaggcgatgatatggaattcagcaagtttggttcagatacagcctatgatctgatatacgcaagtgcagtctttctccacatgcctgataaactcgtgtggactggactcgaaagattagtagacaggttaaaaccttacgacgggagaatcttcgtgtcacataacgtaaagttttgttcacggttaggacaagacaagtgttctcagaagctagcaagtttaggacttgagtatcttggaaaacaaacacatgatagcttgctgtttaatcactatgagatctggttcgggtttagacggtttaaaacataaagccgccagttgaagtattatcttgagtgtgtttcgcttttctctacacgccattgctctccattgtctgtagattggatcaagacttgaagaaggttcagaagttgttttggtgaacaaaaggaaagaatctctacaaaagctgtggattagaaagtttgttctgtatcagttactttaatttttgtgtttgtggtcagagagatacatgtattgttaatatacagtagtagccaaatgatataagagatgaggctagattcttttgtttgtaaccaaagacaaattctttttcatatcttaaaacttgttactacttgtttgtttgccagtaatttgacataatctcaacaataatactgcaaaaaaaaagaaaatttcacctgatattagcattcaagagacaaagacatgtcctaaaggatcacagtaccattttctgcaacaagaagtagaaaatacgacatactagaagaactaagaccatcagacccacaaatatagaccaccctcaatctatgacaatggggaattctttccttgacccatctctatcttcaacctcatcagtgttaccacaatcctcactttggttttctgtttcttctgcttcactacggatagagtgatcaggctcgagtgtgcaactggggatagcagcagggatagcaactggggattccctctttctcatctccattcaacctaaatgacggcactctgtgagagaatctttgcatttcctccggtgtgatcatgaaagagatgactccatgctgcacagcttgtttatagaccgatgcaaatccctgaacctttcctaaataggccactccaacgcctagagaatcgtcgaagctgactagaacttccacaaagtcgtacctataaggagtcttgtgctgttccgggtcattgttccagcttttgctccagtctctgaaaagagcccacgtttcgcctttactcggattcacagcgatgaagtgtttgccacgtatgatgggatgtatctcatgagaaaaggccaagtgactttgtatggtatctgtattctcccatttgaacctgccgcaagcagcaagaacagattcctcagctttaggttctaaccatgtcacttgaagactcgactgacacttgttaactttcttgatccgaccataacacctaggcatagagtctataccatcatacagagcccatacttgaccagccatgaaagagctcattgtcttgcggaaatcattgaactctgaatcaacaacacacattactggctcatgatcctcatcattttcaactgtggagacaacaattcttcaatatctttttcatgtgcttcacttatttgcacagaagctgaaagtacagaagccgaatctttttccttgtcttcatcattatggttgcgttgttgtgtaagaggctcagcatccaccgaaggtccatcttgtattgatcgttcttgtacttgtctctgtttcaattccagctctttctccttctcttcaagttccttctcctttaggtcgaaaaactttctcttagcttccacctctctggctaatgcttcttgtatcagttgaaagttctcttctttctcctccaacacaatcgatttctgttggatggtctcattaagctacctaagctcattctcccttgcttcaagttgcttaagagaagtttcaatcagctcagtctcctttctcattctctcagactctgtacagatttcttctgaagaatcttccttctgaatctgctctaaatcagaaaccctaaatattcaaaaaaaatcaaaagaaacgaacaaattagaaaacaatctgtcatgaaaagtaaaccatactcagacattcatgtgaagaaatataaacacacaacagtaaacggaagttttcagagtaagaagaactgaaaaaaaaccagaacaaaaaaaaaaaaagcaaacctttctcgagattgatcttcagtttgtgccggcaccgattccttctccggcgtctcgcttctcaaagtgaaaagttgtggattttccggttccattactggttgctgtaagagttgagtttttgagctctagaaagtagaaagactaagaaagtttgctttttaatttccggtgaacacagagcaattttgaaatcaaatttgaaaataagagagagagatgatgattaattgattgatgtttactgaaaataggaaaatggagggaggaagctcagaaaaagtttgtaacatatatcgggacaaatatgtacgtcaattgatttacagccgttggattaaaatactcctaaccgttggattcctctctaatgattttgtttgaccagactctctaatgactttgtagccgttcgatttcgtttaagggatgagaatcacgagatgccatggaaggggcttggttttcgtaaatggtcacttaaagggcttcataagatgaataggcccattatattttagttaaaagaaaaatagtaagcccaatagtatttttttggtcggagcccaataagaaaacaaaatgtggctagtatgaaacattcttcttgtgaaaaaatttagaaatccagtggtaataattgagaaattgaaagacgagaacaaaatttgagaaattaaaaataaatattgtgttacttggaatgtctaggataagcgaatggtatattttaaaatattaattttaggtgtaatatattttatattgaggattaagtaacataattatatgtacgctaggatgtgattgtaggtttgattttgttcaagatatgacttgttttttgggattaatgatcttgtagattagtcgtatgtttaatgtgaggagaaaaaaaccaaaaaagaaaatcatgtaaatgagaatcggaaaaacatataaatccgagagaatagtggagaccgatgatgatgaatagtcgtcgtaataaataagtgtaacatccatgatccatctactcgtttatgtacttgatctaaagaaacaaaagttaattattaaagaagttaaatagtgataaatgaataaaacaaattgaggggaaagagataaaaaggttagaggaaaatgacaaagaattattaaaggagatagggactggtgaggtgatcaaatttaaaccctaataataggacaagccactaaattactctattttataaaataaatattttgagtagaaacaagctgttgtccatagatgttgaccgccaaactctaatgcttccaaatcttcatttatcatatttttgctataaacctttagtattttacaagccacacgcctctccatatcctttttgttacctatatatctaactcggaactcttcaaatatttatatatttcatacaggttatgtctatcgtcactcacatatgcacatacaggcttgtgttgaatatggtcatgtggatggtgatacaatgatgctactcttaacaaaagcatctagaaaaatataagtctcagtccgtcagtcgtacacatactgtttttggatgttttactttttattgttctaataaaaaatcaattatactgtttttcctagttgactaattttcaacattatttaccttactgttttcatttcattaaacgttttaccgacactgctttattctaattaaacatcttatatattaccgacattactttttagatgaaatttcacgagcgagatcgtgacactcatcacaattaaacagcttagagagagacagagctagagtaggcaataagaagcacgttgaaaagcagctattagacattccagcatccaatcgtctcactcaactaaacattcactaattcttgtttagtatgcatgtacagtattgcatattcttaagatacatttgatacaattattaaggaccatgcatacatggttttattgattattgactagcttgacacacttctttcagtccagttatttagcagagtgattctaccgttctacgtaactcataattagaagaaaaaaaaaacgagaaacaaaattaggaacattttagataactggttttataaagttaaagctatcggtataattactaaaaatagtcatatgctttttccccttttaattaccaatctaatttacttgacataattacacttagctaattttttgtcgttatttggcaagagttatcaacaatgacataatgatagacaacactctacacaaatttaaatgctttttcccggcccatagtttttaaaagttattccacgaataaaattgacacatgatctaattaagaaaaagactagcctactccatctaatttgcacaattaaactaattggtactattatttttatacaaaatgttgaaatctaataattgttactatatttttcaactcgaataagcatagtattgatcaagaatatactaaatcttttaacaaaattcttttctttttcctagattttcttaatagaaaatattctctctttttttgttagtgacactttgaaataatatcatttttatataaactaaaaggtttttacaaaaattaaagtaacaatttgttttttttaaataatttttgttttgaggcccacccatgacccaacagtgatcacacacacacacacacacctccctactcatccctcaacgcgtccaaacttatgcgcgcacgttaccccagactcttaccgacgctaaaatacgcagatattccttatcctccacctcttggcggaatatatatctttttgtttctttttaagccttttgttgtttatcccagtttttttttgtttttaatcactcaaccattaaaccccattttgatctctagttttttaaaagcaggagattttccttttcccagaaaagaaatttcccaaatcaaagtttcgagctttcacttctcgacttgcaaattctcgtcctttttactgaattcgatctgggtttttgtttttgattagtaaaataacaaaaaaaaaaaaaaggatttatcagaaatggctgcgagcgatgaagttaatcttattgagagcagagtaagtttgttgcttcttttttttctggctttatttctgttttttagcttctaaatatatatactgatgtttgcgattattgggttaaattttatgagtgattttgacatgggtctctttcgatttctatgtttaattttgttcttgatgttttttagtcttttgcttttgtgtttgcgcttatgttgaatggttttgattgggttacaaattgaaagctttaggatctcaaatcgttttaggtgatgaaacgtgtcgttagtttgatagtctctgtgcttctccttgcctttttctgtcttcttctgtttgattcttaatatgattgattaatcagattttgttattcaatttcacacttaacttcaactgactctttgttgaattggattctactgtgtagtgttaagataaaaaaaagtttgaattttgtttgttgtgtttgataaagacactcctttgatgcttcacttgaatgcaaaacacttcctttgtgttacttatatatgataagcctaaggcctttcattgatctctcttctattggtgttttctgggtttgatgcagacagtggttcctctcaatacatgggttttaatatccaacttcaaagtagcctacaatatccttcgtcgccctgatggaacctttaaccgacacttagctgagtatctagaccgtaaagtcactgcaaacgccaatccggttgatggggttttctcgttcgatgtcttgattgatcgcaggatcaatcttctaagcagagtctatagaccagcttatgcagatcaagagcaacctcctagtattttagatctcgagaagcctgttgatggcgacattgtccctgttatattgttcttccatggaggtagctttgctcattcttctgcaaacagtgccatctacgatactctttgtcgcaggcttgttggtttgtgcaagtgtgttgttgtctctgtgaattatcggcgtgcaccagagaatccatacccttgtgcttatgatgatggttggattgctcttaattgggttaactcgagatcttggcttaaatccaagaaagactcaaaggtccatattttcttggctggtgatagctctggaggtaacatcgcgcataatgtggctttaagagcgggtgaatcgggaatcgatgttttggggaacattctgctgaatcctatgtttggtgggaatgagagaacggagtctgagaaaagtttggatgggaaatactttgtgacggttagagaccgcgattggtactggaaagcgtttttacccgagggagaagatagagagcatccagcgtgtaatccgtttagcccgagagggaaaagcttagaaggagtgagtttccccaagagtcttgtggttgtcgcgggtttggatttgattagagattggcagttggcatacgcggaagggctcaagaaagcgggtcaagaggttaagcttatgcatttagagaaagcaactgttgggttttacctcttgcctaataacaatcatttccataatgttatggatgagatttcggcgtttgtaaacgcggaatgttaacactgggttagagaaagaaggttgttttaacaaagccaagacatctttcaaactaacacacaggtgaatgtattgcctgtggattctctcgtttagttttgtttttgtgtttagtatctaagtgtgtggcggtctgcggcagcctttgtgatgactgtttaaacgctggattctgaaacgctaaagcttgtggaagaacagtgaggcgtttagagacttggaaaggaaccaagcactagtaaaaatttctcctttttttgtctgtaatatttggcatttagcttttacccttgagcctttttactaactaaaagctgattttttcagcatgagagtggtaattagatatctataaatatatatatttcaagaatgtaatgtttatacacaaattttagtgattttggtaaatgtatgtagggtctgcactctgcagttgtattgttgctcctctttttcattgtactctaatggattttacaaaaataagcattacctgttttttttccccaatctttactaatggatatctatgatataatgtgtttcaaaaagccaaaaaggtattaaaagatttttgtttcgacctgtaaggaatcttttgaacaaatgatgagaaacagctaaagctttgaggaaacaagaaaaacgagagaaattagtttgttcagaaagacaaatgtacaaaataagtggagtctaccttgatgaagaccatatatggaatggaccaagagtatgcaaactcatgacatgaagaatgtggctatatttgcctttggattattaactactgtatgaaattatttcttttagatcataaaagttcctgtaataactccaaacagttactcatatacatgtcgaagttgtttacattttacaaattggtaaaatttcatggaaatttctacctcttgtttaagaaactttcataagaaccaaaagtctcctaacctttgcttgcttgctcacaggccaattcaaaagtccaaaaatggctaaagaaaatcaatggatgcacatatatagagctcatgaagaaagattctatttcatattatagttgcagagacctaaacaacattatttgcaaggtaaaggtaaaaagctcatatgatactgataaaagccgaatgagataaatgtcatgatagtggttaagtggcaaaaccattctgagacgtttaacgagccctagcggcataggcaaaagatgcagcagcaaaaaccgttgttacagacgaaacgagagtccagaaggtctgcttcttgtgtgcctcttccgttgattgcttcatgatctcagcttctttcttcatttcctcgattatgtcctctttgtttttgaaagctttctctatcgactctagctccatcgcatagggttcagttccaatttctcgcttctgttcctcactaatcaatctatcttctcggttctctaattgggatagcatagatgcagcactctttagcatcaccatgctgcgttttgcatccattccagctgattctagttctgttttcagagcttccatagcctttctgagctctacaagctccttttcgagtttaacattttcgcttttcaatgattcagattgactctccaaatcattcttcgctgaaaataaactcttacgctcaatcttaactttctcaagctcttctagagtttttgcaaccatcttctctgatttcaaaacctctgccttaagatcctctccatttctcttctcctcatcaagtgccttatcagcttcttctctcctgagctcaacttgcgcaagagcattgcttagctgatcaactttgcagctaagcttaccgttaatcttggtttgatcatcacaattcttttgcagcacagcaacagcatgagttagctcatcagcctttcgattcagctcaacaagcttcctctcccgactaaaaatacgctcctcaagctcaactttctcccgagacaactggtcaatcaacttccccttatcagatgactgtacattgagcatctccatctgtttctcaatcaaattcttctctcctattaacctctcaacctcagattccttgattgtcctctctttccctaatgcatcaatttccaccatcattccactctctttctccatagactcatcaagattcttctccaacccgataaccaaatccctcaaaaccttctcttcctttgtcaaactccgcacagtctcattcaacttgtctaactttctctccagctcctcgattactcctttttgttcaatctttacaatctccatctcattcttctcacttaaaagcactttgatctctctcttcaatccatcaatctcattcttcttctcctccattatcttctccagaccaatcttctccttctttaccccttcaatctcctcttctctcaccttcctctccttcaccaatctctcattttcagattccaatttcccaatcactatctccaaattggattctttctcctccaaacgaactacacactccttcaatcgattcacctcctcatgctgtaaatcaaacccattcttgattaagtccctctcatcacaaaccttcctcaactgttccttctcaatctcaaccttacccgtaagctcaatcgcttcccctttcaaaaccctaatctcactctctctatcactcttctccttcaccaacatatcaactccaacacacatctctctaaactggctctcaacaaacacaataacaaaatccaattcaaacttcaacccgaaattctcatcactcacctgatccaactcgtcacgcaacccagtcttctcctgacaataacgagctaactcggtctccaattcatccttggcctgaaccagcgaatcgatctggtttctcttctccatagcttgtttgagaagcatcgcattaagagacttcaaattctggaattgctcctccgaagaatcgtgttcttccatggaagactgacggctaagtaccgtggctttcttgtcagtctccggtgctttctggtcatgttgttgttgtcggttatcattagcggtgtcgttactgttacgcgacgctttcttcttggccatcgttttgaggattctcgaaggttgcaaaaaaagtggtggcggtgattagggttttttgaggatttcgatggtcagtgtgaagagagacgaaacgtctttgggggtaaatttgcaaattcaaaattcagggcccagattttaagatttgatttatcttatcacatcagtcttctctgtttttagatattttcgtaacgtaaatccaacaacgttgcacgtgactgccacgtgatactagtgactagtgagagtgattataaaccgaatttaagctggaattaaaccggttttaatttagtttgttccattcccatccataaacaaatttcagctattttgatcacataatagttttttttggtaattttttccaacgatttacattcaccaatgaaagaaaccaaaatagttttacataataataatttggatcgatttcaagaggctaaagcaacctctcgaatgcgatcaagatctcccaagtacttagtggagttatattctacactatctaataattcttcggaatacgttcgttgcatcatctttatcttcgcttctcttggagtcattacgacatcttcgtggcctagtaataattccacaacctggatacatttaaagaaacagtatcaaaaccggaaccaaaacgaatttgacatttggttctttcccactttgaaaccttaaccgggatggaattacaatattatacctggctcatccggggtcgtagaagagaagattgatcgatgcataaagaagccgtggaagttaaccggataagctcttctcggttatactcatctccaagagatggatccaccaattcttttatagcttttctctctagcaacggcttagcctgtaagcaaaaaggaaacgtaactcgtaccagactgataaaaggatagtgaaccggtccggtttagcctcaaatgtcaaactggtctatatactcacccataagacaaggctctgctgagactcgtcaagggcaggatgtccggttatgagctccaagaggagaactccaaaagcgaaaacatcagtcttctcgtccacgattccgtgcatgaaatattcaggtgcaaagtacctaaaacattgtccaaccaaattctcaactgaaccacataaaaaaaaacttttcctaaaaaatttcaaattgttacccgaatgttccctcaaatttggatacgttatggtgtgtcaattgcttgggaagccatttggctaacccgaagtcgcaaatctgcggttgaaaatcttcggtgagaagaatattatcagctttgatgtctcgatgaatgattcgtctttgacaaccctcatgaagatacactagtccatctgctgttcctaacgctacattgtaacgtctgctccaagtcagcttatattttgatggtcctgtacaaattaatttgagcatttagatatgataagcttaaaagcccgatatgtatatccgttaagtttatgggtggatatagaaaccatggaggagagagcctaagcttccaagaggagatagccggaacacgagatgcattccaccctcgatgcaacaaccgatgaatttggcagtgttaggatgatcaacatgagcaataatcccaagttccgatagaaactcagctgtttgctcgtccggtgtgccttttgtcaaacgtttcacagcgattagctttccttccggtagaattccctggtatacatcggcgtaaccgcctctaccgataatgttttctgcatagaagcgtcgttttaattgcagtaatagtagcaaccaaacagtccttcaagtaaaaaagaagagagtatattgttatgaagataaactcgatacctggactgaaattgtcagttgcaatttcgatgtcagatattgagaagttttggagagatgattggaaatcgtagatatcgtgaaggaccatgccattcatgtttggatctgcacttttgttttgtttgatgatcggtggggcggcgccacttaatggaggaaaggaagagaggcgtttcatggatctgcgtttccatagcttgaagaattttccccaattagaagatgctctgtgattcttgcactgtacgtctgtgtctgcatctgcattgtcgatagcttctctgtttggaggaggatcgtcagatgaagatgaagcggaagagattgagcaacgagttaagcaggcttcgagggctcctcttggtgatttggggtcttgcttctctttatctacctctagtaatcttagatctgggaggagaagggagagaaaacgttggaagaagctaggttttttggtgtacaagcaatgaataagaatacagaggacaagagaaaacagagcaaacatagaaacagaggaaacagaggagctaggttttaccatgagctgaagcagaattcataagaaacgcgttggttcttttatgttttgacgtatgatttatgtcgtttggatcttcttcagtgacataacttgaatatttagagttgtacctgcctcgggagattcaaaagaaaagaacagactaaacatgtcgttcttatgtaaattttgcgggaaattaagagaaaatcggtgaaaattcagggaaagttcgttaattctgcttaaacgttcgttaagtatcaatgaaaatcataacagaacagaagataaacttctagacattaatatcatgtctaccaaaaaaaaactcaaatcaaatataagaacaaacagagaaaaaagtgatttgattgaatgattacattggaagagcacaacacacgggagaagcttctttgctttggtctaccgccatgaaagagtgttggtaggacacttttaagattttctcagaaacctgaaaacctaaaaatagagaagaggatcatagaaaggaaatagaaagaagttaacatttaaaccaaaaataaataaaaatagaaagaagttttgaagttggtgttcgtctcgagacacccgaaagaaaaggttttgtctgtgtgtttaaaatttgatttactaatttaattgttttccgttgaccaatggtatatctactagtagtttttttgttaagctaatagttagactctaaaatgactaaatcctatatttggcaatatgcttttgattttctctttttggattgaactcagaggcattctcttagcttcattcatttatggcagaaagggttaagggtccttaaaaatcgcttcatctgtcggtctcgttatccaaactcatattcctaatttaggtcttttaaggttttaaaaaactactttctttatcttgttgataaggaatttataaaagatcaaacttgagtaatctaagtagttttagttttactaatttcatttactgttactaatcaattgtagatattgacattcttgtatatattgcgacctgatagtaattatctttaattttctatatgtttttattcaagtagtactctgttttgtattttctttcttgtgaatagaatattttctgtgtgtatatgatgcagaaagcctgcattaaaacctgcattggctttattgctttgcaccgtttatttatttttatgattcttatttttgtgattaacaaatattatttcaagtgactcttatataagttttggatagttaaaccacggaccacaatcatgttggaagtgattgttcaatacttcattgttgtataagagaggggacatcgatcatttatgtaaatcttgttaggtactgttctgttctatcaatctatcaatagtccctacgctaactttctgtaccctcgattaaataggtttttgctcaatgacgctgggtccaaattgtaatgactcagttcaacttccgcgacaaaatcattttcatagattttgatgatttctatagtgggcggttttttctatacatcttacattcgcaagaatttgaatgatattagcccatatgacgagaagaagaataattcattacttatgtggttaatgcggagtggaaacgaatatctcatggccaactacaaatccaaatactgtcttttgaatccctgtagttttatactatatgatctagagttttttttggattttgtctcccaaattagaaattattatagtatcaactatccatcacatttatagaaaaaaaaaaaaaaaaaaactatccatcacagcttggatcttgcggtgggccaggaaaaaacacatgagcatcggatctgtggaaaacaactgtcttatcgggtcaaacctttgagtcaattacacgttactgtgcatgtcataaaccatcaccaaaaaggaaaacaaaataacaaaccatgcatcttacttacccagtaacacaatgcatccataatgtacatagtatttgtgaattttttgaggaaagtattagtgaatattattactatgaaataccatgtaattacttctgaattatcttacttaagaaaattcaagtttagtcaatcaacattaaaactatagagaacccccaacgtgtaataatgcattgggagttgggactttcataaaatctcgaataaattaattcaaattgtctaattcgtccaaaattatcctgcatgggttttagctaagccagcctagctacatgtactgatttatacagagataaatatagacatgatatatatcaataaattaggaacaaatcagagtttttagatctaaaaacacggtgccttctcatttcctccggtgagttatccaaatcttgtgtttcttatcatatatcctatattttatctacataaaaattgataagtattcgttgaattcaaagggcattttacgaagaaaatggagacaagaaaagacgacatggagaaaaggaacgacaaatccgagccgttgctgctgccggagaatggatccgacgtctcagaagaagcatcatggatggtttatctaagcacgatcattgccgtttgcggttcctacgagtttggaacatgcgtaagattcttttacgacacctattactttggaaataaaagatgatgagaacctaagaatttgtgacgattaatctttttgatacgagaaaatctgtgtttgttttttaataggtgggatactccgctccaacacagtttgggattatggaagagcttaatttatcatattcccaggtttatattaaattgattaagtcttctacgtttatagatgcatgtttaacaatattttgcttaatcttttttttttttttttctctattggaatctagttttcggttttcggatcgatattgaatatgggagcagtgctcggcgccattacatcggggaagatttctgatttcatcggtcggaaaggggtaaaacctacctaaacaaaattgtttttatctcaatatacacacaataaatcctaagaaaaatataccatttttacgaaatataaaattactttttggctcacatggtttttgtctttgagacaggccatgcggttgtcttcagtgatctctgccatcggctggctgataatttacttggccaaggttattcttttggctgaatttcttcaatagctgttttcaaaaaaagctttaaaataacatggaaaatctgcaactaaatagtgatgttttttttttaatattagggtgacgtacctttggatttcggaagatttctaacgggttatggttgcggtaccctttcctttgtggtacgacattttcataagcattttccccttatggataaaaagccatgcatagtgttataaattaatcaataaataaaaattcctttttatatatgaaactttttggaaatccacatttggcaccgattttgtgtaggtaccggtcttcatcgccgaaattagtccgagaaaattgagaggagccttagcgacgcttaaccaggtgatgatgatgtccttttatttactactgcattagaaaatgtactgattacaatagaatcagagctagcatatgtgttggtgttttcgagatatttgacattgtatcacaaattaggagtattttgtggtcaaaaaaacaaaaatcaaaacagtatttagagttatttaaatcttttaaaagacaacaaaaaattattgttttatttctgaaataaattgaaattgttaatattgcagctctttatcgtaatcggattagcttctatgttcctcataggcgccgtcgtaaattggagaactcttgcactaaccggtaaacttgtttgtgcggtagctgaaccggaaatatttgttgttggtttagtaattatacaaaattagatggtataaaatttaatttgggtataacaaaacgaggtttaattaaccaatttcaggagttgcaccgtgcgtggttctattctttgggacttggttcatccctgaatcacccagatggctggtaagatcaacgatcgtaactcaacatatggttgaaattaacctcttaacattaaaaccaaaaaaaaaactaaccgacccaactcatatgcattttgcgtttcaaggaaatggttggccgccacagtgattttgaaattgcgttgcaaaaactgaggggtcctcaggccaatatcacaagagaagccggggaaattcaggtacaatctaaaaccagaaaatcggttttgttacgtgacatgacatttttcgtgttttgaattccggtttataggagtacttagcgagtcttgctcacctcccgaaagccacattgatggaccttattgacaaaaagaatattcgatttgtgatagtaagaatctctaattccattcaaccgattataactatttcccggtttgatttggttaaatcttatttttctatctattcaggttggagttggtttgatgtttttccaacaattcgttggaattaatggcgttatcttctacgcacaacaaatattcgtatcagcaggttataattcgaaaatgatctagcaaatgttataatctaacatactccatttctagaccattcatcggtttttgttccatttttggagtaccaggagcatccccaactcttggaagcattctatactcgatcgaacaagtcgttctcacagcactaggcgcaacattgctaattgatcggcttggaagaaggccacttcttatggtatggttcttgtttcagtttccaataaatcctagaataccggtttagagtattcggtctgaccatgcggtacattgcaggcttcagctgttgggatgctgattggatgtttgctcatcggaaattcatttcttttgaaggtcaatcatatgaaaaataaaattaaaaaattaaagcgtataatgtcaggaaaaatataggacgtttaggttaaccggtttgattttggttttgacaggctcatggtttagcacttgacatcattccggctctggcagttagtggtgtcttggtaaacatctataaacctaattttggtttcaatatatatggtttggtcttggttttttcctcggttgacccaaaacccaatttccaggtctacatcggttcgttctctattggaatgggtgcaatcccatgggttataatgtctgaggtaatttcaaaacaatatataatgttcatatttcattattttttcttaatcttgtcattacattaatttactctttttttatacttccagatatttccaataaatttgaaaggaactgccggaggacttgtcactgtagtaaattggctaagttcatggcttgtctcattcactttcaactttctcatgatttggagccctcatggtatattacatttttttttgttattttatatacataactactaggtgaacaatcagtattgatcgcatttctttgtttttaggtacattttatgtgtatggtggggtatgtgtattggctattatcttcatagcaaaacttgttcctgaaactaaaggcagaaccttggaagagattcaagcaatgatgatgtaactctgtaaatatataatacatgttaattttttattttttttattaaggtataactatctacatgcaaacgcataccattatcaatataaccgaaaggctttatatgtattttatgaatttaattttggattttcagatttcgtaaatcgaaagaattatggcatgaaaatgttctttagtcaagaagtgggcatgttctctcgtaaagaggcttttctcgaatcaatcaaacacacagtcatacccttcaaattagtgaggaggatattgttcactactatcccgccatcgatttttcttcttctcaattatatcatacataatgggccttacttttgggccttcagctttcaagagaattttactcggtaaatgaataaaagagtcttaactcttaagtgcgtttacgatttccgatattcttctaacgtttagtttgatttgacttgatacagtggaaaaatatgaacgttgtgaaacggtaacattttcttaccgtttgaatctataatatttgattggaaagaaatttaaataatgactctctataaatactcctttcttgactctgaaatctgaatcctctttacttggtttatttcttacaaatgtcgagtacaatctttttttagttctgtttttccactggaggagttctctcactcaaattttatctacattgctcattagccgagagaaacaaaacataaaaaatcctcttacaaggtaaaatactctggtcttgattcttgtatatcgttttgctatttaaacggttcttgttagttgttaataaatatacacgttcttcatcttttaagctgcatctttaatggagttgaactaagaacttaaatgctctgttttatacttagtttatacattgctgtcttgacttcaactatgaactatgacattaactgatttttaggcagctatttgtgtgtctgaattaaactgaacttttgtagctatatataattttttttgtaatgagctagatatattctgtctgcgagtagaatgaagaaataatcggttttgactaaattgctaaaaaaaatatgctatttttgatttttgtgtaatatatatatgcgtgtattaacaaacggaaaataatgatgttaatgaagattgattaattttgcagaggattgaagaagggaaaacaaagccttggggctgtatccacgggcttccatcttctaaaagcctttgaagtggaccagactctgtatgtagccatatttgtattttcctttttctttcctgatatagatacatggatgtatgtagatatgaatgataaatgggttatgtatagatgtatgattaggatgtgaatgtatatgactagggtgtgaatgtatatatgtatgattagggtgtgaatgtatagatgtatgaatagggtgtgaatgtgtagaactatagaggtgtgttagtgtagggtgagagtatagatgtatgtataggctgcatatatgtgaagtgagtgagcgtaggcaaagcgcccaatgcgtaacttagggaggaaacacggcccctataaccatccctagtcacacaagtaacaacaaacactctaaacggcaaaaacaaagctaggaaaaaatatgtcgaaatgctagtcgaaacactaaatgttcaagtgttttacgttaaaataggacaataaaaattgccaaggcccaaaataaagcaaatataattttgtaaaacacttttaatagtctaacataacatacattccaaaaagtatttggtaccagtgtaaaaaatgacacaaaataataaattaataaaatttgaattatggttttatagaaatattttaaaagttattaaattaagaaattttctctataaattaataaaattttgcaaattccaatatttcaatttcttgtggaaaagactagcgcaatggcttaatgcatttcattgacagtaatttatagagatttttactgtataatggcaaaaattaacaaaatacgtcaaaaatggccaaatacaaacaaggataatgtttctcagtaaaatgttagataattaaaatacaaagtggtctcggttttgtcccaaaaaaaaagtggtctcggtcagaacaataaatcaaattttttgttttagttttttagattttgtataaaaatttaagaagttaaaaaaatgtaaagaaagagtttttttttttggtaaagaaagagttcatttaaaatattatgcaagctttacaaaagttttgtgatcattgatttaaaatttcttaataccaccagtaagagattaggcaaaaaaaaaaaatgattcatatcctcaaaacactcgttgacccgataagcagctagtctaaacattttaaaatagcaatgcatcgtgctattttatgttaactggacaaatagtttgaattaataagttttcatgttaaggaatccgatgggattcttcatgatatcctatttgtatcctccttttttgatgtttgtctattttttcttttatcagtcgcaactttagttgttaacctgatgctttggcgaacgaaatgttatctcgttatattgaatcctaaattatgaaataatatcagttatttgactccaaaaaaaaacaaccatgttacacatcatataagtatataaaaaaacgttacactgtcaatatataatatcgacataaataaatttaaaataggaaaccgcgtgaagacattatctgagttattgacattatcaaaccgcgagcaatacatggccgtatattttatgtttagtggaatttataaaatatatttttcttacttgatttcctcgtagtctactctacttaatactctaacagtaagtaggtagacaagggccttcatttttttcttgtatacaagcgtgatccatatctactcgtctacaaatttggatcaatttggatctctataaaccatgtaatctggcaaaattctgcgtgaaagactttaaagaatttgagttattgacataatcaaactgcgagatatatggccatatatttaatttttattggaagttttctgacttatttttttttcgtaacatcacgtaggcctgattagggccatcatatattttgtattaggacaaacgtgatccatatccacttgtcaagataaatgtatatgtataatgtttcgtgttcataacgttaaataattattgtaatatttccatatatatataattaacaaaataggacccactgcaatttaatctatctaaaacatgtaatccgcattaccctgacaaaattcgaatattgagttgtcgttattggttaattaatcatgtttaactataaacaaagaaaaaaagcatcacacccagtgagagaccctatggaaaagggcagattattctttacacacagaccctatggaaaattgggatgcaaaagacaaaattgtgattaaaatggaaatgcctttatggattaggatttgtggacttgggagaggctatctatatacgtcctcatgtgaccttggaagttggaacaccacgaaaggagttgatatactaattaagtcgaaccactaattaatgggaagacgtgcgtcgaccgtcgatgaagttgcgtaacttaaaaaatttaattccggatatgataatttccaaataatcatgcttatttatatatgtctggtctaagtctaattaacaatgcaagcaaactgtagtcatgctagtgaaatggataaattaataatcatttatcatttccaattaattcagtctggcatttacactttctgttaattttagcactataacgttttcatcttttgacaaatacgttaaaaaggtggaatactactgtacatatacatgagcaaaatttaaagagtatcttggataattattattacttcagatatgtatttaaaaagggctagctagggttggaaaaatgatatacataatacatgttaattataaacatacaaaaaaaaataaaaaatttataaacatacaataaaaaatggcaaacgttgttaataaaactgaagaagacgctcttggtttatagttgactaattgtactcgcaatatattcaaaggtgttattaattttgaaaataacataacttatattgctttagtccttcagtttctttctatttttcacacatttgttggttggtaagtttttaaattgtgatttttttattaattatagaaatggggtaaagtacgtaatagaaatagtaacaacaatgatgagcacgaatccaatctaccataactgcgttagataaataaatgagttaattatggaaaagggacggaaaagttaaacaattataagattaggaacaatgcataagtgattgtgaaaaccagcacttctataatgctaaaagacgcttctaccctcgtcaaactttgtcttcaagcttttcccgttctctgttttgataagggagatgcaaatctctgatgaagatgacgaaacggttgccgatcaacttcgaaaacgcaaacacgaaacggttcgtaaaaccaaacaattacgtcatcggagatgcagatctgtcatgattctggtaattgtgggtgttgaaaatacaattaatcatgaaacttcaacaaaattaagccatatcaaacttcgaaacgagaaagatttacaattcttttaatttttctctcttgggttcaccaattattagttccttacgctttaattttcatcaatggagttcatgatagcattcagagatagtagaggaagagaacgttagagaaattgcatgggtttcctaaatagtatcatcttagggtttagtaatcttgaatcaaccagggtttttaattataaatgatttttgggataatagattttgttttttcggaagaaacgttagagtgatagaggagaagcttgcgaagatgaaggaaaagaggaagagaagctgagattgaaagggtaaaatcgtcctattccagaaataaaagttccttttttcaaaggacctccccaatgtgcctaaaatcaaagacttttgagaaaatattctcattttgacaacaatccctaaataaatagatggttctgtaactatccttgtgtttaatatacaatgagtatacagtaattagcaacgaggtcaacccgtctatatgaatctatatataaagggaaagcatagctagttctcagagtatatctatctctcttcttcttgttctttagctcggttcaattctatagtatttgaggcttatatttgagtgaagaaaatggagggagagaatagtagcattgagaaaggattattattgataaggaaggaagagagtgcaaatacaactccatttcttgtcttcaccactttcatcattgtctctgcttccttctcctttggcgttgccgtacgtttccacctctctctctctctctctctagatacacacacatatgatacgagattcgaaatttagaactgggttttgagtagaaatattccagtgttcaagttatttagatattcaggcatgtatctcaattattttgatgataatcagttaggacatactgctggtacaatggcctccattatggaagatcttgatctttctatcacacaagtatgtctcattactattttagatcggttttaacaaataaaaaactatttctgataagtcttatgaaaactggaatttggtttttatggatatttttcgcagttttctgtatttggttcactattgacatttggaggaatgattggagcactatttagcgccacaattgcagattcatttggttgtaaaatggtcagatatttcttattgtaaatcctatatacattggcaaatccttaaaccactaatcacttttaataatgttttcgctctaataaatttcttagactttgtggatcactgaggtattctgcataagtggatggcttgcaattgcactagccaaggtttcttcactacccatttatagtatccctactatataagcttcctctctaatctcgattaagttatctttgcgtagaacattatttggctggacttgggacgattctttgtaggaattggagttggtctccttagttacgtggtaatttctttaaaagaaaaatggtttctggatagaaaaattctatttcttttttttttttaacaacgctagtttatattattttttttgtaggttcctgtatatatcgcagaaataactcctaaaactgtgcgaggcacttttacatttagtaatcaggtaatgtaattttatatttatatattgctatttttgggttgatatatatttattgatgaaggtctagttattttcagttattgcaaaattgtggagtcgcaacggcgtattaccttggaaatttcatgtcatggagaataatagccttaataggtgattcttctcatctactataattttgttttctacagttttcatatttagtattcataaagaaatttaaatattacttggataaatatatcatcaaatatactttaacgtcttcaggcatacttccatgcttgatacaacttgttgggttgtttttcgtccccgaatctccaagatggttggttagttatatgaatcatctcatatatacaatttataagtaaattgtctattttgtaagtaaaaatatatgcatatagatgtaacgtgattcattattgtaggcaaaagaaggtcgtgacgaagaatgtgaggttgttcttcagaaactaagaggagatgaagcggatattgtgaaggaaactcaagaaatcttggtacacatacatataaatcatgataaaaaaaacaaatattaacatttcatttaattttgatcaaaatttattttattactatttcttccattatttcacacacagaattttaaatttaatattttcttcttgaacaaaatcttgctgatctttaacaataataatatatataaaaaaatctcatcttcattcattttttttgcagatttctgttgaggcttctgcgaatatcagcatgcgtagtcttttcaaaaagaaatatactcatcaacttacagtatgaaataggggatttcattcatcagcagaattttttaaaattattaaaagtaatttagttgactgaactgatttttgtttttggttaattgaatcaagattggtataggtttgatgcttctgcaacagttaagtgggagtgcaggattaggttattacactggtagcgtatttgatcttgccggtaaggtttcatcaatgtggattcaatggttatcattgttttattcttttaatgattatttacgtaaatatataaatgttttctttttcaatatattttcaaactcttaaggatttccttctcggattgggatgacggtgttgtctattgtcgtggtacgtatatgtaaaaatattcataatgtgatcgttgattcgattatgaaatgggattgatcatttacacttttgacttctaaatttcttcgactcgattatgaaatgggattgatcatgataggtaccaaaagctatattgggtctgatacttgtggaacgatggggaagaagaccgcttcttatggttatgtaacttttatttattgctatagtgttttattgtgttaattggttaattacgtttatagaaagcatacaaatttgaatgtacaaatttgcaggcatcggcatttggtttatgtttaggttgtatctctcttgcattagcgtttggattgaaaggtgtccctggggttaatgtaaatgttactcccactttggcatttataggaataatggtaagtaagaaccaattcagtaatttatattatcttcaaaataaaaaatcatacttttttgttctttgtaaatgttattttttagtaatagctagattctatagaaatttcaaaatttgattaaatagagtttatctataatccaaacagacattcgtaatgatgttcgcagctggattaggagccctaccatggatcataatgtctgaggtatatatgtttacttttatatgcttgaacaaactttttatttagtttcctttttctaatggcattcaaaattgttcatttaatttcctttaatattttttgtttagatatttccgatggacatgaaagtagtagctgggagtttagtaagcataacaaattggtttactggttggatcgtcagctactgtttcaattttatgcttctttggagcccaaccggtacgtcaaaactagtccagatcgcattaaactgtacctaatttcgttttcttctctaaaccttatcaaccaaatttagagattcattatttatacatattcacataactatataacttaacaacagagacaaaaattagataatttttctgttgtcagtttgaacatttcttggaaacccagtctcgagttctttagttttggatcttacaatgatatatgatttatgaatttcaagattccaataacgatgcctatatcttatttttgcaaactcgaattgcaggaacttttatcatatttgctacgataagtggagcaacggttgtattcgcatggtgtttagtgcctgagactcgaggattgactttagaagaaatccaacgacgtgctaattaattctttgagttacattgatctcaaatatgaaatatttataagaaataaaatcataattaatcggatgtcatatatacaaacgctgaatgtgattcgattatggtctaaattcattgatagttttttttaatgtaagatcatgttgtttacaacaaaaattacaacaaaaaaaaggggaaagatcaggtgttcatcatgccgacagttgtgctataatcttttttattattatcaaaccaaacctgttggatttagatcatattaaaaagtagagctaacccaaccaaaattatctaacctaacaacgaagaacaatacaatgactgatgttatatttgaacataaactaattataaatttacatgacctgcttgatttagatcataaaaagtagagacatgccaaccaaaatcttctaacctaaaaaacgaaaaataatacaaatgactgatgtgatatataaggtgaagttctacaatgcacgtttcttggtccccagatcctaatcttagtagttttgccttttgtgttcaaaacttcgggctaaggcccaaatagtatactcgggctagggccggtttgaaaaaaatcccctttctttctgccgacgtaattcagagaacgaaatcatgtcgccgtatcttagatgcgtcgtcgcgcagtacatccattattcagagtcagactgtatcacaattcatctactttttctctcttttttttcattgtttagaataattcagtactgtatttttttttaaatgtattgactggtgtaaactggaaaaaaggtcatccagtgtgacacagaaaataatacaatgactgatgtgatatttaggtgacgttctagcatgcacgtttctacctttcattttgcgtccaggttcagtgactgatcagtcatgatatagcttttgccacttttcgtgaagggttaattaaatccaactaattatttcatttaatgcaattcatattttatttatatgtatataatgtttccactgtctttgtttttatatatctatttatatactttccaaactatgacaaagcgtatgtcgtgttttgttttatttaaatttatgtaacattcattatggaaaaaatatagctaggatatatacgacaatgttcgcaaggaaaaggtttacacatcaatcactatgaagagcaggttgtgtactttattatgtaaataatgtttgcaaagacactgccaatagatgtaaatgtgtatttaggttgtccccgtaagggatgcttgcaattcttcaagcgactgtcctttggtttccggcacgagcatccatataaaaagcaatgacaatccccccaccatcgcaaatatgtaaaaggttcctatttaattaacaaaaacaataaacaatacgtataattggattagtagatttttttctggattaaggtgagttttaatatctttttaagccttatgttcatattaactggaaaataaaagagaaaataaagaccttgtgcgctccattcaaacataaagttgaaaccataactaacgaaccacccagtggtccacgatgttaatgcaacgattgaccctgctgaaacttttatatttatcggaaatatctgaaacaacaaaaagacacaaaataaacctttcttttctttgataaatatttggttattggattttcttttctttgaatataagttattaacctcagacataatgatccaaggtagccctcctataccgattgcaaaaaatccaaagtagacctagccagaatagtcgaattacgttcagttttgttattacaatttaataacgaaaaatataatttgaaaaaatgaatgctttttaccagaatatttatgaagacgaaaactggaataaattcaggaaacagattcatttcctgttcatccccacacacaaaaaaaaatcatatagatttaattgtaatattataagtgctaatagttatcttatattagtccaatattaggaaacaagagtaacctgtaacgtgaagctaaccccaataagcaaggatccgatagacattccaacagcagaagcctagaataatgtttatcaagataatgttaataattattatactgttatattgttatgtctatatataaactgtatttttctaaccaataggagtggtcgtcttccccatctatccacaagaatcagaccaaccaaagcttttgggatctacaaagagtaaaaaataatcataatggtataatcgaaatagctttgagaaatttaatatcgtaaaaaaaaaatcaattagttaaaggtacgcaccacgaacacaccaaatatcattgatccaagtctctctgaaaagcctgtttaaacgacgaaaatgcagataacataaataataggtagtattaaataactcctacgagtattatttatatgaaagcaaaataaattcataaataataatagtaagactatgaatatcctaaccagcttttctaaatatggcatttgaataatatgtgataccgctagctccagataattgttgtatcaacattaaaccaattccaacctgtacataaaaaaatgaaaaggtatgattttataaataaatcattactttcaccaacagtaaaatcatcaataactagccttttcactttatatttctctatatgtgaattaccgtaccactagagttcgtctatacttcttctgaaacatgtcacaaaaactggactttgaatcttcttcaagcatttttgtcataacctaaacataagtttaccaaacatgtaactagaccaaaaacttcaagattctatatataaaaaaaaaaattatttataaagaaagtatactaataatatttaaattgctaatgtttataaaatatacctgaatttcagcggcttcatctgaaacatcagcatctttccctctaaggcgatgcagagagttttctacttctttaactgaaccgattttagcctaaaaacagtaataaataaataaatttaaaataatttaagaaagctctatatattcatatgaaaaatttcacagtcgatctgaaatatataaagaaaataccaaccaaccatcttggtgattccggtatgaaatatataccgatcactggaatgaaacatggaagagcacctgaaccggaatatatacttgaataaaactaacatgtagtcttcacagaagattgaaataaacaaaaatgtacatgttgaaataaatattatactattattgaaagaaaaaaaatgtaaatggcttgcgaggagatatttcgttacctataacagccagaacccgccaattaattacagttccgaaaaaataaatcagagaaattccactgttttgaagaagctataaaaccagaaataaaaattggttggctacgataaaaatggtaaaatataaaaatgtgataaccaaaaataaatagataaaatttaccagggttgaagcagaaaatgcgccacgaacatgtttaggagtgatttccgcaatatagacagggaccttttgcgaatatttaaatattgattttaagaaatgtgaaataagatgaaaatgaaattatgtattaattatagataactttaaattaccacgtagctagtcaagcccactccgatgcctaaagaaattcttcccaagtccagccacaagacattcttttcgtttccacataaatcatgtctatgtattagatatattgacaatttttatagaaaataattaatcgagttttgggattcacacctttgcaaaagcaatggagagccaaccaaaaatgcagaacaaatcgcatgcccacaacgtctttaattgttattcataataaaaaaataaagaaaatttattagaatttagtactaagaaaataattttgaaagaaactagtgtataattctctatgtaatagtaattactaatttactagtatgattaagaaatagggtaaaatggtaatactcgtcttctgccaaggatgactgctaattgaccgctaaacaaagctcccaccgcacctcccaagttcaaaaaggaaccaaacgctgaaaactggaaaaaaaaatatatatgaaaatttgtgaagcacacttacttcatcaaaatgctaagttgttcctgacaaaatgcaatgctaaatatagtattttctctcaatgtagtgtgtacttgcatgtgtctcttaatatatttttccaagccatttttttctactcataactcataagaagtagtcataactgttggaccacaagaaacaactagatacagaagaacctattatctccagttgcgaaagctatatcttatttatcattgatgtctttatacgtaactacatactatagattatcaatttcattttcttcatatcgacctggcttgtgtgttaagagtctgatcaattaggattaaagggtatttaaatatttattacaaaagctaaattgaaaaagaaagaaaaaacaaagtacatacttgtgccatagaaaggtctaactctttcatgattgcagtttcagcgccggaagtataaccattctacgaaattaaatcatttgatcaattaagaagaaattacagggaaaagatctatataaaaaagaaagagattaagactaaagagataaataataggtaaacccattggtcggaaatccgagtgactgttgcatgtatagctaagattaatcattatcttcaatacaatttgatcaaaatatatgtggtgatggatggataatgggtgaaaaagtcccttcgggaacatccgataaaaatctgtggtgatggcaaaaaagagtagagagagaaattaagaaactcacagcacatccatagctgaaggaactacaaacagcaacaaaagtgctgaggataacacaagctgtgatacgacgatcatctctgtcgttttcatgccgaagaagtccttcttccatgcttttattttcccccgccaccactcttacgcttaatttctcctctctttatatattaattttccaaaaatcttctaataaacaaaaagaaatcttgctgattataaacagaggagaggacaagatagataaaatagagagagaaaatagatagagaaaaacagagtttacacgtggggttcaagcacttattgacttgcacaagtggccagtggccttgctctagatctttttttcctaacaattataaaaatatttgaatcataagaataaaccatcataatgtacttagccagatatgacaaaatcctcagtgccaaaaatttaaaactacacataatttaaatgtgagtttccattaattctgagcatattgtagaatagggaactgaatgattctattagataggttaagtacaatatagattacaagagagattaaatgacagtcctagcctttacatatctatactctacacatattacccaaaccaaatactctaaagagcgatcagtttaattacaaaagtaaaataatcgagtgggattcttttttgaatcatggatatcggttcggttcaaatattacccaaaaaccgattaggtaaacaagcttttcaaattctttgacatatacattagcttttgggttagtttgtccaacttccggtttttgtgagaagtttgtccaattttcctcttgtcaagacaatgaatgatcaatgtacacttcctcttctttggaggagagaactcttccttcaaactccttctccatgagaggtatcattccggattcaatttcgaagaatatttcatcatcctaagtactgttctacaattttgtgtaaaggtctttacaagaccggaagttatgacgaagcttatctcaatgagaattgaggttttggattatggtaaaagtcacaatgtaaggtgactatgtcaaagtcgtatgttttcatcgacatctctttcgatgctaattcaaacttgtatcagtttgattatatatccttttatgattatgctagctttgttttgaaatcgtttggcatgcttgacttgtccgatacgtctgatcgttgctctatccttcatttgttgtcttaaactaggataaataaaccactgatttgcgaaggaaaaaaatgtaaaatattattaatatcaatatgcaaataatgttacaaaatacatttattatttgcaatgcgactgacaacagaaaataaattttatctttttaccaaacaaaattaatagtatattacaatataaatgtgcatttaggatgtccccgtaagcgaagcttgtaattcttccaatgattgtcctttggtttccggtacgagcatccaaataaaaatgaatgacattcctccgacagccgcaaatatgtaaaatgttcctatttaattattatatataccataaacaatatgtaaatgacctacttgaatttaaaagtatatttaacaatatatacctaaaaataaaaaataaataaacaaaaactcaatcatccaatctaaacaagaaaacaaaagctaaaagtatttgaagaaaacgtgaatctaagagatattttccgaccgcacattttgcacatctaaaactgtttgatacaaatgtcaaaattcgaacacgatttttaaataactttatgtttgatttgtgtatttttataaagataactcttaactttttttggtaaattgttttatccaaattaataaaaaagtaatagagaaaataaagaccttgtgcgctccattcaaacataaagttgaaagcgtaactcacgaaccacccactagtccatgatgttaatgctacaattgttcctgctgaaacttttatatttatcggaaagatctgcaacaacaacaacaacaacagcaaaaaacacagtaaacttttttttttctttcataacgtctaactatatgatttatataaattaaaatatgttatttacctcagacataatgacccaaggtagccctcctataccgaatgcaaaacatccgaagtagacctaaccaaatttaatttaagatttcttataacaagttaataccaaaaatttaaaataaaaataaaaatttgcatgaaaaaatgaataaatccttgaaagaaaatgaaagattttaccagaatgtttacgaagacgaaaattgggatcaattcaggaagcacattcatttgctgtctcagaaacaaacaaaaaaaaaaacatattataagacgaggattgttttgtccaaaaaaaaaagaggcgaggattgtaatattgatagttatctcatattagtccaatatagaaattctacaagagtaacctgtaacgtgaagctaactccaataagcaaggatccgatggacattccaacagcagaagcctagaataatgtttatcaagataatgttaataattattatactgttatattgttatgtctatatataaactgtatttttctaaccaataggagtggtcgtcttccccatctatccacaagaatcagaccaaccaaagcttttgggatctacaaagagtaaaaaataatcataatggtataatcgaaatagctttgagaaatttaatatcgtaaaaaaaaaatcaattagtttaaggtacgcaccacgaacacaccaaatatcattgatccaagtctctctgaaaagcctgtttaaacgacgaaaatacagataacataaataataggtagtattaaataactcctacgagtattatttatatgaaagcaaaataaattcataaataataatagtaagactatgaatatcctaaccagcttttctaaatatggcatttgaataatatgtgataccgctagctccagataattgttgtatcaacattaaaccaattccaacctgtaaattcaaaacaaatcattactttcatcactgtaaaatcagaagtaaataattagccttttcactaaattccttcctagttcctaacttcctatatatgttaccgtaccacaagagttcgtctgtacttcttctgaaacatgtcagagaaactagactttgaatcttcttcaagcatttttgtcataacctgaaaaagtaaaacaagcatataactacaattacatatagagaaagtgtcctaataacttaacaaaagaaagaaagaatattaatagtaataatacagtaatatatactaatagagagtgatttcttttaaacatatatacctgaatttcagctgcttcacctgaaacatcagtatctttccctctaagtcgatgcaaagaactttctacttctttacttaaacggattttagcctgataaaaacaacaacaacaaaaaatatatataaatgactgaagtaaaacgtttacatatttatgtcgaattcatagtcgaaatgattaaaaggaaatgccaaccagccatcttggagattccggtataaaaaatataccgatcgtttgaaggatgcatggaattgcacctgaaccagaaaataaaattgaaactgatcaacaaaattcacttgttgatattgaaataatattgtaaacgaggtatttcgttacctataacggccataacccgccaattaattacagtcccaaaaaaataaatcagggaaactccactgttttgaagaagctataaaaccaaaaaacattgggttgttacaatagaaaaaaaatatataaggcaataagggtaacagatttgaataacttcttagagaaataaaataaaagaatagactttataaaaataaaaaataaaaagagtataatagagtttacctggtttgaagcagtaaatgcgccacgaacatgttttggagtgatttccgcaatatagactgggaccttttatgaatataaaaatgttggttttaagaaatgtgaactaaaacaataaaaatgtagatgagattaccaaatgtaattggtgtaaatatttgttcaattaccacgtagctaatcaagccgactcctatgcccaaggaaattcttcccaagtccagccagaagacattctttttgtttccacatttattcaaatatatatattagatatttctacgagcaaaattattttaatcgaaaaataatttaggatttctgtggatttacacctttgcgaaagcaatggagagccagccaaaaacgcagaaaaaatcgcatgcccacaacgtctttaatcgttaataaccacccaaaaaaaaaagatatatatcaatcagaatctacgaaaatcattgcaaagaaacaagtattaaaaataaacaagtgcataatttgatgtactaattactagtagtatgatttaagaaatatggtaaaatggcaattactcgtcttctgccgaggatgactgccaattgaccgctgaacaaggcccccaccgcacctcccacattcagaaaggagccaaacgctgaaaactgatttagaaaatgtgatttagttattgagaaaaattagccttaaaatacttatcgattacataaaatggtggaaaaaagttagcagtaagttgtgtggtaaagagttactaatcacaaatacttaatttttaagaattaaatacctcaactttttttcaaaaattccaacagtagtacttaaaaagcttttgtaaacatttctaagtacttcgtatactatttgattattataaaattaattcaaattaaaatgctatgctgtttgctaacttttttttgttaggtaagtaaatcgtgtgatcttttgattagtttacctatcatattaaaatttgtcagaagaactatattcgataactgaaataattattaatataattgaaaatacagctatatacaacattttaatattgctcatgttcaaatatgacatacggtgtcggcgtcacatatgcatgaatgcatctctgatctctccaagtacaaaacagctatcatatcgcattttcataatattcacttttgtttttttaaaaatataatactttatatatgggaaaatattcattttccaatattaaaatacgtatctctctaatattcacatacgcatctctcagaacgtctgtacatgtggtctctcaatatagttaactttggaccgcaataaaataaataattcgtaagataatatttattatagaataatagtaataaataataataattcactttcagtagcgaagctataatttatcaatgacgtctttacacgtaattgcgtatgattatccatttgattttcttcataaccgacctggttaggtctgatagtttagtaatccatacaagaagatttacaagcagctgatgttttagttcataaacaggtgtaattatgcattttaagcataattaattagggattaattgagtatttatagtgataaaagctaagaaatgaaaaaaaaacaaattacatacttgtgccatagaaaggtctaactccttcatgatagcagtctcagcgcctgaagtataaccagcctatcaaatccaagaaattataatgattattgttcgaataattaagaagaaattaagagattaagactaaagtaagaagttttagaaactgacggcacatccgtagctgaaggcactacaaacagcgacaaaagtgctgaggatgacacaagctgtgatacgacgatcatctctgtcgttttgatgctgaagaagtccttcctccatgcttctattctcctcctccaccaccattcctaaagactaatccttcaatccaccttattttctcccaagaaatcttctttaacagaaaaaaaaaaacacaagaaatcttcttgattaattgatataacaaacagaggagagagagatagagagcgagagaaagagagaaagagagaatcagagagagtttacttgtggggttgaagcacttcatcatttccacaagttggtttgttatagaatacgatttcgtttttttattttattttaaataaacaaatattatcatttaatcatttcgagtttcgtttgtcgctttgcattaagataataatgccaactttgaatgcatcctagtgaatatagctcattatctgtcctcaatacaagttgtacgttcttttctttttgttccaaatagttcttatgttagagaaaaattaatatttagataagattatgtgtttataaaatataaaagacaaaaatcaaacataaaataaacattaccagtgataaaaatcacagaaactttataatttttctacaaaaaactgattaaccagactcagaattaaattgaccaaaatcaaaggaaatattccgttgaagcgtatccaaataactctagtccaacgtgttacatattgccaacataaatatgactaaactacatcaccatgtttttataatgttttaccaaataaattaaaaaatatgggcttcaataattgacctacatattcgttgggcgcatctaccaacgaatttacaattctgttttaaatcttttacagttcgatcgagctgttttaatttattaaatttacagttctgttataaattatttttactcaaatcaagaaagcctaaattaatttttaatgggtgttttatctaaaacctctgtgagaattttgtttacaaaattttatatttatggttgaccaaaatgaccgttggagtacttagctaccgttcgttaaataaatttacagttctctttttactttctttttactcaaatcatttaacaaaatttattcacaaaggccataataaattaataatattttagcgggtattgttcactaaagtttgacaatttgatatagtattttggtcatacgcaagtcttaatcaaagtatagtatttttgccaaaaataaaaaattatcaggaagactcgggaagattgagtaaatttctccatcctatttcaaaagtcgtattattttaaaaacaaaacatgtatataaacattttaattaggtgattctcaaattcaattattttctaaaattaagacggaaatactttaaggaaaaaatgtggatcaagttgtttttaccctaagcaactaatgctagacaaaaacagaaattggccacctaatggtctcaatattgttttttattactgttcaactgattttaaagaaaaaaaactaacgttcaaccataatcatcgtttcatttgtaatacgaggtaaagtattatacatacctaaagtctgtaaaacaaaggatatttgtacctttttgtaaaagaatattgaaaaaactgtacctacatctgtttttaaacaaagaatggtttataaatgaataatatatgttaatgttttgtttatattatcggtgaagactatataaatgggagtttgttgagaatcgaagactataaagttttaaacgggagttgtgttaactaactcacttaataacaagtaaagtcaagcatagcatagtgtaacgtgtttccaacataatgatgatggttatgataatttattttgcgtcatatggttttgtatcgtcacgatcgttgacaattacatggatttgtttgggagatggggtggggttaattagcatgaatgattactgaattattaaagcatggtggacaagtgagtaaataagaccccatccttctcatattttaatctacccaatttggatgcccatcccatgtcttatcacacgttttttttttctcgttggtaatcattctcagtagctaagtttttgtcaatacaatatgataacgaattggcaatcgatatcttcatcagacactatccttattactgcatagtgttgatgggattgtccatttcttctgtaccgcccatacacatttcgttgtaatattggttccttttgcggtttttcatgatcgttaagcgggtccaattcagtagaaaaactaggttttgttgtatccactatgaatcttctcttgcaggaccacttctgaaaaaataaatttacgttccataattaagaagaatatatacaaatttataaatagaaaatattaagcatatggtttaaccctttaggcttggtcatgaacgtaatatttctttgaaattagaaaatggtctgaaaggaatcaagactgagaaggacaagaaacgtagacatttccactatctaaaaacttgaaggttatcaaaatttattgttattatttttcttgttataggttgttgatttctttcaaacgcaactttttttatatataccatatttttatggaacaagacatgtaagatattttggtaagcctaatatatcccttttctagagcacgtacgtagtagtgacatgtctaatgatatttcttacaaacggtactttgactaattaatcaatcgaaaaatatctcacttgtttcttgaaaatctttttgtaaaatcattagagactttatttgtatatatcacacactgaatatatatatatatatatatatatatgtatatttatgtagtttaaattttgagtatggtagtgtctaaaaagaccgagattttttttttctttttttttttcccaaaatgtacatttggtctttcaaaaaaaaaaaataataataccaaaatttcagtatataacaatttaatctgtaattatttaatggagtaattgataagtgatgacttactgattatgagattgtggtggtctgtaaaattagtccatatatattgtaaatttgtaatgtttgaatagcgaactgtagttgaatgtgagtaagatccatagtactcagagcataatcatcattcgaccaaaactaaagattcagtcaaatttgtgttgtatttataataggcactattaatatacaccaaattgttattatgaggttacatttatttgggcctactaaaatccaaataaagcccaacagattttgagaaactataaatgagctgacatttgttttttctttcatttattttacatgggctcatcatcttggactacaaatctgttaccgggctaacttctttggcccatatgagtggaacataagagatacgattctgtgttttttttgtcggctacgtttctgatttaacatttcgtttttttttggtatttaacatttcgtttgttgaccgattaacaaaataatattgtttttccattaacttctttaaatgcaaataataattcgtcaattaagaattatttaaacaaaagagagatggtggtttgccacgttaaaatttaaacctaatccaaattgaccttttaatctctgttttatttaaaaaaacatataattgttctctagtgtaatgtaatggaacagacgtggataatatttataatttataattagtcattaaacattatcatatgtttaaaattggaaacattcgttgtacgtcaaatattagttgttatcttactgcataaacaaaaaaaaagacgagaaattgtagttttaaacattacttaattagttaagctttaatattacgtacaaatttcacttaacttaagataaaataaacaaaattgaaactggtttggtgcttaagcttgagcaagaaggtaatgcaaacgaagcacactacacagagattctggatgaagaacaaatccacatgaaattcgattctcacatttcttctatttaattcgaatttcaaattgccatttctcagattccggggaaagaaaaaaaaacctagaaaagtgttttctccgttttccaatcatccatgagtccggacaataaactgcttccgaagcggatcatccttgtacggcacggtgaatcggaagggaatctcgacacggcggcgtatacaacgacgccggatcataagatccagttaacggattccggtttgcttcaggcgcaggaagccggagctcgtctccacgctttgatctcttctaatccttcttcaccggagtggcgtgtgtacttctacgtttcgccgtacgatcggactcgatctacgctccgggagatcggacggtcgttctcgcgtcgccgtgtgattggtgttcgcgaagaatgtcggattagggaacaggattttgggaattttcaggttaaagagcgaatgagagcaacgaaaaaggtcagagagagatttggccgctttttttaccggttcccggagggagaatccgccgccgatgtcttcgatcgcgtctccagtatgtttcacttccttgcttattcgaaactttctcatatctcgttatctatatgtacattgaatgatctgagatgatagtttagttaatttagttaagctaagcatggatttagatcattctctatgatcctgtcctgtagaaggagcaaaatttgaaggcttttggttaagtagcagaacaatgacattaaatcaaatgcatctgttaagaggaattggttgatatctgaccttagaacccttagatcgattggatttgtgttgccattcatgcttgatttcaggttatgatcacagtttgagtttgatacattcactgtgatgaagtctctgattattctattatgtcttgaatagaaaagaaagaggtttttctaacaatgaggagaaagtcagaattgaaatatttactttccatcaatctcttttgaaatgtcacgaaagcaaagcttttcttccaccaatctttgtgtgaatgaacaacaagagattaagacatgatgtggtctttttgcgtgctgttatacaggttttctcgagtctctatggagagacattgacatgaacagactgcacatcaacccgtctcatgagctaaactttgtgattgtctcacatggcttaacatcgcgtgtgtttctgatgaaatggtttaagtggtcagtggaacagttcgagggactaaacaatccagggaacagtgagatcagagtgatggaattaggacaaggcggtgattacagcttggcgattcatcacacagaggaagagttagccacatggggactgtcaccagagatgattgcagatcaaaagtggcgggctaacgcgcataaaggcgaatggaaagaagattgtaagtggtattttggtgatttcttcgaccatatggcagattccgataaagagtgcgagactgaggccactgaagatagagaagaagaagaagaagaagaggggaaaagggtaaatctgctaacgagttcagaatatagcaatgagccagagttatacaatggacaatgctgctgatactattttacagaacaaaagcatacatgagaagaaacgtttaactaaagaattcagaagatttgattttgataaaaacttgtaccaatttactgattaagctttctggtgtcttagtttgtagcttttggtttgtggaaaagtgttgtacacatcgttataacaccaggaaacattacaggaaatttgaaagattcattttattgtgacaaagcatctatctttgtgaaagaaaattggaaaaatgcctttttttggaaatgaaacagttaagtttatggaaattattcatataatcataaataaaccagttaacatacaactaaatatatatgtaatccataaagaaagtgataatgtaactttctttgttacattgctaaagattcaaagatgacgccgtctcagagtatttaccggtgagaatgtgtagtgcaacaaaccgatttgcagcttcagtgtaatgaatgccgtcccagttaacatatttggaactatcataacaaggtttggcggttatgatcgtaccatttgatcttgctgtcttaccgcaaccaacctgatcatcgtagttcagtggtggtcctccggttccacaacataccattatcgaatgatcaaaacctattaccataccaaaaaaaagtttcaagcactgttaacttgcacataagtaagttttggcattccggttaaaatgccaccactaacacaaaagtaaaaaaatgctttctaatttgagtgaactgaacattattaatacttagttacttaccatatttggaatgattcaggatgaggtcggatttgatagagaagatatctacgtatgtgaaacgggaattgggatattgttgagggagttttttgaaaagaccatgaagctgcaaattgaaaagcttagcagcttggttatggtcactgacacaaccaaactcatcaagctttgatttgtcttccccaaaaattgacacaacttgtgctaaacacccaagtggtcctgtgttgtgtatccaatagtttcttgccccctctgcatataatctctagataaagaattacaaaatgaattaatagtatgatgatatcttatactcaaatcaaattcaaatatttcccccaaaaaatgattatccgtgtaacaattaacaaagtgtcatttatagttttatttaagattgaaaaaaaaacgaggattaagattcatgtaaatactaacctttattccatcttgaaatatatctaagattataggaaccagagcaagaacttgatctactgtcttggtgtaaaatgctccggcaatatcattttgtccgatatcaaacatatacaatccattactaaaaaaatattcggacggtaagtatctttggagctcttcatctgacaaacaaaagagaaaaaaaaaaggtacattggtcagtgactaaatgattcaactaagtctaaaatgttgatgaacttttggtatcatttgctatttagttaccttgttgtatcaattgaaggactttggacttaaaggtgatgaattgagagacttgaacaccaaaaccaaaggggctataggatgcagcatttgccttctgaatcgttgacgcagccgcagcaaaattgcagcctcttcggtaagtttgtcgacttatcgaatctaaataaggcctcaaatatggtcgatcaattgcttccactacaaaaacatatataaagcccactcaaaaacttatcatgtaacgagttttatggttcataagaatctttacacccacaacgaaaattacatgagcgtgaaaatcgcgttatatcaagatcaatcagatcatcttgtaacgttttaaaagtcatgttattaactcgactagtttgttatagttcatgcaatccaacgcttccagtaaaaacaggaaaacatgacaactttgccgttgaacaatttgtaaaataatataaaatcctattattattttgctacaaaaaaagtcatgaaaactgaaaaaatagaggaaagattttaaagaataaaggaattattagaaatgaagaatgattacttagaaaatcgacgataagacgtccattgcagaatcttccggaagttggagatctaaagaaggttatttcataggaaggttgtggaaggaatccaagacccgagctaagttctccggtgtcagagttagagtctccgaagttgaaaaccgccggaaagtcattagaaatccggaaagaaccggcgagaggggacagagtatgagagatggctacgaatagtaataatctaagaagagtgtggaaaagagtttccatggctcaaaacaatataatttcagccttatcatttcttacatactatatatacattatatattatggttttaacaaaaaaataaaataaaagataaaaaaaaatatacatccttatgtggatacaaatgtatgcgtgtatacataatgtaatgaaagtagaatgtgagtttgcttggaaatatagatagaaacaaatgatgaagtcctcctctcgtgacattttttttggttttatattcacggaaaccacatcaattgcactattgtgtcgactttacgatatccgaagataaaaaagctcagtatttgggtattaataattaacggtcgtgagaccccatttatattttgtatactgatggaactaaccttttcttttataattgcatgagatgcgtattttttaggataggcccaataagcctgataggcccaaatagttttttcgaggttctctagtaaaaacatcaatatagctggtaaaatataaaatggaagaaatcagaatctcgccggggctatagcttcaccgtgtcgtgtcctaatctattgtcgggaatttgaagctaaagtaacattacaatgaggaaaccacgaacggcagagatggtgatttccggttatttaaccacgattcgatactagtaaattgatatttctcttacattattttgaaggcttcttattttaatgaaagttattttttttttaaataggtaacacaaagttggcatcttttttttgcttactaaattccaagcaaaatagagaaagaattgatatgcgtgcaagtttctgtccaaattcttgtcttttttggaggtgtggtgttgttttatcgacactccactttacacttcacaagtcacaacacttataacaaaagtgatcacagaggccagagttgagagtttgacaccgtcatcaatggcagaaccggaggtgattcactcatggtctgcaccaagatctctcagcaccagcctcatgtactcctttgctcaggtactatacccaactttttcctatcttcttgacaaattttccaagtgttaactctaaagattatgatcatccaaaaccaaatctcaattctgctttgctcgttttgtctccactgagaaaaaattgagtacgtgttagctccaaagagtaaagactatgatttatctaataaataacttggaaagtttggaagaacaaaaaaaacatgagatcctagaaagaatgaatcactatggagatgatttagtgttctttttctttgtgattgatgttgtatctatatatcagagacttgacactgaagttgtcgacgagccgttgtatgcatcatttcttaaagctacaggttttgataggccatacagagacgaagttctctccaagatggtatgtaactgatttgcacttcagtagttagtctttcttcgagtacacgagtttaattttccctcttgtaatttaaataggagtgcaatggagagaaagttgtgaaagatgtcatatatggatcaggatctaagaagtaccggtattgtaaggtaaaaatcctctctgattgtttgttttggacgcttcaaagttcatattaccaaactttctttgttgtgttgttctgtttttccctctgaacagcatatctcgaagcagcggcttttcggtttgccaagtgaactgatgagtagaggaaagcatttcatattaatacgaaatcctcttaacatattggttagctttctcatcaaagactggttctctgcagatttttagccaatgtttcatctaaagttcttctgtgtttattcgttttgcagccttcctttgagaaggtacaccctccatcatttctcgaattaggcttgggggaattagtgtcgatatacagtgatctctgtcagatgggaacaccaccagcagtcatcgatgcggatgagcttcagcgagatcccgaggttttgtttctgtaatatttaaaacagtaaaagtttcacaaagatgtctttttctcttacatattattccaaccatatccatgcagactacacttcgcggtctttgtgatgatttggagattccatttcaagcctctatgcttaagtatggtcctctcctaggagacacttaaagtttgttttatatcaaagcattaagtttcacttttgtttgttatgttctcttgaagatggaaggctggtcctataccagaagatggagtatgggcaccatggtggtacaagagtgttcacgaatcaacgggtttctcatctccaaagaagtatcctcgggtaaggctcttgtttcttgtgtggttaataattctgaattcagtctaagatgtgtttggtattgttcttttccttcagacattccctttgtcgcattacgatttgctggagcgaagtctaccgctttacaacattctcaggagccacgtgaagcacagttcctccctcttgagtagtcccttgcctcctcctagtctcccagttcctgaaaatgcaaaacttcttgcatgggtcggtgacgagattttgcctcgtgaaatggcaaaggtgtgcttgaaatgtggaagaaaacttaacagctcactgtttgttgatttgcattttgaacactgattatgttctatttcttcttatttttgtaaggtttctgtttttgactcggttgttcaaggcggtgactctgtatgggaaggacttcggatttacaagggaaagatattcaagcttgaggaacatctagatcggtaagaacagttatatccagaaaccaagaagcaaataacagagttttctaagcaatcctgttttatatgttggaatcttgggttaggttgtttgattcagcaaaggctctggctttcgataatgttccagcgcgtgaagaggtaagcatctgatgatcgtagtgctatgttttgttctgttaaaacgacgttaccacgatagctttttattgtggcataacatgcaggtaaaagaagcaatcttcagaactcttataaccaatggtatgtttgacaatacacatatcaggttgtctctaactcgaggcaaaaaggtatttcaactttcttcgacaccgatttaagaaacttctgttttcatttagaccattgattagtctaaagaaaattgtgcaacttgtttctttaaggttacttctggaatgagccctgcatataatcgatatgggtgcactcttattggtaaacctttcagctttatgagaacaaccagttgtgctaatatgattaccttggagtttggtttacatgaaagatttgtgttctttctttcaaataatgcagtgcttgccgaatggaagcctccggtatatgacaatgaaggtggaattgtgctggtgactgcaaccacacgccgcaattcgcctaatgtatgaatttggttccacattctcttcatgttacaacataaaaaatccttgtctgtaaaattgttggtttctaaaattctttttgttttgtcagaatttggattccaagattcatcacaacaaccttctcaataacatactagcaaaggtactgtattcaaaataagagagttcaagaaattgacattgtgtttttactatgagattaattttctctgcaaatggaacaaacagattgaaagtaacaacacgaatgctgctgacgccattatgcttgacaaagatggttatgtgtctgaaaccaatgcaaccaacattgtaagtaaccctttgatgatttatccgcaggattttatttcgatagattattaagagactatatatagaagctaatattgtcaacaaatttactttatgtttgacagttcatggtgaagaaaggctgtgtacttactcctcacgcagattactgtctccctggcataaccagagcaactgtaagagaaattttcactttcttttattgagaatttctataaacaggtttttttattgcttttctccttcaatttttaaaaggtaatggaacttgtggtgaaagagaacttcatcttagaagaaagaagaatcagtctctccgaattccatacagctaatgaggttctttcagcttacaacttatcagtttttaaggggtcaaatcgaattatctgtgcctctctctttctctacaagtatctaacaataatagttttgtttttttaaaggtatggacaacaggaactatgggagaactaagcccggtaagtacagaacagtctctagtagcttgtgaataaaacatcctcaatcgttctccacctgaatgtataacattcactaattaaaactttgaataaatggaacttatatctaaagttcgtgatgaaatcttcaggggatcttacttaaaccatatgaaaacactaaatctttgagcatagtaatatcctgttctttggttacaggttgtgaaaatcgatgggcgtgtgattggtgacggcaaagttggaccggtaacgagaacactgcaaaacgcttacaagaaactgacagaggattcaggtgtgccgatacctacttatcaagaaccctgaaatacaaaaccagaggtaagttactgaaatattaatatatctgagagtagtatatatcaaaatgtttgggtatgatttaaaaatggtagcttagcaaatacaagagtagattaaaaatcatttaactttcacatgattcaagtggtctttataccgtttatttaggatttggacacgagggaacttaataataaaaagcattctactctcacatgattcaattggtttcaaggaaaaaacatgaagcgtttacgtcatctttaatagagccagttcctttcacataagtgtagaagctctctttctttttcaggtgataccaatgttgtaggctttgtagccttcttgtagtcgtttcttcttatcttggcacaaaacggcgaggagttttatgcatggtgatggaaaactgtgtgtagttaagcttgtcgagtagacttaaatcaaagtcagcatttgcttattggaccagacgttagaagtaagaccataaataaagccaccactcgagctttgattcttttccttttctcaaaagttcagtttgttagtattatttttgtttttttaaatagagagatcaattatctaattgcaatttgcaaccttaacatgaatattagaaagacgaaaaagaaaaagtagaggtcgagggaagtgaacaagaaaaagaagaccattaaggaacgttgttgaatttttaatggatttttaactagctttcatcattcacgtgaaagattcaagagattaaaaaatgaaggctatattttcgtatcttaaaagtctcaattaaacaatgttttataaggctgtaatcttttttatattttgaagtttgatacaaaccagtaatcactaatcaattacatatcatgaaagaataataatgaaaacgatggtgtatatcaactttgacttattcaatttttctttgagttaaaagttggaatgaatcaaattaaaatatactcaatattatagatcctttattaaaaaaatcgcattaaacatacttttcaaatttagtgaataatatatgttccattcatctttgacaaaatgccagaaagatgagaactatagaatttccaatgtattttgaagattacttatatttattgatgtgataatatatgcgatagggtttcggttgccaacggtggcagttatcttccttgattatttttaactcgcacgattcagggccagaggggtccaacgttcgcttaaagtgtttgcttaatgggaaccgaatcatatatttataaaaacattccaattacttctttttttggttttaatgttaagattcaaaggcataacttgcttatggtctaaaaaatttcgttttatttctattaatttgggaacctgattctgttggagatttgtcgtctctttgagtttcttttacttgagtggcaagtacatttctgatatttctttatgacttctcacttttctttatcacaagatattttgttgatgaaagagtttttttttttgggtaaggaaacatgtaaatattttagtgagtcctcatgttggccgatagccatatatataagagattctgataaaccgttgaaaactttaacccaaaaacaaaaagtcctttctgtgacatcgaagtgaaaacgataataaagaaatctagcatagttttggacccaagaaaacgttttactctctattttgacaccacacaaataaaaaaatatgtcccaaatgttagctaaacataattaactctcgttaaaacaaaaatgtgatggttacgcgtgaaaatggatgatttatgtatttgtgattatatttccaatattttgctagcctactgaaaagtttaacgaaagcaatggataatggaaagattacaaacttttatattcgacataattttaccaattaggcaacgactttcattacacaaaattgcggaaactatacaaaattagccatggataaaaatggaaaataacaaaccgaaacttggctgtaacaaaatctgttagggatgtttcataaaaatatacaccaaactaataaaattcgaaaccaaccaaatgataaaattttgcctatgaccaaaaaaacataaatgacacaatgtgaaaagaaaaacatatttgttgattggaggaaccttcctgttgccacgtggaacttgaagtttgacacaattgctgacaccactgtactacctatctcttctttatgaatcttcaaatgtctttttttacgctataaactcactttcttctcctccaagagccaaataaacacacaaaaaaaaactcaaaatcatgagaagctccgatcatatggcgtttgccggcgttttgccgattgttttcttgcttatattatcatcagcggatctagcagcgagtcaatcacagcccggtccaacaaatcaaccgtataactacggcagactaagtccagccatggcagtgatcgtcgtgatcctaatcgctgctctcttcttcatgggcttcttctctatctacttccgtcactgctcaggcgtaccagacgccggtgtttctccagctggtggagctagatccagagcaaccgtcaacgcggcggcgcgtggtctcgacgtttcagttgtcgagacttttcctacgttcttgtactcagatgtgaaaacgcagaagcttggtaaaggagagttagagtgtgcgatatgtttgaacgagttcgaagacgacgaaacgctgcgtttgcttcccaagtgtgatcacgtgtttcatccgcactgcatcgatgcttggctcgaggctcacgtgacttgtcccgtttgcagagcgaatcttgctgaacaggtagctgaaggtgagtcagttgaaccgggaggaactgaaccggatcttgaattgcagcaggttgtggtgaatcctgaaccggtggttactgcaccggtaccggaacaattggtgactagtgaagtcgattcgaggagattacctggtgtaccggtggatcttaaaagagttaaattctcgagatcgcatacgacgggacattcggtggttcaaccgggagaatgtaccgaacggtttactcttcggttaccggaagatgtgaggaagaggataatgaaggattggaaattgaaccggacgaatagtcttctggttcttcctagaggagggagttcgaggagaggtaaaccgattgaccggtcaagggctcggtctgatcgatggttgtttcgtaaaacgccttcgtttctgtggaggagtcgtgatgatggttcgattaggttaggtgctaccggtagcgttcgagccagtgctgtaccgaattcaaccggtagtgattcggtacgtgcaggagaccggtgggcttttcttagaaacgcgtcgtttttgtggaggaactcttcggtacatgtgccaagaggaggagtcaataaagacggcgaaggaacttcggttaaatcgaccggtgcaagtggctcaactagcggttcggtgagattaccggtttagttgacttttcttttctcatctttttcatttgtttttgtttgggattgttgataaatacgcaaatacattttcaattttttaattgaattatccttgttttgtttaaaattctctgtaacgtacatatgaagtcagatcgaaaacggattcacttttgaaaactaatgtataaaaaagcttataacaaaacaacggacaatgatgtgaggtgcgctgtggtgcaggtgggtttctcggtttttcaatattaaaaaagtcgtattcgtggacaaagaatatagctatccgatcccctgataaaatatatgctaatagaatatagttttgtgtttgtcgctaaaaatatgctaactgttcaattatgtgtttggtttataaccagagttttacttcctagtttatacacaatattacatgttctaaaaaacaccgactacgcttcacagaaagaaatccattttgcggatgcattttgagaaaaatctttagtcaaagtactactatttagaattattgcattttccaaaagaaataatataatttcatgcaaaattggttatatatgaaaattattgaccgccactaggtctccagtcaggtcacggatctcatcgtgtatgaattatcatgagtcaatttccatccagaaggattatcccttaaaataaatattagttaagggatatatgtaactctatgcatttatttcgctccgttatattacatgctgtgtaatcacatgtatgatgtaatctatgcatatatgtaactctagatactttagacaattggatgaagactgtcatagtgtgcaaaaatactggttttaatttgttttgtcgtctcgtctcgtctataatcttaagacacgtgttacgttgtatcaaatttacataattaatgggctttaggcttgaacaattaaggcccacaaaagcctgttaatcccatgggaagttgaggacgagaaacagagtccgggaaaagaaaaaagagctctcggagattcaatcactcatggcgaacgaagacgacgacggtgagaaatccagaagtctgcaccaacagattgctagaaaacccaaaacccagatcgtgattggtgtgccatcgtaccaggaagttttggaaagctcacagacgaagtccacgcctccatctctcttcaagccttcccagagtttctctcaggctttcgctttcgtcaagtcgtccgacgtctactctcctcctcctccttcctccgcagccgcctcttcttctcagccgtcgggcgcttctcaggtgccccacagttcaaggtgttatatatttgtttgacttacctttggaattacaaagtttagattagtttgatgaaattagtgctgcaattccgaacatttctactgatttttaccattcttctgcagtgatggtacgaaagtcgaattagaattgatatctctatgaaaaatgtgattttggttttgtttatttcctgagaaagaatgaaattttagacttgtaacttatgtagcttgatcatgtttctaaagattgaggttgaaaagtcggaaacttaatgtttcttacttcatcttcttgtgccaacagtcagattcagttttctgattagaatgttacatacatactaaatatccacttatttttgttgggtgtatgtttcttttgttgtagccaaacgcatcaaactgatggagcctcatcttcttctactcctgtagccactggctctgtaccatcaaacacaactcaaaatcgtaacgctattctcgttagccatcgacaggtgaggagacttaaacctccatgattcaatttccatcttctttggaattcgtctgacttatatttgttggataacattgatggtagaaaggaaacccgcttcttaaacatatcaggaatgtgaaatgggttttctcagatatcattccagattacgtgcttggtcaaaactcttgcgctttgtatttaaggtgaaactctgcaacttcaattttccatcaatgtgttaaaattcacaaaattttcacactagatacatctgatttactgcagcttgcggtatcatctcctacatccggattacctctatttccgcattagggaactacaaaagaatttcaagctaagtgttgttctttgccatgtcgacgtggtaagtcttaaaaccatattttgatgctaaatttctctctttttcagttacattgcatccagtgttttcgtttatgtactatgatacttatgcacaggaagatacggtgaaaccgttgcttgaagtcacaaaaaccgctctacttcatgattgcactctattgtgtgcctggaggtctctgtctatacatcaatctagttatttgcatctcatatgaaaacacatttcaagcactctgcttctcgttgataccactttctgtgtgaattctcttgcagcatgacagaatgtgcccgttatttggaaacgataaaagtctatgaaaacaaacctgcagatctcatccaaggccaaatggatacagattacctttcacgggtatggaaactctttaggctggcatattgattttttttgtcacttttgtaaattctcactgagtttatgatgtttgcagctaaaccattctcttacaagcattcgacatgtaaacaagagcgatgtagttacacttggttctacattcggggttgagctaaaaagaccttatgtccagttattgtgaatttatgatttttatgtttcaaactaaaattggaaacctcaaaaatcatggtttatgcagtctcttgctcatataatcgatgcatccatggaagatttagcacgttgtcccgggattggcgaacgtaaggtacattctcctctgtctataattggaaaactcaacaatcttgtgatagaagtctgaaaatcactgtaaaacctcaggtgaagcggttgtatgatacattccacgagcctttcaagcgtgcaacttcgagctacccgtctgttgtagaaccaccaatcccggaagctccagttgagaaggatgtgaactcagaggaacctgttgaagaagacgaggattttgtggaggactcgagaaaacgcaagaagaaggagcccgagcccgagaaaactgtgaagaccgcactctctgctgtttttgctcgttactctgatagacttagcaagaaaaaggagaaacagaaggagaaagatacaacaacggcgtcagatgctgaaacccaccaaaattaacacggttttgttccttgggtaaggccatggtgaccacattcctaggattgtaacttaatgataataaaaaagctttactgtgtctaatttgtgtgatctctaccatagaattggttggttattgaagcctgcgtgtataaatttcaaagggttgttactactttgttatcttttttcttggtctgggccatgtgcaatagtattataaacaaacaaaacaaataggcctgggacggcaaaaataagctagaggcttgatatagttagtccaagcccatgatctaaaattgtgttcgaattcgattttaaactttgatgatttccccgtggactaaggtgagataaaaactttcatatacgatgtggtaatcaaagaagacgagctaaatatattagtttggttttgaatttagtagatttaattttattaattaggtttgatgattaatactctagtttgtgaacaagaattaggtttgtctggtttggtttgcttttgtatagagtgcgtgttaaatgaaattcgaccgtttagcagctttttgcaaattagatatttaagatttgtagtttttgttgacatgtttcaaacgcgttagtcaatgtcttgtccaacatagacaacaaacacttgaactttgtgcaccactctttgcattattaacaactaaaatattactttattttctttttatatataaaagaaaagctttcggtgtaaatggttttaaattgcaatcgacaaaaaaagtaaagttgcaaaggactggtaaaagaaaagtgcagagaatatttcaagtgtaagtgaatcggtcatgagagacatgggtaaacaagtaaataaataacctgataaagtaaaagcttcatttttcgtacaatagttctgatcaaccaaaaagattgctggtccattcgttcagtattgttgatatcggatcgaactaacatttagttactaaattttagtactaacaactttttctttagaaaaaaagtttagaataactaattagttccttatgattatctagaggacttgttactcttttgtaacatatataacaaccctgcatttaaatattgtgaatgtgtgtatatatgtatgtgtgtttaatgaaagaaaatcaagttactgaggatgttggaacatgagggggacaaaagtgaaagtctatgatggaggaaaagagagatcaataattatattttaaaatcaggaacctatatattataaacacagtaatatacatgaatttgtgtgtatgtaaacaatgtaatgtatgtgcagtttttggaatctgacttccctctttttcggacgaaagcagatgtttccttctgcttcatgtctttgcaaacccaataaagtattctccttctctttttcttttcttgatccttgggatttgctctctttacacttttgttttcggttttgccccaatactcttcttgtcttgtggattttaccctgtaaaaaactatcaaacggtcatgattctaaagttaaaccgttagaccaaaacgacgttttggtaccaagaaataaaatcgcagtttgtttttggttaaagcttgatgaaacacgagactttggtttctgtattgtacagagtttgttactttgtttcaacgtccatatagtttttttatttggaaaaaaataatgatttattccaaaaataaaattgtaaaaacactaaaatgaagcaaatatattcataataaaaagaattaaactaaataagtatttctcatcacctaactttcatgctattgctcgatgatagtcgttaccaaccaattttatggctttaactcttttaggtgagagtattgaatacaaattgcaagatatttacttttgccacttataaaaacgtttatgaatcatctagatagtttaagttcatatgaagtttctcagataatagaaactacaaaacactaatcaagataaataaaataaaatgagaagacataaaataacatgaaccacaaaaatcaccatcttatcatcaacattcaacaagaatgagtcatttgaaataaagatattttagtgatttgtcacttaagggtaggtgtccttgcaagtgagggtatatatgtctattgcacacatatgtacacccatatagattcaaaagttgatgcatttgtacctaaccaaacaatacaatgctctctttaattatatatatagatacattgatagataccatagaagtgtcataatttatgtactctaaagtttgtgacccaattttggatatgcagtccaaaagcctccagctgtggacatccttctcactctcttttatcttttaccatagttgttaatcgtaaaatgttctattaacagattctttcaatatatataaacattcggatttaagtgataaaaatgggaaaagtattattttaaaaatttgttgtctttaacacgaatctagttcgtttgcaatgaaaatcaaacatattcttgaacttagattaattgatctacgcctttctcaggttcaattaatgtaaattaccattacatgcgcgtcaacccaaccaaattatattatctaaagttattttgattaatccaaaagactaatcatgcaataagacatataatcaaaaagctagtgaaattcatccaggtttacgtaagtgttaaaaatgtgtagacttagatcatcttctgtatagccccatgatataaatcaaaagttatgttcaactttttgtgttttcacattatcataatttattaaaaattcggattcatcaaaatataaatatcgttagtctttgtcaaatgatcagtaattcatatatatatatatatatatggtgtcaatctctatatatgttggggagtgatcttttaattttagtcctctatttgtataataaagaattgtaatattatgtttattttttttgtttttttaaattagaacttgtaaaaacgtgagacgaaaatgttcaatacatacatgtgtttcatgtctgcaattcgatatatagtttcattgcgaaacttacttctgagagatactttcaaaagatgaagtcaaaggtgttgacaaatttgctttttataatttgttttgagacttcgactactaacaaacttcgtctgtattttcacacgtatcttcccattcgtcatttgaccttcaaaatcaaacctaacacgtgatacatttagctcttgtgtttactctttttttgttggttagtatatacaaatccctatttttcatgagatcatataatcatattatatcaattatccttgtttattaaaaaaaagtatgtaccaggttatggccggttaatcttatttgtaagaaacatatttgttcatcattataacttaactgaatatggatcgtgatttaaaacagttgatacttacttgaaaatattttgctattctactaggcttgctaatcaaaacctgcagtatctggaagcatggttagtacgagagaagataaaagctgagcgcaagaatcaaatttttgtcaaatagtttgaagaacttttggatttttttttgcaataataataaaaacacctactaacttcatatgtttttttttgttacacagtttttaattacgaacaatgtatatgtttctataaaaaaaaatgtttgtattatcggttccgaaatagcttttagaaaatgaattttacgtgtcaaacaaaaataaagtgattttttctccttaagagatatatatttttgcgtaataattccaacagtgttaaaggtgggcgactaaagtatataagcacaaatttcagggacactttttttgggttaattatgtggacgattattgtatctgagcacacagtttaatcgaatgtttgtatagtatttttattgacgtaagcaaaatgccaaaatggtatggtatatatgatcattccaactctacgtgcattaacaataaacatgtaagcaattaccaccataaatggattgatatatagatattcattttcaaaatacagaatttggaaattgagaggataaaatttttaattactgcagtggatttgtgtagagcactagatgagaacataggttaggtccaacgtctataaagcaaacaaagttcataaaacaacagtttgatttggatactcattggcatgtgcttcaaaaataccccacatcttataatggttccaaaacattcacaattttattgattagtcaaaggtgtatagtagtggcgtactaaaagcaaataaaaatatcatttttatgataaattctatggaaaccgaaccacaaaggaaaagttaaagcctagtttcctcttaaaaataaaataaactgtagaaatattttaggaacatagctatgatactttcagtatgaatattatcttttagggactaacgtgtgtcatttttcttttgtcttcaattagatttaattcaaagatacctatagctgagcttttaaaatctttataaactgagttatacgaggtaaataggacccaacgttacaatttttcttaacgaattaattctaacgttctcttataattataacagcaatgaatttgaagttttgaacaataagaataaagtaattaaagaaataaccaaactgatatgtgacaaaagaaattaaactgacagcaatgttcgtcacgaggttggttttcttgatataagacgaaaaaacaacagagaaagttaataattttatctataaaaaagaagtgtctaaaatacctccgaaaatgattgctcaaaaaccctttaaaacaatgctaatatttatcccatctttttctcttatatatttagctttcgtggttttcttttattttctttggtctagcctttgtttttagctttcgtgttttatttgacttttttcggtcggagaaaaatttgacttcttaaggttccatggaccgacaccatgtacgcggttcaattcgatgacatgtgaatctatgcaagcttagtctgtgtaatttgtaattgtaggttcgtagagtatgtgagattcgaactatgaatagttttttttttttttttttttaaacttaaatcagttgattttagttattttccagatttgtcactttttgtataatcttaccacagatcctacacgtgtattcattctatctacctaacgcttactcacttagtgtggggattattttaatcttagtaactaaactcagtcaaagtcgtataaaatttaaagctgcactatgagaattaaaataacaagcacaaaatatcagtagtctatttattttcttatggaagaaattaatcacttactattatctcagtgaagtggtgcacatgcgtcacatgcattagcaagtaaatcgattttattgctaacatataaacccacaaaatatttcaactatacaattaaatagttcattaataattgatataaatcggaactaattggtggttgaaagctggcccaagaaaactctatctatcctccacagcaaagagtggaagcgacctacctgtcttatgacccattaaaaccccattaacattattgtaccctttcctgcttatatatttcgatttaaattcaattatacgtttgttattgtttaattttctaatcgagttttctaatcgagttttcaaaagatttggtttgatactactagtaaatttaatcgaattatacaattttttaactaattgagctaaccacattatgttgacaatctaacagtttatgtgagactttttagtatatcgatggtgtatgttaagtattatacgtaagatctagatcgcataatttagcattataggagtctttaactaatgtttaaactcactaccttacaatgtttgcgtaagtgatgttgttaaacaaagtccattttggtgacaaagacggtttcttgcttgcgattggatcctaaaccctctcgtcaacgatcattaaaatcattgatcacaaatcataattaatatcatgaaaatttcatattactatcagtgtcatacgtaaattattgtagtgatcgaagtttgcaaggaaatgatatatgcaatgaccaatattacttattagagaaaattcaatgtctaaataattgttagccttaatcaaaatatctggagaattacttaacacgtctgtctattaatatatggatatagacatttgacaaaatgcgaataataaataataaatcttcaataaaaaaaaacacacgagatgataagaacatgacaaacataaattattgaccatattaattaaagttgatttacatataaaccacacattagatatacgaaattaggaataatagcaaaataaaacaaggaaaaaaaacaaaacagcaaagtatttgtagttaaggaaccttaaatattcgaattaatcgtattcgggaagatgaatacataacacagctaagtacaaaagacgaagctgaggctgtacgttaagcttcttctttccctcaactctgtatcagaaaaagaaaaaacataaaaaaaggtacgaaaatttaaaaagaagaaaaagaaaagatttgatattaaaagtgtcaattaaaaaaagatattttgcaaaatcaaagttgggagatttccttgcaagctgtgccaccgccctctctctctctctctctcttagttttttttacagacatagaaataagaaaccctgaaacagagataaaacaaaacacaagttttgagtgtgttttttcaagtctctctcttctctctctgtccttgttaaacacagcaaccgcctttattacacaaaactctcttataataatctctctcaccatttcttctcttctcttcagaagaaagaaagaaactcataaaggagaagaaataagagtttctctgtcttaaactcattcattctttctctctctataaccagagttctgtctgtgaaaacacacaaatctaagagaagttatgaataaacaagatgttatgaaacttcaggtatacgtctccttctcttcttcctctgtttcttcaagcttgtgtttgatgtatatatattattcatgagctaattttttggtcggatttgttttttttttttctgcagacttgtgttctgaaagtgaacgtacactgtgaagggtgtaagcataaagtgaagaaacaattgcagaaaatcgaaggtctcttcttgctttctatttggtcatctcaaaattgttcattttgtgaagcttattttaaaacatgaacacaaaagtctgaaatttatgaattgggtttttctcagaagctatggatctatgaataatgatttttaaaaacattatcagctcaaatatatagaacttgtgaaatttatgaactgtgttgtgttttttttttttttttttttataaatgtttttccctgttttgtgagactttcatctaaaaggttacaagttttccaaaactatagagttcaaaattttgagatttactatctgtgtgtcctccatttatgtcaatttcccaaaactatatgaagaattttttaatcagtttggaataatctgacataaaaagttcctaattttaaccatagagtccaaagtcttgaaatttaactcatgagctgtccattcaccaaaaattactcaaaattatgttactttcttgagaagactctgacttctggtttacttgatattccttgatttcaggtgtttactctgtaaaagcagatgtagaacaggggagagttactgttacagggaacattgacccagctcttctggttaagaaacttagcaaatcaggcaaacatgccgagatcttaggcggtggtggaggaggaggcggcggaggtggaaaggggtttcctaatctgaatgggcaatttgcaaatctcaacatgggtggaaacaataagcctaaaggtggaaaagagagtaaccaagtcaagggtaaagctggtggtggcggtggaggaggtcagaatcatggacatggtcagccaatgcaattgaatcctcaacagattcaacagatgatgatgatgaaggctgctcacggtggtggtggtggtggtcagatgaagatgccgcctatggcagctaaggatcagaagaagtcagttaagtttgctgatgatgaagacgatgagtttagtgaagatgattatgatgatgaggatttcagtgaagatgattatgatgatgatgagttcgatgatgatgaagatgatgatgatgagatgggtcatggtcatggacatggaggaggtgggggtaatcacatgcctcctaataagatgatgatgcctaacaagatgatgcctcagatgggtggtcatcatggtaatggtggtggacctaagggtcccaatgagataatgatgatgatgaatgggttcaaaggcggaggcggtggaggaaagaaaggcggtggtggcgggtttgagattccggtgcagatgaagggaatgggtgagggtaaaaatggaaaggatggtaaaaagggtaaaggaggagagaagggtaagaaagaagggaaagagaataaaggtgggggcaaaaccggaaaaacagatgccaaaagtggtggtggtggccttctagggtttttcaaaaagggtaaaagtgggaacggagatgagaagaagagcgctgggaagaaagatggccatgggggtaataaggtcaaatctcatggtgggggaggaggagttcagcattatgatagtgggcctaaaaaaggtggtggtgggaccaaaggaggaggccatgggggccttgacattgatgagctcatgaaacacagcaaaggaggaggaggaggaggtaacaagggcaatcataatcatagcgccaaagggattggtggtggcccaatgggtccaggcggtccgatgggtccaggcggtccgatgggtcaaggtggtccgatgggtatgatgggtccaggtggtccgatgagtatgatgggtccaggcggtcctatgggtccaatgggtggccaaggcggctcttacccagcggttcaaggcttgccaatgagtggaggtggaggatattatccagggccgcctcaggcaagtcagcaaatgaaccaacaacaatatatgcaaatgatgatgaaccaacagcagcaacaacaacaacaacaacaagctgtagctcatggtggctatggcggtggtcacggtggcgacatgtaccatccgatgatgtacgctcggccttatcctgcagttaattatgctcaccctccaccaatgccgcctcctcactcggattcttatactcatatgttcagcgatgagaatccaggtagttgtagtattatgtgatcatcttttgtaatgttatttagaatatggacatgtatgcttgtcttagtcttatgtttttttttttggggatgtccttatcttttttactttggaggattggaaacaaaatgtgctttaattttgttagtggaatgatgtttataatatctcgatttcggaaaaagaatggttattggttattaggttgcagaaaaagtaggatgtatgttatgtagtgtttatcttagtgtgaaaaggatgttgcagccgcctatatagtaggtataacagcattatcatttatgataatcaacttgtatagtgtgccactactgttgtgtgatcacaccatattaaatttgacccataaagtaccaacctggagactcatgtgttgattatgatgtttcgaaagtaaaataatccaaaaaagtgtggagaaaactttgagaactatccattgtgttcgacccagttattttcgaaaggtcaaattagtgtatgattcgagaaatcactacagttgttttcactagtaagttagtaaccgttgtgtctcttatcaaaacttgaattcatattttggccaatatagtacaatattgcagacaatgtttccatttaccactcctttgccaatgggcttttttagagtagcacaagtaatactttggtataatctattgggcctgaaagagtggcatgccttagccttgtaataaactaatcccggtttaatcagtcaatcatattaatatgataccacttactaatacggaaaacttcccttctatgcttaagtcaagtcaaattttatgacaaaaagactccaattcgtaacaagaaaaattatacataaccaatatctcaagagatttattcttaaaccgaaataccggtttacatagtaccgggtgggtgattatacgtgtcttgaccaatcacattacagagactataactaaagagagaaattaatggatacttgaaaagaaaaaaagaaaaaaaaacgctcgtcttcttcttcttcttcttcttatattacttcttcctcccacacagacaaattttgtaacgaagacgggatcgcgataagatcacggtgatcgaaaagccctaagaagtattttcaagggaaagggacttaaagatgcatacttttggttacagagcaaatgctctgctcactttcgcagtcacggctcttgctttcatttgcgcaatcgcgtccttctcagacaaattcagcaaccaaaatccttctgctgagatccaggtgtttgaaattgtttaattttggtttattacatgtatcgatcgcttcttatgtggtggatctgcgtatgaatgccttgatttgtgacggattaagttgtttctgtgtctagcgaattgatcttcgtttgatttgattgtgggaattataatgtaaatgtattaagttgtttctatggatcttggaaccatggaaaagcctgagttttaatttggttgtgttgtgcttgcagatacttaatatcaatcggtttaagaagcaatctcatggtaacgatgaggtaacattttcatggtttccttaagtttatagtatacatacatctggagctttctcttcattaccgagtttctcgagttccctctatcgattgcttatattcaaattgttgaccatttgtttacatgtcatgcaggtcagcttgacactggacatatcagcagacttgcaatcactttttacttggaacaccaaacaggtttcttgcagtccttgtcctttgatattaccttaagccattgcataatagactgctcctggaggaaactattttactaaaatgctgacataaatagaaaatgtttgcaggtttttgttttcgtagcagcagagtatgaaaccccaaagaattccctgaatcaggtatgacagctgaatgcaaaggcttcttcttaggattgacttaagattggaactcttcaccaatggatattgacatttcgtttgcaggtttctctatgggatgccattattcctgccaaggaacatgccaaattccggattcaagtctcaaacaagtaccgtttcatcgatcaggtacagtaaacaagctggacaagtcttctgcgtttttacttcgtcagaaacggaaactgatcatcatttgggatttttcagggacagaatcttcggggcaaagacttcaacttgacattacactggcatgtcatgcccaagaccgggaagatgtttgctgacaagatagtcttgcctggttacagtttaccagatgcatacagatgatgaagattgaataaaacatcaaacctagtccaagactttttgtatttcagttttctgaaaagttttagactttcttttattccaaagaaaactaattcaaaagtactattgttctcttagaatcaaacaaaactattctttttagtgatcttaattagttgttaatgaggtgaaaatcacgacctcttaatttaaaataaggtttataacgaggtcaagtaggaccctgaattagaacattgtttcaacagaactatgacctaaaactttatctacccttttgctcttcatggattctctaattagcttaacatcagcccatcggccagctttggcgtatatattagatagaagaacatagattccgctaccaagttcttctggctcagcaaccatggatcttatccgatcagtgagctcgagattttcatgtatatcacaaccatttaacaatgcaccccatatattaacattgggttttaccggcatagtctttaccaatctctctgcctcttcaaaacgaccagcacggctcaagatatcaaccatacatccatagtgttcaactgttggttctaagccgtgaagatctctcatttctgcaaagtatctctgtccttcctcaactaaacctatgtggctacacgcatataagaccccgagatatgtgattccatcaggtgtagcattacctttctcttgcatcctctggaatatactcaatgcttcattcccgtggccgtgactggctaacccaatgatcacaacggtccaagctattgtatctttcttctccagatcttcaaacgctttttttgcgctctcagcatcaccggttttagcatacatatttacaagtgcacaaactatggcagcatccttcacaaagccggttttcgatacataagcgtgaatcgattgtcccaattgtgaacatccttggatcatggaagctctgataacactcaaaaaggttactttatcaggagctatacccaaatcaagcatatccaaaaacatacacagtgcttcctctgcatcaccgttctgactataccctgtaatgatggagttccaagaaaccaaggttctctcaggcattccatcgaacagatacctcgcagttctcagatctccacatttagcatacatatcaatgagacttgtagccaaaatcacattgaatccaactttggactgaaaatatggatcaaagcctaatccttgaagaaacccatgaaaccatttcccagtcacaatgtctttacatctaccacaagcaaccaaaagatccaccattattgtctcatttgccttcacaccattactctgcatctccctaaacgcctcaatagcgtcactaaaccgattgttattcacaaaaccagaaatcaaacttccccaagcaacaacgttccactgaggaatatcctcaaaaactctcaaaccataattcacttctccacaacacatatacatatgaagcaagcaagtagaaacatacatattcacttcaaacccagttttcacaacaaacccatgaacacaactcccgaattgaatatcccttaacccagaacaagccttaagaacataaggaaaagtgaaataatccggagaataaccttttcgaagcatttcttggtaaaagatcaatgctttatctggatttggactgtttgagtagcctctgatcatagagttccatatataaacacttggacaatcgatactttcgaaaactgatctcgcgtagctgagattcatagtctcaggacaagtagtgcagaaatctatgagtcggcttagaggaatgacgtttctgataactgaggatttgatcattaaaccatggagttgattcagttccaccaatgatctgcaattctctagctgagagagaattggtttgtagtgcttcttcatcatattctttgattatcatgaaattcaaaggcaatgtttttttttaattctggaaccataacaaacaaaaactcatcaaagtgacgggtaaattttggtaatttaaaatagtttgggtttattttgaatgttgaaagagtttaaggattattttgaaagtttcaacaaaagaaaaatataacctgtgtttagtcacaacgacgccgtaacgctgaatcagcgccaagcggagagagacctgagtcagtgagttggtatggcggcgaaggagatcgccggcgggagcggttctattgacgatggatccgattttgatccatgtcctatttgccttggacaattcctccgtgaatcctaccttgatacctgtttccgtacgcttcttctctttttcagttttctgttaaaacttgtggttagatgcttcttgatttcatctagaatttgaagttttgagtgtgtattcaaagattcaatcttttttttctgtgaacaatttaatcagattgattagttaattccaaaaagagattagattgattagctcttgtgtatcttagatagaccatagtaggtttatggttaaggtaatgactgagaccttcgtccatgaactgattagaacatatatgtttgttttgattttatgttttgttgcagacaagttttgtttcaattgtataaaacaatggatcaaagttgtttcaagcaaggcctctaagcaacgttcctcagtgacatgtcctctctgtaaggtctgcttcttggaaacgctcttttctgctcacaacaccttgaagaacttgtttacaggaatgaccataacttatgcagacagagaatttatccatcatccacaactacgatggatgttcttttgagcggcattatatcgacccgaatattccagatgggtaggttagcttgtggtttccttgatttgaatatatatgtgttctgagaatttcgtgatatcttactctactttcatcttcttgttttcagttttgtattaacaaaagaacagagatacaggttgcagtgttactacaccgaatcaggtttttcccttctctgcacttactttgagatcaaaacacacttgcgcataatattcaataccattacaatagttgggaatccgttactcgatttagtttggaataataaactgatagaaagtagattcaaatgtgtttatcaatcaagaatgaaagttttacaagaattcccttctctttctcggtctctttgtggtcttaaccaggtttcctcgccgatgtattcgatgttgcacggttttggaagctgcaaaagtttctccagccgaaccggtgccttgaagcctggttgaggagggagcttcaagctctgatgcaggtttgcttctgtacaaaatccctttcatggatatttctgcctttttgctgttatcttcttgttcagttgttcgcaaagatgattttgttctttgtttgcttcaattttttcccttgtctataggaggaagatgttgatattgttctgcatcatttggtcggtgtgatggaatccttctgcaaaaggtaattgttttaaggagaatgtaaaaacttagaactcgtgggtatatattttgattggctagagttttaactggtcaaagtagaagtttgatgttttgctcatgaatagtctctatttctctcatattcagaatcaaacagagacgcaaacaagaaacaagaagcgcagagacaacaaatcaagaacaattcaaagcagttgtctcagaagcagcacgtccatttgtaatggcgagaacagaccgatttgtggatgaacttgaactctttctggccgcgggactaaacttggaggcttatgatgcaatctataagcagggtttagaggggaacaaccgaagagagatcggtgcagctagtgaagaaagagaagaagtggaagaacataatgtaagaacacgagtgactccttatttgtttatcttcgaggaagactcagactgagacaaaacacttatcacttctgtaccatataaagaaactcataacttcgattaatgatataccagtttcgatttgtttgttttactttgtgtaatgctaacgaaaccaaccataccattttattctgttctcttttgttttcttcatattattcttcttttaaaaaaacgacaaaacaacatatcaccttattacatcacacgactatactactggatatactctctttgtaagaacttcctaaacagagtcatgtacataagcacttattgcaagctcaagcgttcacgataagaccacctgcacaaaaacacgtttgtgttataatagacgaaaacagagatcaatttgttaaaccaaagaaacagaggactctgatggaatgcccaatccggtctaaccacgtcaaattagaacttaccgtttggatggaggatttggccggtgtagtaagatgagcaatggttacaagccaagaaaacgtaggaaggagccacttccacaggctgagccgctcttttcatcggtgtctctgacccaaactgtttgatcgcttcttcagagaacgatgcgggtatcagtggagtccagaccggaccaggagcgacaccgttcacacgaatgccctttggtgcaagctgaagagctaacccacgtgtgaaagaaacgatggctcctttcgtagctgtgtactctagtaagcttgagtttcctgcgtatgcaacaaccgacgtcgtattgatgatgctgctcccttccttcatgtgctttaacgcatatctacaataaattacgaccaattaactctaaccggatcaattagtttcagaacctaagttcgagtttcagttttttttttttactcacttaaccaagaaaaactgcgagaagatgttggtacggaacactctctcaagcctagcctcatcgatatcctcaatggaaacctcatgctgctcagctgcacaattcacaagcacatcgatgcgtccaaaggagttcacaacttcctcaacgaccctcttgcaattctcttcaaaccctaaatcagtagcgatcatgatcggctctttagcttcccttgtcttaacctcgtgaagcaaacgcagcgtttcttctgcgtctttgtcctctctacctttaacgtacgtgaaagccacgctcgctccttcaagtgcatagcagtgacacactgctttacctatccctgagtctcctcctgtcacgagtgccacttttccctgcggataattttaaagataccttgtattacaagtagaagtaggtgtgtataaagggcaagttttctttaatatccttcacatattagttagtaattcatattggtttgctgatatctgatttattcttaaaccatagacaaaacgggatagaaaaaacaatcgaagcctatatacatgaagtttgttggaaggtttatagttagaactagagaactcgggagttggttccatgacatgttgtatccctggttgtgtctcttgcttctgcggcggaaacccacttgccattttcctattttcctttcagagtattcgaaaatttccgggaaaggttttggttattggcgaccgagaaaattaccgtagagatcgacagaaacaaataagataaagaaggtgtcaaaaagtgagagcttctttgagtgacgtgccacgttgcatctcaatttagatgacgtgtacaagccattgcaacggtgcagccagggaggagtccacgtggggaaaatcagcttatttgggataaccactagtcccattcagatatatacaacattggcatgcttcatgacaattgacacatagatgcctggctatttgaggcctctctttgtgtacatcaataaaattgattttatctttgatttaggtttttttgtttgtttgtggaacaaggcgcataaaagttcttctttctagattttttgtgttcatcacgtttgtaaccagatatcatagttactactttttaaaaataaatagtctcaaaatcttatttttaagtcttaacaaaggtacacaattatatacagacggtaacttagaatcgtgatcggtttgaaaacgtttataatttatagagaaggaaaattttaaaaataaaagttaaaatttaattacgtttaaataaactgaacttaacacctctaatcgatttcaataaattctatggttttcagcgtaatttaaaatatattattatactataaaaattacaaaaagaattcttaaaacttagttagaaaaccggaaattaaatttaaaacgtttttagttaaaaagaaaatctaaaaaataaatgttaaaatttaattacatctaaacaaattgaacttaacacctctaaccgatcttaagagattctaaccggatgctaagttcgattggtttccaacgtaatttgaaaattaacagttaaattttaaattttcttttaaaaatatatatttttatacttcaaaattaagatatttcattaaaaaaataaaagtgagaaagcaacaaacctagatttggtgactcgtccagccatggaaactccaaagctgctgctacttgctcttcgctttcactgtccctccctcgcatcattagccgccgtctacataacccaccaatgaaagtgttgcggtggtgatccgtatggaattagggtttgactgtagaaggtagtcacgtaatatcgaatgcacaacagacgatatagagatcaatctacgaaacgagacgatcaatctctgagatgaatccgttgagatcttcttctcaggtttctcagatgaatttgttgcagagacatggaatcatcggctttacaagattggcgatcaaacattggcaaaatttgttcgacacgtatcaaaaagaaaaagaatagaggttataaggagataatgaatggttttactttcgaacaaggagaatgaatatgattttgatttcgatttctgagagagacgacgagtatttataaggaaaagaatcgtttgtttccttttatcgacaattttggttgtttccttttaatttgtttggactacaaaaaaaaggaaattgatcacaacggtcataaataattacaacggtccttaatcccttgtatatttgatttgaccttgacaatagtcaatagaatctgaatggatataattttataaaatttgaaagaaaaactataatcttctctttccattgtttctattgacaaataatctcaatcctgtttactttctcatgtatacagagactcctttttgttcatgtgttctctactacacttttatgttcatcaatgggatctccaagtctcttttgcagataaactgctcatcaacatcatccacatttcagagtctattcattcttctcaccattcacgaagctcctgctcctcaagattcaatcaagaaatcttcaaatgtagctagtgactgtaatcgctgccccagcgacgcaatggttctctggcactctgcaaactttgaagcagccactgctagttccttctcctgtcattgtcacattgtcatcaaggagttttattacaaaaagaaattaacttgcgagttcctaagagaggatataaacttacctgcttcagctcaaaacctttgatatggttaggcgcaggctctgtttcttgatgatgctcgagttcttgttttagttttgagatctcatcttgcagttcgttgcactttgaattgtgttttgctgataaagcacgttccttctctgtgacgtcttccagtgatttgattttcaagatcaaagattccgcttctgcttcgacatctttaagtcttgattcaatcgcttcagttttcccgtttgcagcctttaaaccatcctcagctgcttcttttgcatcctttgttagatgcagcagagtttgaagctctgttaactttctctctgtctcctttagccgattttgcgatgtctcaagctgctttttcgttccatttaaacacatggtcagttccagcttctctgctcttctagtctctagttctgacagattcacttgtgctttgtttaactgtctttgaagatcctccatttgctttcctgattcacccaacaacaactctagttcctggttctctgcttctagtttcttcatctccgataacttcccctctatctcctttagtcgactctgcaatgcctcgatctgctctttggatccgttcaaagccatctccaattgtagtttctctacctctaccatctctactttttcttccagttcagaaattctgcgaagcgaggttttgagttcatgctttagttggttaacgtgagcattagatttctctaactccttgttactctctgaatgttttcttccaggttcagaatgcggcaaagcagcgagcttttccatctcgagaaaatcatccatcaaaccaatatctactgaagtagccattgaacttttcccaataatcttctctgatggactctgcatttcattatcactaaaagaaactctcccggaatagtctgattggttatctatagaagatttgaggtcactggaattgtctgatctccgaaccatgactctcagtttcctgcattccgcttcaagtttagtcaactttttgatcccttccaactgttgtttacttgcagactcagcagcctgagtgcttaagtccctctctatagttctaatcttgacctcctcagattttgaaagtagttgaagcttcaaagcagagttctctttctctaaagcctcaagtttcgggtaaaggtcttcgtggaccgaagaagtagtaacgtcttgtctagcttggagctcctcgattcgggcttcaagttgagattttgtagtttcccattctttgcatttattgttaatagcttcttcgatcttctgattttgctcttctcttccttgccagagttgcctcacgcattccttaagcgcactatcaagatgactatttcgatcctcgagagccgaaaccttacttgtagaagcatcaagctgttgcttcagagccgcagcttcgttctctgccttttcccaacctagatgtacattcgtttattaaccaagaactaaattcggtttctgctacaaaaagaaaatgtgacaagacacaagaactaacctgagacagcttcctctgcaactttagcatgctgtttagcaagatcttcttttaaactgacatttaaaagagctgcagagagcctctccgtaagaatcttgatatccgccgttgcctcttcttctcgtgttaccggtttagagtttaattccggtgattgagatctctgaagtttcacacacaaattacaaaaccaaataacacaatcaaaatgattaattccaagatttcaccacaatcacataatgtcacaaaggcattgcaaaaaagtgtaacctgatcgtcagagaatctttcagagtgagaagagacagagccagtactctcagtttcgccgggacttttctcagatgactttctccgccataaccagctcctccggtccatatccaaaaccaccaaacattcagaccaaactcatctgcaacaatctcaacagcagactttaactccaatttagttgcgacctaaaatatttaaaaggaggaagctttaaaaatggggcaaaatttattgatctcacttataattcactctctgacaaaaaaaaaacaatatttttcccaacaagaaaatctcttgccaaataccccaatcaattttcagaaaaagaaagaaagtgtttggtgattttgattgcttgagatgtaataaaaagatgaacaaacgtaacagagtacctaacttaacaccacatccacatacatacctcaaatctcacgccaagagaagttgaaataattgaaggaagaagatttgtgtgaatctggcttcgatattcaacggccatgttcactaaagaacagattgattagttttttttttttttataaagagagtaggaaaaaaagaaattaaaaaagtggaagtctcgatgattgagacccacatgatagataatgtgttgctattatacttgttattttttttcttataaattattttgtgaagaaaattcgacatctatcttacagccaaacactgaaaaacaacaaatatttaacaagaagagaaaaatagaagatgtttcggaattggttattgacgtaatgtggaagaatatttacagaattgtcagatatgtaccagtgtaaggaaatatattagcgaagacagccgtatccgtacaaatctttgttagaccctatagaattcaagtttctggggtccttttatttcataaaaaatattaaaataaatccttctactgttttttttctcttgaaattgttttgagagacagaaagtttgaacatcacagcagctacaaatcgattttgttataacactattttctacaaagtaaatcatggagtgtaaataaatggaacagtatccaaacggtacaaaattgggtaactcagaggagaagaaacattatagcatctacagatatcagaattcattaccttttttgttctataaagatcaagtttcaaatttctttttgaatcatactttgacattgaagatatagagctttagcacaactgcaagagcgagctgcaaaagaaagatgctggcgataatcaggatcgatctctctccagcggaattgatatgcgctttgaggttcaaagccacaaatgttgcggacatgaacccagctacacctgcgatgacccatctgaaaatctccactggcacgaccgagagacactgcagtgtcagaaacagattaataagtcaaagtctcattatattcagatgtttccatatgtatcagaatttataggagagatttggtaccaatgctgggataaagacgaaaagggaatagccataaagacagaagagttggactaggcctgatggtgcagagaagtatttgagaacgacatataatgcgagaggaacaattgtgacatagccatagaatactcctgcagaccaagtcactagattaatatcgtagttccattcttgtttcttccatttgtgtgctatgtatgtgacaaatgtgccgatagatgctgcaacgaatatcaaggtggtgcagatccagaatggaccatacctgaaaaatataatcaattttttgagcatttgagaattcacctctaagttgaaaagagataagaaagacgaaactcttacaagtcaggtttatcagctgtcttctctgtaaatgttccacggaatgggaaaagggattctttgagtctctcaactacatcggaagtgtcgacatcaaagaagggcttgtaagcaccaacagtgaatttatgaagccagccaccagactgaggttcatctgtactaccattaccatgcccagaaaatgaatctgcaacaattcaaaattatactataagccttaagatatacagaatggcaaagattgggaccacgcaatcaacatgaaccagtcgatgaacacgtttccacatctaaattcttcaatctacttgctcaaacattcggaaattctgaagtcgagagaatcttaccgtcagcatcacgagggggattactaccaccagagatcttgccctgagtagcagatggaggaaaagtttgtagatttgactctgcaaaacaatgcatccctcaatcacaacttaacatgaacataaccatgtcaaatcaaaccacacttctactattggctaaaccctcatctgttcaaactacagtttaattcaaaatccatagccattacctaacaaattgcagtaatcttagctaagattcaacatagtcttacgtcccagagaaaaaaaaaggcctataattccaaataaaatcgttctttccctaaacgctctaatatcaatttcacctcagcaaccaaaaatcataaaaacgagaatgttacctgcgaatttgacggtggtatggcctggatctggaacagactacgattgacacaaacaaatctagatcagatcggaagaatcagtgtagggacgagcactcatgtaaacattcgagatcgagacataaaaaacttacaggtacagatccagagactttctggctgtctatagtcgtgtagttcccgccggacatcatcttgttccgatcttccgttcgattctctctgaagaaacgatattggccttgaagaaatctatactactccggtccaatgagatttgacgggaaccaatatggcaaaaccttcttttttctttttcatttagaagcatcggcccactatgtgtttttatttttttatttttctcttattttatttttaaaatagggtaatatgttaaaattcaacgtttgcaaaaaagatacacaacaacaaattgatatgcaaaatttatccagctaattattgttacgcttaaagttgaagattccaaagatttgggagatatctcacaatgatcaaaaactaatgaagctcaacaatccatacaataatgttataaatttgagtttcttaagaaacgttcatattacatcattttctttgattcttctacacaaagattcttacttttattacaccccaactacacacaataacccacctagaacacaatccggctacaaccaattttacataactgatgtagatcattcatcatctaatacaacttacaaggacgtgaaataagcttggtggtgggagtctctaaggacttcttaacttaccctttgtgtttgtgagaaacagggttctacggatagctagaatgagaatccatgtcgttgctgtgattttctccttgatcatcaatagcaatgctgagctcaagacagtcttcaagatttgagcctgcaagcccttaaagaaccctaacattccttcttttctccatatggcatacacaacccctggaattgttttccttgttcttcttctcggcttctttgtttcgttttccttcgactcatccgcagcttgaatcatcaccttgcacctgcaaaattgagcccaatatgatgtctgactcagccaaagtcttaaaattatgtgacttgagaagttcatctgagccagaaagttcactagggtgaaatcaagaatactagtaatctttgtccaacaggtaaaatacctgattgctggatatgtgagcacggtggcaacacttttggagaccgcacctaagacaaacgccataaaggcagagagcactaccggagaagaaccattctcggcttttgcatttttctgcttaagaaggtgctgtttcagctgatcaaacactgtatactgcaaagagtaaccaactatttcagccagtcatgttgtcaagtgacattgaagtgagctactcgagtcgatagctcatggctttacatgagaaatgtacctgaattgcaggatttgaagtcaataaaagagagatccctaggccatcaaatgcgtctgcccatgaaccctctgttaaggtcttccacaacccttttgattctccaaactcactagtttgcatccttgatgaagctgtatctagaggctacacaaagataagactcagtgctttaattcatcgatactgcaacaagacgatcatagcacattatgtagcaaactagacctcaacttttcattccaacaccaagacttcaattgtttaacaagaactccaaaacataacatagctaatctcagagatcatcaaggtaaacgtacctgaattaagacagaagtacaagccccagcagcagcagcaatgagcaaattagccttagttccaattgatttagaaccagtcctttcactatgaactctcttgaaatagctatagctataaaagtagatgaactgagaaatgaaagactgaaaattcttagttccaaggccttgatacagtgaaaagacttgtcctttagaaattgcctcccacataacatcggaaagatatctgcaaatatcacccaaaaaaaaaaaccattacaaaaaaaacacgagaggagaccgacactatctatagaaaccgatgcacccaaatcaaaggataaagaaacctgtatttttgctgaccacgagctcgaacctcggcttggaactttgatttacatgtatcaagaggatacaagatcgttgtactcagaagcgacccaatagctcccgaggttgcttccgacaccgattccaaatcgacacccatctctccgatctgcgacagcgacgaacagattgaggttgtgtgtcctcgcctctgggaagacaatttgggtaggtgaaatccgtaaagcgatcatatgattttgcctcgggagtttaaaaagacgtcaatattgacggcgttaacatcgccgttatgctgagatttgatgcttctctctctatttggtacacagacattggtttaaagtttaaaccgtataaaatgataaaattacaagaagaaagttgatatatatggcattgcaagaagaaagtatattacatacatacatacaatttctaaatggacgaaagtaaacacaagccaacattaacagtaactgataaagagggtttaagcaaatacatttctgatgaagaaaagaaagaagataaaaagagcttacgagttacgataaactgaacttcccctttgtattctgaaacacttgctcggcgatactcagatcgagttttgtaatctctaggttagagttatggtagcacccaacgcctctcacaccatctgctaagatcctattgaacccaatggctaaagctgcttcgactttcgcctcgtacaccaatctctgtttacaaagtaatcaagacgaggtttcagaaagaagaaacaaaaagttcttattaccttgagccttgagagatggatggctccaaaacacatgggacaaggctcgcatgatgcgtaaatctcgcattccgatagcttaatttcattcagtttcttgcatgcctgtgtgttcgccataattagaaacatgtcatttttgttttgttacttgaagaagattactacctctctaatggctatgacttctgcatgtgccgttggatctttgtatttgaaaaccatgttgtggcagctcactacaatatcgttcttatgaacaataacagcccaaacggataaccatcaccacactcaactccaatatatgcctcttcaacagcttggcttaaaaatttatcgcccctagctgatcaaatcgacaaacaatgaaacaagtaacgtaaagactgcagaaatataaagtggtcagtcagttaaagaaattcaaacaaattcttgtcgtcttagctaaatcaacaacatactcaattctaaatgaaatcgtttctttcctgcatgtttaactatcaatccatctaagaaaccgaaaatattagaaaatattaatatttttaccggcgaattcgacggtggcatggtcttgatctggaacaacagactacgaccgtcacaaataaaacaacagagaacagatcagaagaatcaaacgcacactgttgcatgcaaagaaatataaaattttgatgagcttacagttacagaagcagagactttctgtgtttcggtgatagtgttattctcgccggacatcgtccgattctttaatgtttatcagtttatgcgcttttccgattctcccgtccgtcacacagctctctgactctgaggaacaaagtgggctctcaaactgaactactctggcccaatgggctttgatctaatacttttttttgtattgcgatatgtctgtgtgtcttattcataattttaatgtcccgccattttcaaataatacattcctatgtacatctccgttgttagcatgccattcatatttatttttttgacaatgcaagtcattcgtatttcaaactaaaaaattacattttttgatttttcatatacaatcaagtctactagtaactgcaagattttgccgaggtgtattttgataaatgtgcgataaaaattagacccttaaaaataaatgaatgtgttacttaattatatatatttaataacaattcaaatctaacaacatatctactaatgcactgtgttattatgttcttcagatttgatgcccattgttatgtgtttatttgtaacttaaattttgtctgtataaattaaaagggatattaacaaagaaactatattattattataatgcaagataaggatattcaaattaatgcatgcaattaaaagctttgaacccaaaaaaggtaaaaacagaagaatactaagaaaaccagttgtatccacgtcaagatcctcaatctccttcgtccgatgctcttccacaaacgccaatttcaccgttaaaaaacaaaacctattcactaagtagacacatggctaatttactggaaatggctaatgataaattaatcaatatataacattagacgaaataacaaagaagaaaaacatgacatagttgtagaagaataagaagaataagctttgttaacgccttttgatatcttaggtttctgagacactgtaagattctctgatcatttgctctctttctctgtttcagtaattacatattgtgggttgtagaaaagctgtatccttttcaacttacaatacctgaatcttgattcttgagtctcaaagttctcagggttatgtttagtaatttgagattggccattgtgttcagtctcatgatcagtatctgtttattctgaaagtatttgatgttgtttgcaaagatcagatgatgtggatgggtgtgggagattctagtggctcgccaaaaccgataagaatcgttgtggttggtgaaaagggcagtggaaaatcaagcttgattatggctgcagcaagaaatactttccatccaaacatcccttctctgttaccttacaccaatttaccttctgaattcttccctgaccgtattcccgctactgttatcgacacttcttcaaggtaaatgtttctcctgattctatacactatacattgacatcaaaaaggttatgcatagaattttctgataaggttttgtggataaggcaaagataattgaatttattgttattaatagtttaatattttgtcgataaccggggttaatcctaggccgaaaccggtctaatccccgaggttttatagaaaagccggatattttttccatttaaggtgtatacattattagccaagagggaagtacgacaatttgtctagaaggtggaactcgatccttggcttttgacacacatgcctagtcctcaacccgtgcgaaacaaaccactgagccacgcgctcttggttagaaatcgaatctttatactattgatgtctctgttgattaaatctgcagaccggaagacaagggaaaggtagttaaggaagttaggcaagcagatgcaattgttttgacatttgcatttgatagaccggagactcttgaccgtttgagtaaatactggcttcctctgtttcgacaattagaggttaataatttgcttcttttctttttctttcttctccttgcaagcagtaaactatttgcaatcccctgaagtattgtaatatttcttattaaaaagtttgtcttgtcactcttttattgaacaggtgagagttcctatcatagtggcaggttatgaagttgataacaaagaggcttataatcacttcagcattgaacaaataacatcagctctgatgaaacaatatcgagaggtcgagacatctatccagtggtctgctcagaggctagatcaggtccctttgctttgcttgagatcttaactttacgcattctaagaactgaaagttggatctttgtgatgaatctggctagttttgattttcaattttcaggctaaagatgttctctactatgcacaaaaagcggttattgacccagtaggacctgtgtttgatcaagaaaacaatgtactgaagcctcgctgtatcgctgccttgaaacgtatcttcttactctctgaccataacatggatggtattcttagtgacgaggagttaaacgagcttcaggtttcttcttattccctctctttcatattgttcttcttgagtgcttttatcagacagttttaaaaggttttttttttaaacagaaaaaatgcttcgatacaccattggtgccttgtgaaattaaacaaatgaaaaacgttatgcaagtcacgtttccacaaggagttaatgaaagaggactcacattggatggtttcttgtttctaaacacacgtttaatcgaagaagcaagaatccaaacactatggactatgctcaggaaattcgggtatagtaacgatctaagacttggagatgatctagttccttattcatcattcaaacgccaagctgatcaggtaaaaaatctacagaaatagaactctgttttttgccttcattgtgactatttgttgctgtttctgatcagtcaaatcttttgtcattgtgtagagtgttgagctaacaaatgtagctattgaattcttaagggaagtctatgagtttttcgacagtaacggtgtaagttcttctttttttctattttatgtcttaggtaatattagatacttgtaggattctaaaaaatcatatttgaatttctcaggacaataacttggaacctcatgaaatgggatatctctttgaaactgcacctgaaaggtaacattttcgacgtttcaaatgaccgcaatttctgattacagtgttctaattccatactgattgaatcattaattacagtccttggactaaacctctgtataaggatgttacagaggaaaatatggatggaggattatctcttgaagctttcctctcactggtaatcaaaacaagttttgtaaatatctttaagaggaacctattaaagatttgacatttttcctgtctttgcagtggtcattgatgacactaattgatccacctaggagtctggaatatctgatgtacattagattcccatctgatgatccatcttcagcggttcgcgtaactaggaagcgagttcttgatcgcaaggagaagaaatccgaaagaaaagttgttcagtgttttgtgtttggtcccaagaatgctggaaagtctgcattgctcaatcagtttatcggaaggtcatacgatgatgacagcaacaacaacaatggatcaactgatgaacattatgctgtaaatatggttaaagaacctggagtgatttcagatacagataaaactctggtgctaaaggaagttcgaattaaagatgatggattcatgttatcaaaagaagcattggctgcttgtgatgtagcaatcttcatctatgattcttctgatgagtactcgtggaacagagccgttgacatgcttgctgaggttgcaaccattgccaaagattccggttacgtgtttccctgcttaatggtcgcagcaaaaactgatctcgatccattcccagtggcaattcaagaatcaactagagtaatactaatctatatatcttcttgattttcaggaatattgtaaacataagttgattaatgagtcatatactgaattttgcaggttacacaagatatagggattgatgctccaataccaatcagctctaaattgggagatgtcagtaacttgtttcggaagatcttaaccgcggcagagaatccccatttgaatattccagagattgagtcaaagaagaaaaggagttgcaagctaaacaacagatctctaatggcggtttcaagtatgttcagttcttggattccaaaatgtttgatcaaatgcttctgtatctcatcatgattccaaatgttttaacagtcgggacagcggttttgatcgccgggctggcttctttccgtctctacaccgcaagaaagcagagttaattcttagctgaagaaagttcccagacctgcaattttcattgttgttgtttgtgcaaagatgccttgttccataagcaatgaattgttttctatagatttacttctaatcatgaacagaaggacagattatttaaaaaactaaaaagaagatctaagcattgttctttttcctgtaaaatttacacaacttttttttaccccacaaataaacgaattgtatagaaaagccaaaaaaaactagacctaaaatgccagttcatccactagaacaagaaacagaatttgagccatagctaatagcttgcaagctcgaatgagtcatatttgtcatccatctccttggaactccgtttgattcaccagccagattatatgcataagatctccacttgtttccaccatctttacaagaactcataaaccctaaccttctcgctttctgtgtcctctcaagaacaatgagactagagaaagtcgaaaagctattaccaacaaaaacatccgctcttaaacacacctcgtaatctatagccgattgtatcaaatatgaatacttcccatatatctcctctttaaccccaagcttcttcttctcaaatggtattaaaccgtctctccaaccacttaaaaccgatgaatcttcttctttttcttctaagagagtatctgctactgcaaggtaaagaactgttggagtctttaaacctgaaatgttccctactctgtccaaaatctctcttttactactacaaatctctgagatctttttccgttgctctagtttcttacaatgtatcatccaatctatctctattctcatgtgaaccgcaacaaaaggtaccggaccgaggatttcggttttcgatgcgagttttgccctttctgcctcacctgcttctcggattttcatcacaaccttatctgcttctcttgagatttcatcaaccaccaccatacactcaaagaccttagcatagtcttcaacaggccaatgatcgtgccacaagaacgggtttttccctatgagacggatcacttcaaactcatcgatggactcgttacgagcggattgtttcaagtgttccaagtctctttcaaccgtccatcttcttccactacctttctctagatcaaacacttgtgctctgtttttaacatccgagaaccgagaaagccgcacaaaccctgaacagagagagttgaatctttcaaactgaaacactttatcaaacggaatgggacgaagcttatcaacttccttgtagaacaaggaagcacttagactaggcatgagaagcgttctgttcatcattcttgccgtcaagcaagctctagcaaaagctatcttctgattgtttagtccccagacgatctgaggaacctcgagaaacttatcagttcggattccaccggttgaggaggaatctgacatgtgacgatctcgaaacaataagctattgctcagagcgtttctgggagagtaagagagtaacagagctctgtagaacagagcaataccaacaagaacaagacatttgcaagcaacagactttgaaaagattctcagattcttagaacttaacggagaattcatccgagagagagagagagagagagagagagagagagagagagagaaaattgtcgctatatcgcttcagatttcacttcttttccaactcaaaaatccaaactttcagatgaaatcaaaatctgagtcgagtggaaatgtcagaaacctgcatgaatcgaagtaattagagtaatcagacaccaaaagtaacatgcatgcaattgcagacagaggtaagaaccctaaaatcccagaagataaaaagtttcaaactttttgcaaaccttcagggagattagttaaatcctcgaacttgacatgcaaatcgatttcagaagaaacccagatgggcagaagacattcactttatcgatcaggattaaatcaaaaatcgcatctttttaggtgtaagtttgcaggtgaaaaatcacaaggaataaagcccaaaagagggaatttttagaacaaaccaaactctagaaaacctagagaaagaaagagattgacaaattacaaggacaatttctgccttacctttttattaatttctggttttgttttccttaatctggcaatattttgaagaagagacaaataagtcccataaacccagaatagaaaaaaaaatatggaaattgacgatcaaaatcacgctccaatcacggattatcattttttttttttttttttttttggagaacgctttaaagcaaagcaaagcaaagcgaagagagaatcaaaaagaataatttagtcagaaaaaaaagaatccatcgtaatcactgacaactaagagaacccacaagaatatgcaaattgaggtttcgatatgtggaaaattaattttaaaagaagcttcttgaacagaatcacggagaaaagtgccaaagaagggaagatttgaagtgatatcttgtgaataaattaaagattgataggtaagattggtggatatattaatatttaataatgtggttagggtttggtgaaatctatattttttttaagttcacgcgttatgtctaattatgcgtttgcaacgttataataccgaggcatcattaaggagaatttctttttgcctcaattaaaggaaatcatatactagtgataaatggcctcgaacaagtcgctatattcgttttctttatcaacttcgcaatctcaccaactgttcaatcaaataaacaagtattcttttatacgtttaattgattatgtatacaagatgctaattttgtgatcttcttacgaaaaagatgtcattgctagactgataatttgtgaattgttagactccttttataatttttatttttttcagcaaattgatattttgattagtccaaaagcacatggtcgtccacattacacagtagctaattatcgcttatcacgatgcgacatcgttttagccactttgccatgttgcctcccccttgttttttgagaaataaagtttttgtattttcttcttctaaaaatttatgtaattaaaaagacatttttgcgtgcttgtctcattcataagtcaacgagttaaggcattaccattagattgtcgaaagtcaaaacagacggtttcccaatttttctgtttgttgcattaatgtcaatcagtttcagattcatattggccaccaaagaagctaaatagtttaatagtgttataccatgtgcagctaaaagaaaagaataaccatgcatgtattttaatctttaaatggttgtcagaaagagtatcacacttttcattaatgcctttgcaacatgcaacatggaaccgacgaggaaactcaaacgcaatttctacaacccaatagtatcacatacattaatactcctacaagcttgtgtgaaagggattggggacccaatttgatggtggttaaataaaatactatttatacttagaagtcaaaaaagtgttcaaaatttaagaaaataacggaaagtgtgaaaactttgtctgggttaagaaaacatgtatggttaacaatgtttattctttcttctaataatcatatatttatgtcagtatcataataccatcatcatacccaccgctctaatacgcgtatccgacctctcgatcgtatctgtcaatcacattcacaaagagcaataccgcggaaaatactttagaccaaagactctcggaaaagtttggtccgcgtaaatttgtttgggttgtcatacttatttgtttctttatttttttcccaaaatttattaaaggatcactttttcaaaattaaatttattatatgatcactcatgatttttggatcaggtttgggccgaacatatagtggaccaaattggtctagggcccaacattgaaaagccgaaaaaatggaatattttcatgtacctggaccctttcagtgggctcaacgaacgacgaagtaatttatcatagtcatgtttgatgtttctgtcagttttgcgagtggattaacatttattgtacaatcttgaggtctgaagaagagattgtaaagtttgtttattaacaaaaagggagttgtaaaagaagctttgccagaaattacttgagcaataagaaaagaattgtttagattccaaacttaaatatattttagttcttgtgctcatgacaaaacacataattagtttgacaataaactgaagaaaataagatctaaccaatgtttttttccccgtcttttgagttttgctatatcaaatcgcttggcagctacaagctatctctccaagaactgttctaagttttcttgaatcacaaggcaccgtttctttctgcaacatgagacagtgtttctcgaaagtctccgttgtaatatatagcctgaaatcaacatcaaccaagaacgttctctccagcctattcatctcttcagtgctcactcctccgatttttgcataatatgcgttgttataacacctaaactccagaaaagacaacatactcataactctagttataataatgtagagtatatgtgagatattttatgtctaagaagatattaactggcgttccaagaattttgctgcgaccaagagactggtgatgagaaggcgatgaacgttgagtgatgtgagacgacgagccgtactggtagcctctggtctctgtagatatctaaggatgtaggcaaaagctgcaacgaaacacacagggctacactgagcatacctatggattctttctgtgtaacgataaatgcttaacgatggtgcttttgagccatggaacatagtgatctcatcagccctgtttacatgagattcaaatataagaacggaggatgtagaaactatagatacaaagagaaatctcaattcagacattaagaaactaaacttgttgtgtcttgtgtggaatttttttttgttcttctgaatcatcttctcgagggtagaagcgagaagggttatgactcgaggaggggtagaatcaggaggctgatcagaatcttctagaagacctaaccattggaagagtgatgagttggtggagtttctagaagtttccatttttgtgttggaattgtttgagagagctttagatcttctctctgattgttttttttgcttgaggtaggagcttgtgtaaatggaaggtccgaagcaaatttgaagctcttttgttaaagttttgctactttagattcttttctttgagagagagtaacgtgtagtatcttgctcaacaagtatatattattgtgtgtggagatgttgtgaggcccaatcgattgttttgttttggatggctaaccacagtttcatctttaatgcttttatgtcatgaaaaggcaagagagaaactgagaagtgatgacttaaagcaaaaggaagcaaattacctaattggtagcccaacttttattagacttttatgaaattggtgttccatattgcctattggcttttgataacactacaaagttccatggaaagtagacaagctctaaaggtccactacagagatccacataacaagttaactattatttgtcatcacaaatatctttaagaaaatgtagcatagtggtaccctcaaattacacccacatttgaacaaaagtaattccaataaataatgttttcctccatatattttcttgacgataaaacaataacttatcaacgatacacaaacacatcaaaaactaagataatatcttctttcattaaaaactctctcatattagattctccttatcgagaatctcttaggaaccaaaaccggacgctgtttcaatccactcaccatctcatgatcatcgcacttggctacactttcctgctcttcattggagatacaaacctcatagctagtctcgatggcgaaaatgacctcctgaactttgcagccgttgacagcttctgcgacttgttgcacaccctagttggagaaatcgaagctttgggtgacttcttacaaaagttaccatttcttgttggagaaagaaatgcttgaagtgtgactcttttcggagaaatagacgacttacgagccaagttactgccatttctcgtaggagtaaatgatcttctgagcttagcagcagttgatagctttggagacctctttcccgtatttctaataggagaaatcgacgctgacttctttcctaagttaacagttcttgtcggagacctggagcctctaggtgacttccgaaccgagttactgccatttcttgtaggagaaaccaagaccttaggtgggctcctgatcttgacctgaaacttagatgctgatgtgggaggagatttgattaagaacttgtaaggcgtttctttattgttcttgatgctggatatctcatttctggctatgaccggagacattgttctactgaactttgcttgttgtgtagcggtaccggaaataaatagagggttcggaaaaagaaccgcctttttaacccaaggtttgtgctttggtgaaaccctgttggccaaatgccgaaaactattctcaccattatttccctttacttgtggagagatggttctgaacgcaattcttgagcgtgccctttgtagagatggaggagaatctgattctgatcgtctgttctgcttctctttcttccttcttgctttgatattgctactgacagtttcaggattctgttcccgggatttttgttgtgtctcgggtgttttagggccatcgtcttcttgtgacattgttaatctcctggactttctactcttctttggtgctatggcgtccacaatgtctcttgtgacctgtgaggcttgtaagatttcatttacagtctctcctagtagcattgctgggagtgacattttcctccaatctcctacattacacaaaacaaagattacacattacacaatctgcaggacctaaaactaccttggtgacacaaagaacttttgatccgataatgtaatgaaaattcgacaagattacaaaacttaattaattatcctttacagcttctgttgtgacctattatacttattgcttgtgaatatatgtgtgagaatcagagagagaatttacctggtgaggaagcaggaaacttccctactggagatttcttattagtagcattcttgatcctacaacaatatgtaacaagggagaaatcaaaacccgaataaaaagctactgagtttgagatagcactagtgtttctattagtgaagttttggattttgtctcttttctgagtttaccttaaagtttcttgcttgcatctaagactagtcttcaagtaaattctagtgcttcgagggctaaggttcacaccagagacaactttggttcctcctgcaattgtgtactgtagctcttgcagtctttccatacatttatcaaccttcacaatcataccaaaattgacaataatcagctaaacagatccctctaatgttagatcctaaattctcattcatacccaaattaagaaactagcataagaatcctcttgaaacccaacaagaacacatcaattgaatataaaaccaattacttattataatccaataaaacaaagatctttaaattggggtcagaaaatcgacaattttattaatttgttactaagtaaagcttcaaacatagtgggaaggagccttagaactggagcgtttgcaaattctgataaaattaaagcagtaaactttatgctaatctttgtattaaattggataaaataccttgttgatcgtttccttgagaagatctgagttgagaggaggcaccaccatcgccactttcctctgcttctgtggggttcttgcaaccatcttctatatatattttctttaaattctcactagattaacccaaaaacttctctctgtttgaaaactgggttttgaagataaaaagctcaagcctttgtaagaaaaccacccataacaagatcctcacaacagcttcaagaaacccagatttctctctcactctctctttccttctctcgatctcaatcactctagaatgtctttttaggttacggacaccaacataaacgcgaatcctatcttcgatttgggtcttgtgtgctgtgtctatttgggtcttgtcggaacgtaaagtcaattaggcacgggaactgagagagagagcggataaaggtgttcactttcgtaacggatctttcgttactatttaattttatttatttttttgtcccaacggtctaatacgcttactcataacggctatctttttttagtgtgtgtgagccaattttactttataatcttcaaactaaattggtgtgaatttagtggcctgtgggactacatgagccgttagcccgttatgtagtatttttatttttttgaactccaaaattgtaaatgccaaattatctctagggtctagaagattaatcttgggagaatttttctaagctttgaacataagatttcaaattttttttttttttaattcaacattactataacttcgtatatattttattttttcaaagtaaacctctaaacaatgacgtaaaagagagcttccttcttttccctttaaaaccaatcgagtcatgtgactttttatttgaatgcctttttaacttagttccctcattgtggttcaactcttactaaacatcgacatatctaaagtcgacttataatcaactaggaatcaacaaataacacagtcatggaaacttcatcaatttcttctgtggattcaaatatttaaccatgaacgttcccaattctggttcattgaaaatgtaaccaatgtaatatacgacattacacattatgaaaatcatcataccgaatagagcatatatatatacacaaattttgttctaagtaataataaaaaaaagtgttttgttctaagtggcgcccaacatatagttttggcaagtttcttctttcctctacttgctccaaaaatctgaataatagaatggcctctactgttccatggtgatagattttcacattttgatttatgttccacctctgattcttctggttattttcgaactcactaccagaaattctggagcatctggttcaactctaccgtattgcagggaaaacagctgtcaacttcagaaccagtctacatgttttcctgaagattcaggttgtttcttctttggcttctgataccgattgttctcaaatttagctttcacaataagagcatatagaaattctgcttctgcggaacaatcgtaaggtttgtccacgacgctggagttaggacgataagtgagtattcacaatcacagataatttctcaaggagggtaaagagaagcatatacctgtcaagtaactcttctagaataattctctgtgatggtgtgacataatgtatacaatttctcggacactgattaactgcagactgtacacggtaatcttcgccatgtcctggccatatacacaccggatatattaatagaagaaacagagctatgtaggaggcaaatatgggggaatcaaaccatccagaccttgggacattgctcgagctgtcccagatgaatcacacgagaagacatgagaagctgtttcaaagcatgggtatgaacatcctgcagttggagagagacaagtatacatctcaacataattgttctaaaacttctctccaaacgatgttcaagaagaaatggagcagctaaaagagcaaacttcaaagaaaaggaagcaagtttggtactttttccaacacataggacttcattcacaaacacgtcaagtgcctcgcactctggatggtcaaaaggatccaagcattctctggtatgcaattcacaggaaaaaaaaacattacttggttgttttggcgcacatgccaaaaccattttctttattgtgttaatagatagattttgctgaaaaaagtattatgagtatacccttcaattatctctgaccggctatagtttgttaacatctgcaaagaataatagtattgagctactgtaactgctcacatagtatagaacaaggtttagtaacctcatatgcctggattatgcgacggatcataatatcagagttgcttccgtctttgtttacatctggatggtattgtttcacctttacaaagcacaaagtagtcaacaagactaatacatattaaaaatccaaaacttaagcaacgaggaggcgaagaaaaaaagacaagtcaaagtgtgtaaagaacaactcactctcagaacccatttataaatcgtatcaaaagaaattacttagcggaaagaaaagtacagattagtgattcttggatgcatactttggcacgaaaagctgcctttagctcggaagatgagcagcttggctctacgccaagtatagagtacggtgaagagctggagagaggatcctctctgttttttcctctgcaactgggaatgaatcgctgagaagttgagtatcttgaattggagaagaaagagattttaggtaccgaagcaaatacacgaagacattccattgtatctcttaccttctctttccctaagtttgtccctttgaggcgttaactggtgaccagacagatgtccatatattaagaattaagataaagagacaaaacagtagagcctctgtttcagctagagggggtcttcaactaccaaaatcaaactttacaaaacgccatggatattctctactcttgtatgtacacattcatgtagagagaaggcgttaaggaactatgataccgtgccgttcctgtcatctcctgtataacacagaataaacctcttatcaggtctgtaaccttcatctaccataaccggaaacaatccagacagaacatcatatatagcctctgcttgtggatgcaatttgtcctcaaccacaaagctgtgtgttttatgctcaatttcaatcgaacttatgcctgtttctttagtcactcccattgctttcattctcttgatcgtcttcgccctctccttccattttcctctggatgaatatatgttagcgatcaagatatgagcagatgagctatcaggtgcagtttgaaacaactgttcagctgcatattcccctacttctgtatcaccatggaaactacaagctccaagcaacgcttgccaaattttacagtcaggtttcaaaggcaatgagtctataaagctctttgcttctttcaaaagaccagctcgacccaacatgtcaataatacaggtataatgctctgtcctgggctcgattccatggacctctttcatctcgtttaagagttctcggcctttatcaatcaaccctacatggctacaagcatgaagtagtgatagaaaggtaacatctgtaggcttcacttctagcgtagtcatttcttcgtatagtttcaaggcagctaatccatgaccatggcgagcaaatgctgcaatcatcgagttccatgaaacatagttcctcttcggcattcgtctaaagacagtttgtgagtcggtcagatctccacattttgagtacatgttaatgagtccattgttgacaaaggtgttaccggagaattttcgtttgataaccaaagaatgcagttgcttgcctagacccaaagaattatcgataaacgaaactccaagaacagctgagactacatttgcatcaatctctactccagcttgaagcattctaatgaagaactgtatagcttcttcctctgacccattttgtgctaaaccaactaatatcacagtcatggaaacttcatcaacttccgtcgtggactcgaaaatcgtccacgcatcttcaatgcttccacatttagagtacatatccattagcgcactctcaatgcacaattctgattcaatcccatatttccacaaaagggcatgaatctgttgcccctccactatccgctgtgaaccagaacaagcagctagagcactcaaataagttactgagttaggatggaccaatcctctacgcatcaaactaaacaatcttagaccatcttcgtgtaactcattctctatcagacccgaaatcacagctgtcaaagtgatgacatttcgatgtgacatcccatcaaaaacccctctcccagaaactgaacatccacatttgaaataagatgtgatcagtttgttccccacggaaatttccttgtcataaccgcttaaaattgctaaagcgtgaatcatctttgtcaccaaacagaactctggcgtatcacacactgataaaacaatcgtcaaagtcgcatgatcaaacccacctgacccaagcattcgtttaagcaatacaaaaccagactcagtctctctgtttctcagaaacccataaaacactatattctgcgaaataacgtctctcatgggcatttcgtcgaacaacttaatggcatcaactaacttcccacatttcgcatacagagaaagcaaagagttccaaacaaccagagcgtttcgatggatatcagcatctacaggctcgaaaaattcaggatttttgataatggaggcgtggagacaaggacccagatgaggaaaccagccttctctgccgcagatggataagagaaggctcatatcgacatggttgaggagaaaggtcgagacttggtaatttgggctctgccggattaggattttcgaaggggacaaaacggtagataagcaagaaggaaggtgagaggtcagtttctgaatcacccatctcgaattcattcaccacaattccgaagctaaacacttaatttgtattttgtaatagaaatttgctttccactctagtagaatcgagtacttgaccgttaagttctcttccaagttgtacctctgtgtcgtctccatttttgttgttacagtggccgagctttttgttttcacagcgatgggtttgatgggtttacattggttttgaaattcaaattgatctcggttcggtttaatttggtttagagaagaaaaccaaaaaaaataagacacgcgatggatttttgagagtgagttgcgtggatcaaaaaaggcatgatttctgtggacaaacccctttagaaatcgtagacacgcgctcaacgcgacatgggtgagactggttgtgaaatcgctcgattggtaaaagtggggtatgaagtggagctctctcattggctaaaaaaataaaaatagtagacatatagctcctatcctcctcctcttcttttgtcatttttatattagcctctgctgagaatgaaattcagattttattcaatctgaaagttgtgtgtgttttagatacaattgaaaaaaacttgaatctggacttatgtgatactaaaaaacttcctcatcattttgttctgcaaccatttttacaagttggaactaataactgaaaacttgattcaaagaatcaaactaagtgagttgaatattttctaaacatgttaaatatattggtacaagtttgtccaatcattttgctagtttcctattttaatgttttctccactttaggagatgaactttcaagtgcaaggaaaggatttaagaccaagaaactttaactcattaaatatgtgcagctgaagcatacaaaatttaagcttgtgcaatttaaagcttctggagagatgcttacgttaattcgagaagattagtaaaagttgaggatctttttttaaaataaacgaaaaatatcacatttctgtttgtaatttacacacgcgaacattttggtactaatcatgaaggatcaagtctaagcttttattggaaataaaacttggtgggtttgatcatggtttggctaagggtcttgtgttgttccagagccactgctgagtagtagaaccttccaataatggtgaaacctgccaaggaaataatacctggttcaaacaactgcagctgtatgtaaaagactttgatctattacactaagaggataatcgaagccatgtttcctttatgtgttgatttgttgatatgctttgctttgcttagactcaatctacttggctttttgagaaggtaagtcaaactagttttgtggactaaccttttcccagacttccgcgtggtaactattaagccagtcaacctcagtatcagacagcaaagaaacatcaaccatttttgtctgcatggtttggtgagtgagaagtgtgtgagatcaaatgtaaggcaaatcaattagctagaagaaaaccagaagggctcccttgaccagaaaaatgagagttagattcagagacgcgaattatttataagtggatacgtcactctgtacctgaatggggaagaatgtaagcttctcaaatccaaggtatgtagcaccaccaaagcggtttggtgtttcagcatctctcacatgaaggagattctgcaaaagcagaccatacaattgttacttaaatcttatatatcctataaaaactgtcatggactggtgacaaagtcgcacctcaattcggatcccaaatgcatggtcttcataatatccaggttcattgcttactatcatgccattttgaagaggggtcatgtttccataccgaaagctaatactttgaggaccttcatgcacattgagtgcagcacctacgccgtgtcctgtccctgtttggcaggcaaaatatcagagtaatatgagttccttacaaaaaagttgttctgggaagaagagtcaaaagatagaatagagtaccatggcggtaatcaagtccaattttccatagagaagagcgtgcaaacccatccaatacaaaaccaggagtaccttctgggaacacggcttgatcaagagctatatgaccctacaaccaaaataccaatcagacaaggcaacccatacaggttcgtctgttcaatataggtagtcaatggtcatcaaaaatgatgaggaaaagaagagccaaatattccacctgcaagactcgagtgaaacattccttttcacgggcagaaggttcactaaaatgtactgttctggtgatgtctgttgttccatcaacatattgagcgccactatccagcaaaaaaagtttttgagggtctacacgactgcagctctcaggctcgggcttataatgtataatagcaccatttgcaccggaacctgcatgggtaattagaggaaaggaatacatatcactcactggctgtatattgactatgtgttaagaagcaagttccaccaacaagggtgacaataaccataccacttattgtatcaaagcttgtatccataaaaccatcttgcattgaacggaattcaagaagcctgtcagccacatcgacctctgttagattcgcattcttatgcacttcttcttccagccaagcccagaaatgagctagggcagcagcatctctgcataaaataagtggtcagccaaagacatttcccatacataggaaaaaaagaaaccaaaattttccagaaatgagctagagcagcagcatttctccatatatatttggtcagcctaagatacttagcatttgaaagtacaaaagaaaccaaaatcttccagagaaaagttgaatcctataaaggcagttggattaggaaaatatcgtaaaagcaatggctttctttacctcaagtgagaattcttcattccctttagctcagcatcatttttaatggcctttgcccacgaaataggagattgcatgtaaataccagaaggattggcagtatatccgctggagctatcagtaaactttgtcttaactttggcttcgctttcaaaattcctcgaatatctttcacaggcagatttgtaggtactaatgatagctacgttgagggttgatggatccatcaagagctgagctcctcgtgctgccaaactgagaaaactcaaagtgagggaaattcctttttctgaagttcataaatggacatggacaatcaagtacttacctatctattccttgaagaatggaatcgtaaggtctaagttcgatccctgcgtttttcaaatgatctttcacctccaccgttactttagaattatctacaaaaagttgggcttggtcaacctctacaatcagatatgcgtacattacaggtgaatgtggaacatcgctccctctctgcagtcagaagaggcagaatacaacatcaatacattgggacctatgtgaaggataagctgatatcagtggcacaaaactaacagattcaaatgtaagatgctatgctagagtattaccagattaagcacccatgcaatctcatcaagcatggatattacaatggcagatgtgccagcatccataatttggttcctcaaagacaacaatttcgaggccacatctaaaccagcatacttcaagtcatgtatccttatttgtctgcttggaggctttggccttgagtccttccatatctcatccacaagatttacattgtacaagtaaaccaactcatgattcttctttgctataacctccttcaattcctcagcagcatcggcggaaaaaaggaactgctcccttcatgaattccaaagtcttgtaaataacaaaccacaaactacaatatttaaggacaaaaggagacacaatttagaaggtttaataatagcttacagggtcaataccaactcttccaccaggcgccaaaacatcagctatccattcactcgccgtggggactcccggattaccagcccgcatgagaatccaactagagtttaattgcttctccgcctttgatagaataattgcagagaatgtagataagaaactccacatttcctttcaatatgagatggcaatcaaataattttaaaggacgataatgatcaaaacctgaagaaaatagcggccatctgtccatagagctgccttatccttggtgacaacagcggtaccagcacttccagtaaatcctgatatataagccctcctggcatagcactctgcgatgaactcgctctagtacaaaatatggagaaaaatcacactcaagccatgaaaaactcaggcagtttatggatacatttagaagtaaaacataaatttgtgactttcctaatggcacagaaatatattacaggcaacatcagttatgaaagtagatcttaagctcctagtatgtaaaattcaccgaaacaacacattacccatatcaaaatggcaaaaacaattgcatagatgcataacaacccccgcactggtccaaatcatatttattttttatcttgaatctccaaatcgaatttggtatactcagggacagcaagattgacgtgtgagcggagcaagaaactttggggagaatgaaataaaacacgagttggagaatttcatactgtgatttagaagaagaagaacttccatttggctctacaattgaaacatcctcttatgacaagttgagatttgactaggaagaaaaatctgaatgcattttcaacccaacatatagaagatcagataccaccaaagccgtttcttacaataccataaagtagaaaattacaaagacaaagagtttatgcataacacaactgacagatatcataacaaacatatacgtttcacaatcactcagagaaattgtgagaggtgatggtgttcaacgagcacttgtggtgactactctgcgcttgtttcgatggaatttttccatgaaccactcgtgtttgtgtgcagtaaagaagatatgtccaataactaatccacaaaacacaccaggtccgtaggctattgccgctgctatccagttaatcacttgttcttctggttccgaaaattcctcggattctagtggtgtagaactcggggcatgagcttttccacagattttctcaagaccgtagagtctgaggttgtccatgaatgtagaacaatgttggctttgaaactgagtgcctagtggaactggaccttcgagaaggttatgggagaaattcatggtcgacagaaaagagaggctaccaagatctcgagggatgtgacctgatagctgattccgggataggtccaatgtctcaagatttgtcaaatttgccaatgactgagggatattgcttgtgaatgagttacctgacaaattgagaagacgcaattccttcaacaaaccaacggattcaggtatattcccaaaaaatctgtttccagaaaagtcaatggctctgaagaaatatgggatccgcaagaagtccgtttctactcctttatatatcatagtcatcgaattactatggctgaactcgggccctttctcgcccatgtaccaatcctctgtacctatattagagccgttttcttctaagacagatgtcaccatctcacgccaattggagaaatataaaggtgacaaagttccactgaagccattctgtgatatatcaatgagtctcaaatgttgaaacccaaaagatatgtggtcataatataacgacccatagaatgcattagatctgaggatgaggacacgtaatgatggcaaagaaaccaaccaggatggaaaagtgtccttgattatgttgcttcccacattcagaagttccataccagtgcaattgatcagggattttggaagttttccctccaaccggttgtagctaacgtcaagtgataataacatgctagcattgacaaatacgtctgggagaaatccgctgaagctgttgttacgcagaactagccctttaagccaataagtggaatttttcaaacaaggaggaattgagccgttgaagagattgttggacaagtctaagtactttaagaacctttgcttgcagatccaatggggaaaaggtcctccaagtgaattcgaaccaagatccaactcctgcattgattctccatccaaagctccggatgatgactttccaaaactgttgaaagaattgtgggaaagtgtcactgtcatcaatccccataagcaacctggcacttcgccttccaaggtattgtttgaaagactaagatgctgaaggttgaccaactttgatatagaagtggggattggcccaactaagttgttgtggctaagatctagtactatgagactgtgaatttcagatatatattcagggattggcccatcgaatttgttatcagcaaggtttagatcccaaagcctagaagatgaagatatattcccaaactttataggtcccatgaactggtttccttccaaataaacaatttgtaacgaaggaatcgtgaataaggatgtaggaaaagtcccgacaaatgaattctcacgcacatcaaaatatttcaagttgtggagtccactcatatcagatggaagcgtggatttaaagtgattagaggcaacgtttaaggaggacaagctggttaaatttggtagtatgaaagagaaattttccaatgtgaactgattgctagagatgtctaaactagaaagcttcgttaaattggtaaatgaagtaggaatgttaccactaaaactgttttcggaaagtaaaaggtctctaagttggtttagcttactgaccgaagccagaacttcacctgtcagctgattactcgaaaggtcaagatgcgtgagacgagaaaggtttcctagtgaagaagtaacctctccatagagatggcaatcactgagagtcaggttctggagttgttggagtttgaaaagaccactagttggtttcaaagagttgttgagaaggacataactaaggtcaagtgaaaccacctcgccagattcatcatcgcacgtgacaccctcccaaaaacagcaatcactagtcttgttccatgaactcaacgatggacttggcttcgattcacttaccggaaactcgtgtttgaactcgagaagagcatccctttggtcatggcggcaatagtgaagcctagaagaagcaagagtgcgtagaacaagggaacccaggaggaagaaatacaaggtaataacactaccagaaaaggaattagattggcttggaatcattttgtttgttttgtaagtaacaggttatgatagctatggcttctacgtctctatttagagagagagaaaaatagaaaacaaaacacaaatttgcagctctctagtagacttctacctactcctttctatagtcaaacttgcccacttggaccaataattgacttaaaaacacacacaattgaacagttttgaatctactagaacttcctattcaattcgtaatcacgagttaagaagaggtttaaaaaaagagaacctgatgtgcatcttgtgaaggtatgatataagcgtcgattccaacacccggctccgaaaacagtcgccggatcgagctaagcttctcgtcgacaactactttggtttgagctttacgaatctctttggaagactttgccgtgaaggaggaagagctgctgctgctgctactagcatgacaccttgcgccaaaaagaggtttatacggtaatttccggtggatcagagagagcgaattgaaattgctgagaaatagagagtgtgagtaacgtgatgtggataaaacgagccgattcagagacggcgacgaaagagttagaggaatcatcaccagcgattgcaggagaatcacacaagaggagaagcttcttgagcagagtgattacggataaatgtgtataactactgaaaattgcaaaacaacccccgtattcttttaaatgttgtataatgtgcatgactattgataattacattaaaatcccagacttgtcaaaaagaaacattttattttgaaacaatctcatcaaattcgttatggtaaaggacagccaagagagacgtgtgcaagaagcaagagtctttgggtgcgtaagaaatgtaaacgtgttcgagactttcatgctgagaatttcgattggaattttggtttgacttagaaagttttatgagaaagacttaataccgcctgaattaagggtttccacgaaagagacaaacgataaattgcaaccacaccagaaaagagaaaaatagatactaatattctttatattgataaccatggggtttagaattcaaaacatattttgagatatgagtagaagaagtttctgaatgcattatcgagccaagatttattacaaaaccttgcaacaatgtggtttgggacaagaagctgaccatgattttaacctgatagtaaaacgggccttgtctcttgacagctgaaagtctgaaacaagatcataatatttctcaagcgctgaactaacacaagtaagggaatggaagtgaatacttgttctgaagcaactggcatgaaaatgtacctctcaagtatctggttttttctaatctccttccgtgaaaagaaagattcttagggtaccaaggcaaaggcttgattgcctccaattcaccactctctatggccttaagtatgcttcttatgtctatcatcaatgagacactagaaaaatgaaagagtcatgaatcaacctcagcccgaagagatttcatgaaatcattctccaatttcaatcaaatcccatcacaaaattgaccactgaagaatcaaaaacagaggccacttagtcaaaaaaaactctgaaactccataaacgaatcccactcttcagctttcactatcctttgttccttacacaacttcacaacaagacattacaatggtgtttattagaagtaaagtttcaaaatccatggaagccattgattctattgaggtaccttgtaatactcctcgagtcctcatcctcgaaatgaagatttgagcagatgggcttttggaggttggaatcaaaggaagcatcggatttgagggggttttcgaacattctcttggctatttagagttgatttctcttccaagttgtgtcgtctccatttttgttgttacagtggccgagctttttgttttcacagcgatgggtttgatgggtttacattggttttgaaattcaaattgatctcggttcggtttaatttggtttagagaagaaaaccaaaaaaaataagacacgcgatggatttttgagagtgagttgcgtggatcaaaaaaggcatgatttctgtggacaaacccctttagaaatcgtagacacgcgctcaacgcgacatgggtgagactggttgtgaaatcgctcgattggtaaaagtggggtatgaagtggagctctctcattggctaaaaaaataaaaatagtagacatatagctcctatcctcctcctcttcttttgtcatttttatattagcctctgctgagaatgaaattcagattttattcaatctgaaagttgtgtgtgttttagatacaattgaaaaaaacttgaatctggacttatgtgatactaaaaaacttcctcatcattttgttctgcaaccatttttacaagttggaactaataactgaaaacttgattcaaagaatcaaactaagtgagttgaatattttctaaacatgttaaataagaccaagaaactttaactcattgatcagactggaaccagtaaggcttgcgtgaggttcacaagaaggcttatgtgaggttgacgctggattatgatacgtttaatggtgcaatcaagactggaatcatctttaaaagttcatgtttcagccttttgtcatataaattaactagcaagagacatccttgttggttctagtctcatagacatcccaacttgtaagaacatattcttctctcagcttctgtagtcagtaatatataacaatatatgaattcttttgttgaataaagaaaaaaaattgaacaattgattacacaagctggctgttgtaatataagttaaaaatatacaagctgttgtaataaacaatatacgctagtcaacaaacatatacgtcacaaattaatgcttagagggacgagcaattctggtgactactttgggcttttttcgacgaaacttttccatgaaccaacactcgtgtttgtgtgaaaggaatatatgtccaattaccaatccacagacgacaccaggaccataagctattcccgcggctatccagttaatcacatgttcttccggctcagacaaatcttttgattcttgtggttttggattcgggacacgatcagtttctctacatatttcctcgagaccattgagcttggggttttccatgaatgcagaacagttttgaccttggaactgtgtgcttttaggcactggaccttcaagaaagttgtaagagaagttcattgttgacataaacgagagactaccaagtccttgaggaatttgaccagacaactgattcagagataagtctaacgcctcaagcttcatcaaatttgccaatgattgtgggatatttcctgtgaatgcattacttgacaagttgagatgacgtaactctttcaacaatccaatggattcaggtatatttccagaaaatctgtttccagaaaagtttatgactttgttttcttcgttgatccgcttaaactccgtctctactcctttgttcacgatttccattgaatcaacaaagaatgcagtagcattcaaaacttttcccatgtatggagcctcagaaagtctaaagtcgccatcttctcctgttaatctgctcatttcacgccaactagaaaaatagaatgacggtaacgtcccaatcaagtcattgtgtgagacatcaatgactcttaaactttgaaacccaatggatgcatggggttgatacaacgtcccataaaactcatttgatcgtaggatgaggacatgtaatgacggtagagatcctaaccaagaaggaaacttgtccttgattttgttgcttctcacattcaaaagttgcatagctttgcaatggatcaaagattttggtagtactccatccaacttgttgcgactaacgtcaagtgatagtagctttgtcgcattgacaaatatatcaggaagaggtccactcaaactgttgttacgtagaattaaatctgtaagagaaaccatgaagctgcttaaacatggaggaattgagccgttgaagcgattatcggacataattaagatctccaacgatctaagcttgcatatccaatgaggaaatggtccttgaaatgaatttgaactaagatccaaccactgaacttgtgtttcatcaagaccttctgatgattctccaaaactgttgaaagaattgttagaaagtgccaccattgtcaatctccatagccaacttggtacttcacctaccatattattgtcttcaagacaaaaatattcaagtttggctaactttgatatagatcttgggattgtaccaatgaaattgttgaaactaagatgtagctcttcaagattgagatactgagatacagattcggggatcgagccattgaattcgttttgagcaaagtttagaaacttgagactagacgatgaagacatgtttccaaactctacaggtcccttgagatggtttccctctaagttaaccctttctaacgtgggaattgtgaacaagaacgtagggaaagatccagttagattgttgaaactaagatctaactctatgagattgagatattgggatagagtatcagggattgggccatcaaatttgttttgagaaagaaatagatattgaagcctagtagatggtgaatacatattcctaaactctataggtcccttgaacatgtttccctctaaattagcccaacgtaatgaaggaattgtgaacaaagatttaggcaaagtcccggaaaatgagttttcaccaacattaaaatagtccaagttttggaatccactcatgtcaagtgggagcatggattcgaaggaattattatagaggttgacaacgagcagttttgttaaattggagaatgtaacaggaatattgccactgaatttgttgtgtgaaaagatcaagtattctagttgggttaggtttcctattgaagctggaagttgacctactaacttattatcccaaaggtcaagaattgtgagtcgagaaaggtttcctatagaaggtggaacttgaccaactaaataattatacgaaaggtcaagaagtgtgagacgaaaaaggtttcctaatgaagaaggaatatctccatagagactacaattactaagggttaagttatgaagatgttgaagtttgaaaagaccactatttggtttcaatgagttattaagaggaacatgactaaggttaagtgaaatcacctcgctagatatagcatcgcacgtgacaccctcccaagaacaacaatcaatgctcttgttccatgaacttaacgatacatcataaggaatttggttggattcatttacccgcggaaactcgtgtttgaactccagaagagcattcctttggtcatggcggcaatggcgaagcgtaggagaagcaagagtgtgtagaaagaatgaaaccatgaagaaaaaacagaagcaagattggcttggaatcatcattacttctttttttttttgttaggagtttgtgtggtagtttataggttatcctgatatggcttctttggctctgttcaaaaagcaaaaaaacgaaactcagttgcttaatttgacttgcgcaagtctttccaatgctctctttgactaatgatttggcctcttgccataatatccatcacaaaattgaaaactctcttcttcgttattaatgtcaagttactttgggtttctataggtcatgagtttgtatttgggctttttatttgggccagatagaatcagatgtaaccaagtctatttaatccgctgtcgtttttaaatagtttatctattttttttttataagaaaaaacaaaaatgattaaccctatctaaagttgttaaaaccaaatgttttagcaaatctaaccaaatatttttttctttgggaagctctaaccaaaaatgattatccttggataattactcaattagtaagatcttcaagaaactgatttcccccattattattttatttatatttttcggtttataaaactccagtaatttcaaatataatcctctgctaccgataccagaatccacacaagtgaaactaaaacaatccaacgatgtaaacaacctcacaatccacgtggacgttcaagatcacacatgcactagcttcagatattaagagtgaaacaaaataaaaggaagaaataaatcgaaaaaatggaaaaaagtgacaaatctggaaagctgattggctgaagtcgtccatgtattcaagtttcgcggcaacacctctcttctcatttttctcattccctaattcttctatatctctctctctttctctcacttcctttttttttttgtttttaaacaaataataatctttctttcttcttccttaatttgccttctctctctctaaaacccttgtttcaaatattttctcatcgatctctttttgaaactaaaggctcgagctttctctatctctctttcgaacccaccggtggttcgggtatctctctattcactcttcaagtcacctaattggttagtggatctgcttcgattagggtttttaaaaggcttttcctttttccgtttcaaattttttcttctttcgactctcaaaattttcccggattttttttttggattctttaacactttctgtgttagctctttttcttttgactcgagttccgttttttctcagctgaggtttagtgggtatttttggaagctcactcgattgaagttttttttttttttttgaggaatcagtttcagatttgtagaatctgcgttttatttatatttataggttagcgattgaagtttcgaattcgattttgttttactatctgaaatttaaacaattttctcaacacattttctcaaattttgtcaaagctcctgacttttgtggatgattttcgtgtttcttcactgtgtgtaattgattccttaatttggtgtgttttttaaaatacccaaattctgattttcgttaatatttcctctcatctcgattactgcagctatttatcttccccaacactgctttttactgatccaagaattggttctactcttttgttaaaaaacgtagagttttgatttttcttagctctaatccctaaaccctaaaccctaaaaacgtcttgatttttcccctggtgaaatgttgaaattcgtagtttgtacatgtcttagaggaagccaaatttgcttatcgacttagtgtcgtatcttgtccgtatcagtttaaagtgtgtcttttgtcacaattgcattttttggtttctaactatatatttgaatatacttgtgcagagaaacgtgcaaatggcaccagttaggaagtcgaggagtgtgaacaagcgtttcaccaatgaaacttccccaagaaaagatgctgggaaatcgaaaaaaaataagctacgtgtgagtaaattggtcttcatttcttgaatgttgaatgagatgttactctgatgtatttattctgtgctttatttttcctatcatagaagaagaaattgtctgacaagctgggacctcagtggaccagattagaacttgagcgtttctatgatgcttaccgcaagcacggacaagagtggagaagggtaaataactgtttcactcacatatgtttatgtgagtttcagtggcaatcagagttcttaaagactgttttttgtataggtggctgctgcaattcggaatagcaggtctgttgacatggtggaagctctatttaatatgaatcgggtatgagtaaggacatgctatgtttcagttttagttagtatcgatgtggcaagtttcttttccaagctttagtttaaatgttgtaaaacctacataactttgcattcacaagatatgcttcttcttccaggcgtatttatctctccccgagggaactgcctctgtagctggccttattgcgatgatgacagatcattacagtgtcatggtgagaaatctattttattaaggctgccacacaaaggatattatgtgaagtgacctgccagtagatgagaaaatgaaatttcttggttgaaaatgtgggtggttggtgaaaaacctttcattgttaacgtgagtagacagtaacaccaatgacattgaaaactttgagttttgtgtaccctatctggcctatctgttgggccagtttgtatgtttgataaagttatgtggaccgatttgtaactcattcatatgatatttcttctaggaagggagtggcagtgaaggagaaggccatgatgcttcagaagtaccaaggaaacaacaaaagcgcaaacgtgctaaacctcaacgtagcgattctccagaggaagtggatatacaacagtcaattggttcaccagatggatgcctcacgtttttgaagcaagcacgagctaatggtaaagtgctacattgtgttaactcagttttctaatttttattttcgtctgaagaagctaaatcaaatgattactctatgatttaagcaggttaggaagttgattacttgttctgcatttgttattgactttgtatagtccaggaatagatatccatctgtctagtacctgtaaaccaattcgttcaagatcgtgtaactttatttcttagttcatgtaggaactcagcgacatgccactggaaaacgtacaccacgggttcctgtacaaacttcatttatgagggatgatagagaaggctctactccaccaaataaaagagccaggaagcaattcgatgccaatgatgatgtagcacattttttagcgttagcattaacagatgcatcgagaaggggagggtctccaaaagtttctgaatcaccaaatagaagaacagaacttagcgatagctcaccgataaagagctgggggaaaatggtatctctcagcttgacaaaattttaagcggttatctttttgatttcttttctgtgtgagtttgcttcactgaaaaacactatttaactttgtgcttctgactagtcgcgaaccagaaaatctcagtctaagcactgtggcagctccattttcgaggagtggatggaaagtagccgagaaaggaaacttgactctgataaagatactaccttgttgatggatatggaaagggctggcgaaatggaggctccgcggaaggggaaaagagtctacaagaaaagagtgaaagtcgaagaagcagaatgtaatgattctgatgacaatggagaagcatgcagtgccacacaagggctcagaagtaaatcacaaagacgaaaggctgctattgaagcctcaagagagaaatactcaccgcgcagcccaaagaaaagagatgacaaacatacttccggaggtaaaaactaatgtaatttgaagcctgattttaatttcaatgttacccctttctgtaaggaaagttagagatatttaacatattttcgtttgcaagctctactgttgttatatttgattatttatcttttctgcattgtccattcaaactaactatcttcatattctgctgaaaacttatgcggatctgaaacttattgccagtcttttcctgtgtagcttttgatgccctgcaagcattggccgaattgtcagcttcaatgcttccagcaaatttgatggagtcaggtgagttttgtgtggttttgcttgtaacttcaatatacctgaaacttatgttttttttttctagatattctcattatatagattgggttaattctgcagtgttcactgttcgcattagggcctttacctgtctgtatttgttaaatttaactaaattgcattgggtccagaattatctgctcagttgaaggaagaaagaacagaatacgacatggacgagaaatctagcacaccagaagctacttccacaagcagtcatggggaaaaagcaaatgtagagccagatgatagtctccttcatgcaatttcttctgttgagaatgctaacaagagaaagtcaaaaccttcaaggctggtatccactgattgtgatgatgttcccacagggaagctacaaccacaaactagtggcagtttaagaaaacgtaaaccaaaggttagcaagatagttctcttaatctgtgctctttcttctaggcatcttttagctgtaaatgttaattgtgctctattttcaggtactaggggatgaagctccagcagagtttagtcagaacaaatccataaacaagaaggtagtctgtgtgtatgttgaattagttgaaacccgttgcaagtcctatattgcttccttgtacataaattttttgaccttagttgaactccgtgatctctgttttctatcctttgaaacaagttcgagatctttattaaaaatgcatattgagtattcaaatttgtgattctgaagaaaacattacctcatatgatttggttttttatgttgcaggaattgcctcaagatgagaataatatgaagtctttggttaaaacaaaacgcgctggtcaagttccggctcagtcaaaacagatgaaaactgttaaggcgttggaggaatctgctataacaagtgataagaaaagacctgggatggatatagtagcgtcacctaaacaagtttctgactcgggtccaaccagtttatcgcagaaacctccaaacaggcgaaagaagagtctgcagaaaagcttacaagaaaaggctaaatcttctgaaaccactcataaagctgcacgtagttccagatctctttcagaacaagagttgttgttaaaggtggagcctctaacttcacttctcctacgcacatcagtatcttgtacatctatatatttgtttattccaatttcaggataagctt

SEQ ID NO: 1028 - DNA, 91924 bp, Arabidopsis thaliana
gaattctaagtattaccctcacacgtatacaaatataaccataaaacgaacttttcaaaagacgcggtttctcgcccgacaacaattacttgaataatttatttaactacaaaggaaattagtgtatgtaaggagctttgaccagttccaatgagaatcatccacgtctcattctttttaggctggatcttcttcttccatcaccgtccgtccactaccccataattcttgccttagaaggtttcactaattacttcgtcttcgtttttctattttgagatttgacaacttccccttttaatcatgtttttagttctgttggacaataccaaatcaattgcactggttttgctttctttatccaatcattttttcttttgtagttcattggatccatttttacatcatgtagagtagccattgttacaataccaaacaaagttagaaattgctaaatataattgttaattgatataataatcgtatatagttaaaactcaacttgttccatttctaatcttaattatgtttttttggaccgacatcattctcttaatgtaatgaatagccatttaaaacagagttgaaatataaattccaaaaatttctggcagcaaaagagagagaagagaaggagctattatctgcgccatctgtttctccaattaataatctccttaaatccggatttgttattaattctaatcttttccaattgatccactttcctcctctgagtttttaagactaatagagagatatatagagagagattgcttctggttttgccttccccctttgtttgacctctcttttctttcttcccccctttgtgtttcccgcattttctcgggaaaatctaaaggaacaaaaacattaaaagtttgtgattttctgattatttctttatttaatcgagacccattgtttctcgcctgatttggcgcaaacccttttggattctggtgaaaaaggttgggatcagaggaagaatgatgacgagtatggaagggatgatggagatgggtgtattggatgatattataaggagattgttggaaggtaaaggaggtaaacaggttcagctttcggaggtcgagatccgtcaactttgcgttaacgccagacaaatcttcctttctcagcctaatcttctcgagcttcatgcccccattcgcatctgcggtctctttctctttctctccctctctttgtggtgatgatgaaaaaatattgtggctttttggttttgatgatttgggtttgagtcgtattgcacgattggggttaaaaagatgagatttgtaattgggggcaaatttgtgttgattagggttcctctttttttcttaatgtcgaaacgtgtgtttgaagattttagcatctgggtgatctaaaaagttttgattttgatggatttatgttaaagtttctgcaaattgtttctaaatctgctgatgctttgttttatgaggtactaatggtttccgttttgatctctaattcaggtgatatccatggacagtaccaagatcttctgaggctattcgaatacggaggctatcctccttcagcgaactatctcttcctcggcgattacgttgatagaggcaagcaaagtcttgaaacaatatgtttactcttggcttacaaaatccggtacccatccaagatatttctcttgagaggaaaccatgaagatgctaagatcaacaggatttacgggttctatgacgaatgcaaacggaggtttaatgtacggctttggaagatattcaccgattgcttcaactgtttgccggtagctgctctcattgacgagaagatcctatgtatgcatggtggattgtcaccggaattggaaaacttggggcagattcgggagattcaaaggcctacagagattccagacaatggtcttctttgtgatttactttggtctgatcctgatcagaagaatgaagggtggactgatagcgatcgaggtatctcctgcacgtttggagccgatgtagtcgctgactttttggataagaatgatctcgatctcatttgcagaggccatcaggtaaatagacttccatagtgatcaaaactagaaccaaatggtccaactctgtagaaatgtttgacatttgttgtatcttgtgaatatgggcataaaggaaaagacttttatgagaaccttccaagatattgacttgtgagggacgtgtttgcaggtagtggaagatgggtatgagtttttcgcaaaacggaggttagtcacaatattctcagctccaaactatggaggagagtttgacaatgccggtgcattattgagcgtggatcaatctctcgtttgctcctttgagattctgaaaccggctccagcttctagcactaatcctctcaagaaggtttgtttccaccaagaactttcaaaagaccaagtagtccttcttttgataataatattggttagctcggatataccaaaatctgaatccaacaagaccaagccttttggacttgatgagtcatgacaagttttgttcttttggaaacttcacgtcataatgtaacacatgtttctctctatattttctctttttgatcaggtaccgaaaatggggaagtcttgaaacttaatacagcttattcccttgagagatttggtttcacaagctcaagctagcgctctgtgcatttcttcagatgtaggcaaactgcaatggagaagagaacctcaaaaggctactttacttagtcatcaaagaagaagcatcagtagaaaaaacaaaagagagagagagagagagaaaacaaaaggtgttgtccaaatattctgtgtatagttgcagaaacatctcttttctgcttctctagattttcatctccttttggtctgttttcttttatttggttattcttttaacaccttagtttaacttagagtgcctctcctcttttgcttttttctttctttcctgtatcatcaaattaccacatttcttaatcttttccatatttgaattgacttccatggtttggctcttacttttgtgaatcatctgcacagtaaaaacaatttccttttgatttagcagtacatgtctctctgtgttttttctcttccagcagtaatacatatactttttacagagcttacttttacacaatggcacgacttgttctctctgtttcggaattggttcttcttgaaactgattctccctctctcgtcgagttttcatagtagcacattttattctcaggcttttggtttaatttcataggaagatggttcaatccggtttactattaaaccgaaaaatctaaaaactagatttttcggtttatgaaatccacaaaccaaataatatagctgcataccaacccaaaatctcggcaaatcaatgttttccgtaaataaccttttctttatcgatgttgtcaggaacattaagggtaacttagtaatataacaattgcagacgttttagcgagcagaggatccccaaagccagacaaatcctcttccgtcgccgccgccgccgccgcaagtctcgtcggttagtttctgaatctctcgtttctaaatctctgatctttcgttggattcctgtgtttgaatctcagcttctctacctgggtttatgtctcagctcttgaacttgcttgatttctgcatttcttgttattttcgtttgtctttgtctctcgatccgtgtgttaccattactgtatatgatcgcataattcatctgtgttttgctttgggtttattgatctaacttaatctctatttccttggattgatatgtaatggtggaatttctaaagatatataggaaggaagttggagagtttctagcaatgtttatgtttgattccaatgttgtggttctcaatggagaaaaacattatagaatctctgagaaattttatattgaatagccaattgctacaggattcttggttcggatctttcagtttcagaatctatatgtgttttagagttgttttttctttgagctgaataggtttagagagccaatctttcacttgattttcgaagcctatatctagttcattggttcgtagctaaagagtgtttctgaatccttgctgtaccatctgtgttaatagggtttgaagtctatgtttgattctatctttattctagagagcttagatgttactttttaggataagccttaaatggagacgcagaaaactcaagctgaaaacccgccaaaaccggccacgtcttcatgtcgaaagaagacaaaggatgatgccaatttcctagaagacgtcaaggatcacatcgatgatttcattaatgcttccatggatgatcacaagaactgtttcaacaaaaccatcaagaaggtttgtctttcttcatgatttactaaacacgtaatagatcttgatcactgagccactacttgtgattttgctaatagtaagttattttgcctttttcagatgtttgggttgtcaaaggctgttgcggataagcagcaaagtgaggctaaaggaggagtcgagagttatttgcctcttcagacaacagtctcagattagagaaactgatgatagaatcaagctaacaagatcttgtttcggtttactttttgttggtttgtttcggttaccattgtttagggagatatgcccatttataacagtaataaagatgacaatttgttattggtggatagctaaaacataacatgtctttactttgttttgttagtgcccatcttcaattaccaaagaatgttctgaatctaataattttgcagtttttcatatatgcttttcagcatccaaaaaaacttttaagtgccaatagaatcgactttgaaaatcctttaaaaaccctcatgaaaacaaaaagaagttggagaaacttcagaacaacctctggagagagttagtgctgttgatacattatttgcattctttatgcccctatttccccttgacatgtttctcaagtgtgctagggtgggtgttcctcaagtgtcgagactaacttctctttcgtttcttggggcagatggcaccacacgggccaaatctccactctgacaagaaaagagatcgaaaaaacatggaattggaggagtatcttcagcgttcattaccattccttcgttttttatatgccagagaaaaaggtctcatagggaatgttattctcgagaatttgtttatataggcagagataagaactacacaatcatatttggctaaggtattcacaatcctaatgtgcgtcgaaagaatattattttcaacaaagtttcccaaattgtgaaggaaaacagattctaatcgaagtaatcctgcaaaaatattttaaattgaaagattatcttcgattcacgttcgagttctttaatcctcataaaccaatcattccatcattatccaacttttttaacgacaatctgaaagaacgagatccatatgagctcttaaagtaagataaccaacaagagttaactggaacaaaactaaataacatctgacaaaaatgacagaagggaaaagacaaattgtattgaataccgagtagaaaccaaaaaacagaaacatggaatagagtatacttctaaaccaaactggattctgaggtttagtcttcctcctctccttcgttctcagcaatgttgaagtacctcaactcatagaggttacggtccttgtttgctgcaatcactctgagccaatcccttacattgtgcttcttcaggtacttctttgtcaagtacttcaaatacctgaaaacacacatcaaagacaatggtaaataaacaattgcacttggaattgcttcaactaagaaaccaaaacaagactcattgctacttgtcttagacactgttagataagtttggctatcacaatcactatgtatcatatcttaagactaaacgagcaaagatcaatactaagttcatgtgttatacctcttggagaattggccatctgcagtgacagtgatcttgctcttctcacgtgtgattgtgacagaatcaccaagtgcaccagctttgccaccgaccttgatcctctcctgaagaaacttctcaagggaagcaatctccatgatcttgtcatcgacaggctttgaacaatcaatggtgaaggaaactcccttcttctttcccttggcaacagctgcacctccacgactcattttcccaagacttctctgtaaaatccaaaaaacaatccataagactgtgtctatagatcattgacaaatcatactgatacaaataaagaagcctatattctctatatactttataagccattttctagctactatgactaactcaaaacctggaaaatgggaagtgagatctgtatcgcagattcgactttcaatctaacatagtcaattacactctaagtagatgaaaaatgaagctaatccaagaggaaatgaagctaaaaactcgtttcttctcattccatcttcacatctcgagagacaagtctatcgaatctactatatcagaaactgaagcccgttccattaaagggagatagtagcagcgtgtaccttgaacaaaccctagaaggtgaaattctctgaagagacgagcggcgtcttttttgctttggggagaatgaaacagatggctagggtttttgcccatttaaagtggtcttgttgccctaatttatatttctataaataaccacaagatccccaaacttttgttaaatccaaaaataatcccaattgtttttaaattgtaataactcccacaactcgttagacaagtgaggatatttattcttttgtgttccaccaacaaatgctagttgttcaatttaatcatggatttgttttcagtacattatctcttagaagtctgtatattgtgtgcaatctacaacacatgacaatccatctgaatgtatcaaaagaatgatatactgtaataagcaaaaatttgtttttgtcaattacatgaaaatttccctgaaaggtctacaaaaattctctctagctacgagaccttgtaccaaacagaaaacgctgcaaccaaccattgcagcttaggagtttagagtttttagtctttgtgagataaattttccggtggcagaaacttcggatagcggttggtagcttcagttttgtggtcatagtactccaccacggctgctccagccaaagcagctaaagtcagcgcctgagcgtgcaacctgagaagaagctcggtgagaaaagtgcttcgtacagtaccatgtgactggatgtctcgaacaaatgatttggctaagaacataaaatttatgtcgataacaactatagcttacaggcaagaacagagaaatgtacatgcttttgggacatggagatgatgatgttgctcaactataaatgttcatggctacagaaaatgtttcaaaatgcaaatgagactcaaaaactttacaaaaaaatcattcaaccatttataatcaatcaatccttttgattagaagattcacctggcgtggatgatcttgacactggttttcatggcaggttgggaccagttataggcgatagaaccggtaataccacttagccataaacaacctgattcaacaacggtcaaattaaaacaatacaggttcagaattagcagaaagaaatatcaaaacaccaaaaataaagtagatgggaatgcattctctaatatctttgcatgtcaaagaacattaagaattgaggaccaaaaatgtctcagtggaatcaagaggaaatccaagacggtaacagaaaccgtaacaagttaataatcaattctactatatgacattaaggcgatgaaatctaagatcacaataaacgacccaagagaaaaggaatgttgagaagaagaagaagaaacaaggataattaccgacggtacgaagtttgtgatcggagacccattttctgatttcttcaaatttggtctttgattccaccattgtttggaaaaatcaaaacttggaagaaaaataaagcctttcgccggtaatttatataggctgagataaaatcggaggaggaaagttctaccttttgtttttgtatccctcaattttactattaaactattttattattttgcaattacgacgctgaattagaagaaaaaaggcggccttgttgtaacattatagactatagacaggtcttggtcatttgactttggtttggactgttcgattttgatgtcacgtatagactatagtcttggtcatttgacgtcaatttttatgttgtagggaaaaaacaaaacaaaagaaagaccatcaaaatttgggatagtaatatgaagaaaaactcgacagttaaaatttaacataaccagatagaagaaagaaagtttcattagggtaataacttggatacccaatgtcgccacattaaaaaacaaatacccaaagacctctttcgctcccccgattcatacccagacctcgaaccgcacgggggtcacaccaccgactgggggaggcagtctctctccaaaccattacataccattttgtgtttttagattatcaattcatcacataacttgagcatgcagtttttcaggttttctcaaatatcaaattcccaatgttttttttttctttttttggttttttgtccatcatgagaattgcccgaccggtgagaatctcgaacgggtactgactcagttcttaagatgatcctcctccgccaccgtgcctctgatggaagcttcctgatccttcattaaatgaagatgtccaaatgtttggttctctgtccatctgattaaccgagtaggcttgttgtgattgcatataaggatctctctcccatatgttaaaccggataaaaccactcccacctgcctgatctgaagaagatgacgttgatcccatccctgaagctattcctctagcgggcctccggccagatgggaatacaggccctcgagagactataggcgaatccggctggtgtgactgtgcagaagactgttggtaataggcttgaagagcctgcattctgtctcgggtccgagcgttgcttcctggaaatggtggtgtcctcggaacagatgccaccgagctacccgctctaccactggaactgcacaaacaagccataagatgtgttttaacaaacaaaaaaatatgatagttgataaaaggtctaattggtaaacctgtggtatcacgaaataacgggcttttgttagtcacgtttatttgcagatttgttcattaatttattccgcaagatgtctaaaatgcaaactaaatatgccattacacaagttttcacgaaaattgactttttcctacttatttcaattccaccattccattccgcaaaactaatttatttccacaaatcaagagtgtagttaccaatataacaattcagtgcttcaattttgagaaatctttgcacaaaaccaaatttgaattctgtgagcactttagtttctttatgtgaagaaattctcaacacatttgtaattaaggtcatattttatgttcattagtgatatacctctaccaagacagaaaatgtttacctgtgaccatgaaatggacgcgtgaaatgtggcggtctgggtctgatcatatctgagccgttggctcgagaagtcctcgcagcggctggtggaggcgtgggctgagttggactgcccacatgagcgccagaagcagagaaatgctgtggcggtgggggtggaggcggatgataatcccagccgtgatagtgcggatccacagggaaaccataaggagttgggacttcaccagaaaccgaagagccagtgttccagtgactactgaaacttgaactgtctgaaacgcctgcagcaccaccactgcttgaggaaggcgagtgaaccgggccaaaataggttacatatggacatggatgacctgcggttggcgctgctggttcagtatagtaaccttgctgtcccaaaagatcgtgatctgtaccacaacattagaattaatagatcgataaacccgaattccagaacataagaagaagataatgaggacaaaaatggaataaccgatctgacaaatagtcttacatgaactcggtgaaaattctccatccctacaaagtttgaaagagattcatcagcaaagaagggaagagaatgccagttttgattgccaaaagtagcagaaaagagagttaaatggatgttatgcagttgcttactcgaaagaaggaagacgggctgagcttccaaatgggcaccagtgaactccaaaagactacaaatatacataaacacaaggtattttcgagatggaacataattgaagcaatcaaataaaatgaacagcaatctttcaaaaattaaaaactcagcacatgagacaaagaagtgaaaagtaatgcagaagcgcaatggaatataagaaggattgtgttatcagtttcttaccatttcagagtatgctccaatatcataaatatcttcttcgtgaacccaatcctcgacattgaattcgggatatgaacgacaaccgtttgcataaagccactggcctttttctactttccgacagttggggcattgcatcactccctttgcattgaaagccgaaccaatacaatcttaaaaacaaagaaaacagatgtgaagttagatggctttgtcaaaaacataagaaaccaaccatgaagcataatgaataatccctaatctgaggaaaatttggtcggcttatagatacaaacacacagatactgctatctagagattctgagctaataaatgtactaatgaaacacatatggcacgaacattctgagattatgagccaatacatgcatcaaacaaggtggagagatcaatctaagaaacttggcagttgcaatgaaatagtgatgctatacataattgatgctatgtccgtaacctcacataataataataattcgaccagatcaaaactatatcaagcatgaagccattagtttcagagcttaataccaaatcatgagagccacatcacacaaacaatggtagtcgaaaaaaacagaatgtaacaggttctttattcataaatcgaatcaaataaggatagatctgggtgattcaaatcaaaatctgaagcaaattctttactttttttcaaacaatcgaatgaaaaagaacaaaaaaaagagtatcgtatcagaatccacaaactcacctagatggaactgatggtcacattgaagattagcccatgctcgatcgccgtttttaacaaccgtctcgagacaaatcgaacacgcaaccgaaccaaaaccatcaccttcgtcgccatcggcaccactagcttcgtcggcgagatcattatcgccgaaattgaatttgttacccttattgcctaaacccataaccaaaattcgaaatcaaaataacccaaatctcaaaacccttttttttttttgaatcaaccaccaaattcgaacccagaaaaatcactctccccaattccttacgcttcgattaatttaccagaataattaatttaatccttgtacgaatccgtgaactctcttcgatcgtcaccaccagagagagacccaggaagaagaaaaaaaatcgctctttgattttttagagtttttttttttttctgtagcgttatgttttgtgtgagaaagattgggttacggggtagaagcaatgaccgctgtccaaagactagaatggacggctcagatttattctgacggatttgtctactttacccatcagctgcttccccctaagctttttccatttttatttatttttttccttttccaattttttggatattaaatttaaattaatacccatcttggtattttagctttctatttttggttctcataaatgactttgggtttcaatcgattattctgtaaaaaaaaaagaaatatcggatttgagtaatttgaccgtcgatgatgacaatgccagtaatacaaatttgttcctaattgtttgaaaaactaaagaatttattggatctcatcttctagtacatgtgaactaaaacatattggaaaacttacaagtaaataatagtatagtaaaaataagttttgaaggtcaatagtagtcaaagtttttagttagtccaatgtgacgatgttcccaagcgaattattgcgtccacatgcctaaagtgtttattcgcgccgacttttgcagctctgctccccctcctagttaccaatttccaatttcgctcttttacttttactttttacggtgttaatacttttagagtttaaccccaaaccgttattatatttaggtgaatggaacatggttttcaaaaagttggttcttggcgatttcattaacccgaaaaacaaaaattacatagttttgacaaaaatgaacctcaagaagaccggttagagttacaaacttcaaacgtgttgttgaaaaataaattgtgacatgtaaaacagtaagtttaatgtatttccctggttttataccaatatacttttactatttagtctttttccaaaaatcttttttgtttaagtagataaggaacggctctaatttaacaaaggaagatttcctttttcttatatgaaaaaatacctaagccgagaaaaacaaggaatcaagacgactcctaatgtcaattcatcatctcaccattatgaactctataaatagacttcttctatcttctcttcttttcaccaaattatcttctgctctctacgtttactctgatcaaatcagcgaaagaaaaacaacacaaaaagtctcttttaactctcttcaaacatgttggtctaccaggatattcttacaggtatattctgattctggttcatgtagtgaattacgatattggttttcatgatttgcgttaacgtttcgttttctaggagtttactcgtgtcttgtaattattcaacctcaatcatcgtcgtcacttaacatactgattttgtatctatctatgatctatcccaaaaagaaaaacatacattgatatgtatgtattgcttgtgtaagaagctaaagtttgtctctcttttttgatcaaacaggcgatgagcttctctctgattcctttccttacaaggaaatcgagaatggcatgttatgggaagttgaaggaaaggtattattcttaaataaagctttgagtttttttttcttacgatcaaagctggttgaatttaaattgatgtatcattgttattcttttttgtgttcattagtgggttgtgaaaggagctatggattttgacataggtgcgaatctgttgattttgtaatcaaacaatgaatttgtactaagggatttagacaaattcactcctctcttagctcacaaataatcaaagggaaagaacaaagttgtttgaacagaaagctagggtttgctctataatcgtagtctcttgtattaggttaaagatgatcctttggggagtttgacccccccctatttatacaatgggtcgaacataccaaaatatgataaacttctaattatcttaggtctaaatctccattacttccattcttcatgagattcccctcttttaaatggaagttttcccttcacacgacctcagaagccgcctatggcgatctcgattgtcgacctaaatcttctggcgagctcatgacttaggcccattaacaggctaaccgggattccccggttcaatcgaattctcgattttattcatgttattccttggtttaaattggtattgtcggaggtgctaattcctgcaccaacagaatccatcgggtgaggaagggggtgaagacgaaggagtcgatgatcaagctgtgaaggttgtcgatatcatcgatacgtttaggcttcaggtaaactttaaaaacctttttaatcttcttttctttgagcgcaagaaacaaactaatttgggacaagtttgagattaacttttgggtatttatatgcgatgttctggcaggagcaaccatcgtttgacaagaaacaatttgtgatgtttatgaaaagatacatcaagcaactaagccctaagttggactcagaaaaccaagagctgttcaagaaacacattgagagtgccaccaaattcttgatgtcaaagctcaaagacttccaattgtaagctcttctcttttatcttctttcttctattttttttttgaagttaattttgtctaattggtgaattattttcaacgaatgtgacagcttcgtgggagagagcatggaaggagaagaagggagcttagtgtttgcttactacagagaaggagccactgatcctacttttctctacttggcctacggcttgaaagagatcaagtgctgaatacttcaaagctacagattttatttttttattttggagttttactttttgttagtacttttggttaatcttgagagatttttctatttcaagtgaagttaacttttatgcaatttccttaaattgagagcttgaaaggattagtgcaacgaaaaaggcctgattagttttaaaaattcacttgatatacgttcaaaatactatgatatatacaaaatattagagattgataagtgaattctcttaaaaatttctgaaagaaaacataattttagaataggtctatataccatgaaccaatactatagagatactaagatttctaaatttccaaacttgttttcagaagaagatgaacacaattaaatgtattttgatataatagatgatcctgattcgaaaacttaaaaagatccaaatcggaatgagggtacaagtaaaactagttgaaagataaacggcattgataaaaataaatgatgagagagagagatcaggcgtagtagttcaagcttgctttcttcttggcctggacttggatgataccttcattgaagtcttcatggttcacctgaacacacaaacacaacaacagagaaccccaccttaaaaaacagaccaaactacacaatcataaagctcaaatcattaagagttctgtcttttttacctctgtggcatcacggcgaagagctaacatgcctgcctctacacacactgctttcagctgagctccattgaaatcatctgttgatcgtgcaagctcctcaaagttgacgtctgggtggacattcatcttccttgagtgaatctggattcattcagttgggttagttgtgttatgagagccttttacttatcaccaagggtcatgtttgaaaaatgggagagacaaacctgcaagattcttgctctcgcttcttcggttgggtgtgggaactcaatctttctgtctaatcgaccagaacgcatgagtgctgggtccagaatatctgcacggttagtagctgcaatcacctgaaaaaatagaaaggtatggttgttactgtttctttgagaacgatttttaagaccagtatgattagtccttagaatggataaagacactcaccttaatacgttcatcgctactgaatccgtcaagttgattgagcaactccaacatagtcctctgcacttccctgtctccgctgacttcactgtactctcaaccaaagaatgtgatttgagcaaatagctgagaaagtgcagaaatacatgaattggaatcagaaaaagatttgtacctgtcgaaacgctttgtaccaatggcatcgatttcatctatgaagataatgcacggagctttctctttggcaagttgaaaggcatcacggacaagctttgctccgtctccaatgaacatctgtatataaattggatatgtcatcatgtcattacaatcaagtatcattatagctcgtcacatgtaattattgttgccagaacactaaaatcttatatccagacagggtaaagagttctaagagatgagaattgaatctgatactcatatatatatatatatatatatatatatatacctggaccaattgagggcctgccaatttaaggaaggtggcattggtctgtgctgcgcaggcacgagccattaaagttttaccagtccctgggggaccatacaagagcactccctttggtggacgaacacccagcttctcaaaacgttccttgtgcgtcatgggaagcacaattgcctctacaagctcttggatctgttccagaaataaactcaattagtttcactacgaagcaaagtcaatacagcagattaacacaatggtataaacatacctgcttctctagtcctccaatgtcattgtaatcttcagttggtttttcatcgacctccatggctttaaccctagagtcatactcggatggcaaggtatccaaaatcaagtagctatctttgttaactccaaccaagtcaccaggtttcaaactatcaggatccacgagtccaacaactggtagaaagatggtctgcagtccacataacgaaaacaaaagtatttgctcagacatgaaacgggaaacggaagagaagatgtagaaaacatatctaaagaatgggtttggaagtctcacctgccgtgtagacgttttcaacacaacacattttcctttccgttgcgagtcaagatcaatatttgcaccatcttcctcagcatcatcttctggattcatctccaaaatctaatagcatgatatggtaacacaacagttagaattcaaatcaaataggtaagactctgtaggaaaataccaaaaataagataagaaaactagttgaatacctcgacaatgttgccaaccaagtaaggcagctgcttgttgagtttaatcttctcctgattctccttaatcttctccttgtaagaatcacattctagatttgttctttgcgcgtcttcctaaatccccatcaaagaaaaacacaagatgagcaatttcaacatatccaatttgcaacaagaaagacgtagcttttcaattcaatcaatctcagttgagttgaaaaatccaaactttgaaaacacacgaagaaatcacaagaagggtcataaaattaaaggtctagttcatctcctgcttccacggattacacgaaactcaaaccctaaacccgtaatcgcgaaaaatcgaaaccagattcgagcctgaccttactggaattaaagcgattgatgaaaccaatttaagaagatacaatcatggagaacgatataaaggcaaaggagatcgagagagatatagggcaaaccttgagaattcgaatctcgttgtcgagaagacgagtagctctagtgatatcttcggtggacatggaagcaagctgatcctcttcgaagcttgacgtatcttcaaccataggagttgccatttcaatacccaaatcggagagatagatcgccgggaagagaagagcaaagagttagggatttctcaaagggagaggagagggagagcgactatgagagaaaaaaaaccaataaggagagaagacgagagaaaataaataaccaaaaagaaaaaagtaaattatattagctattaaaaataaaaaagagttttcttaggaaaacttgtcttcaaagaaatgcataggggaaaacctctgaacgagttagagtcttccacattctctcgaactaactcaatataagacaatttaaacccccctgactatagctttcagatttacattccaattatgaatgtctaaatctactcttgaaattgcaagaaccttaatcacaagaactgcaacagaaagatttcttccaaaaaaacaaactttattagaaatgctgttttatttatgtctctcatccgaaatttaaaagaaaaccaaaattcattaaaacatcataaacctttacaaattcttgtcatatattcgagcgttaagtaaacatatatatgctcaaaactcaatcataaatgacaagtaatgcctcggaatctaaaaaaaacaataatcaacaacagaaaagtagtagcattaaacaagctttttttgtagctaagtcagcattggttgtgatagtggagccatcttcatatagcaaaacgatgacgttcacgggagttggcgggatgtatgcaatttcaagagtagtgattcccatagggatcacatttattgtgcagtatcattcggctagatctgaggcgaaaaagcaggaggatgaaagtgatcactgaagacgtccaaagtcagcaatatgcgattatgaaatcaggtaaaattatatttgtattagatgactacccacgctacgcgtgggtttgttttaaaaattgttaaaaaaaaattacattgattgttctttatgctaatttatatttattatttgtttatttttgtattattaataaaattagatccataatatgtagtgataatttttatggttagattcatttgtgatttgaaatatcaatttatatattttgtctataaagctaattatttataagattttaatattttttcactaaatgaatacatataacaacaataatgatattttgatacaattctgtgtaactatgttatgtttgtagtttaaaattttcctaactcgattataaataaatcaattccttgttttatgtacttcaacaatattgtgatagactcatgattaaagtttggattgacatcaactgaaaaagatctgaagactattcgtacaaaaaaataaaaaaatagcaaaaattgaatgtcattgaagtcaatacttttggatattttgtcattgcatatatcaatatttaataaatgattgtgtcttggatgatttgaaaattgttcaacttgattataaataagaaggtggaggaaatgggtaattacgtatgcttttgtttatttttagacgatggaagatacttagttgtttgtgtgtgtatcaggaggaaggagaccatctctggacgtggaaaactcgaagatgatttgcaagaaatttgtgagcctcaactatgactagtgctcatgcttggaactgaaactatttcttttagtatatatctagtaattgctagcttatcactctttagacattttgcaccatcgttttgggcatgggaccaatatctgatcaatattcaaaagtggtttttgtaatgactttaacttaaggattttaatttaatcatgattcaggatatatcagcatcgtcttaacaaattaaaacaaagctttctaaccgaggtgaacacaaaattaatggaggtgattgacaattgaattaagaacaaggatggggacaacgcattatcattaaaaacaaacgtgattagattatcactacaaacgtgattagattaccacccggggcctaagactttcaccatgggcctctattattgggctttcctttcaaattgtgctctctttttttttttttgctttttttttattaacagattatttaaggaaatctttatcattcatattaaagtttaatacatatttagttctttaacagttccaataacatatccgttgtcgtccagcggttaggatatctggctttcacccaggagacccgggttcgattcccggcaacggagctctttttgggaccaaacttcaattctttcatgcggcttgcggaacaatatctatcatacttactaatgcgatttgtatacattactccaaaggaaagacaagacacaacagaaataatacttatccttcacttacataatggaaatcacagaaactttgacaacgaaatatagcactcaaaaggttgcgagttgatgattagtcacttgccaagtccaagttctttctcgacctctcttgttaggctgaactgtaaagtgttctgccatgggaacagagttcgtgtcaccggaagtttcctcctcaaatcctgcaaaattccatatatctgctcagaaatttctaaatacacctcgaggttaccattgtgcagccactgaaatcgttatttggaaagagacaattaccttgaaagtgttatccggtaattttgaataagctacctaatgattgggtcagatacaacgagattaacaacacatgaaatggaaaagtacgagataaatgagttgctaattgggaacctctagagatgcaaggtactctgtttcatggtgcctgataatattggctatggcaatcgcgcagtcatctgcagactgtcaatggaacaaaaaatgaacgacaaggttatatcagagcctacacatatttgttcccttggtgtatattatatgctagcctggcctggcttgtggtctacattattgtacacagtttcgcagataaaatgaggtacctgaaatattgttgaatcttggaaatctttttttgcatctaattccacatttccctcttcaaaataatgagctcctacctgaagagaaagtgatatacttaaaacaagctcactgaacatcaattggcatagaataacgtcacagtcaacttacagagaaagcaagtcgcgaatgttacctgcaatttcccttttatgtcaagcacctgggattcatcctggaaatctatgttccatacagatctccaacttccattactgccaaacaccccggtttggtcactcaaaatcattttttctctctaaacaatggaaatggagaaataagtaaaaggtcattttgtactcaccagaagttctggggactaagtctcatagcagtaattataacaacaagctcaaagtcggaccctggaccctcattatctttccctttcacacaattaactgcagacatacctttcggataagattcactaacatatctctggatttcagcatcaagagcatatctgtaatgagcaaaacaaccttttcaacatatgtattcagcagtaagacaaaaataatgtagatcactccaggttcattgccctttattcctaaacttctgaaagtgcttttctaatgtttgcctttgttgccataagaacttaggctacgaatatatgataattctgaactgaatggtgatgcatgaacctgatcttaaatcctacagctgggtgtaaaaatccatacctgtactcctcaatatacaaagaaggaagttcttcatcatttgcaggccgtacctttgtacaaatctggtcaaagagaggagaggtaagcttaaattagattcacagatcatggcacaccataatgaagaacaacaacaataaaataatgtacctgtttaacatgatcaactatggcaacctgggcagttcttggatcaaggtactcattttcattaatttcactgtaagatgagacaatcacctgagattcaacaaaacagtattacgatatctcgcagcgaataaacactaaacagttttcccataacatcttcaaaaaatatgaaaaggtgatgcaggacttatgttgattgccaatttgatcaacaatagtcagcataagagtgttgcatgtagatatcagtcgcaagtttttaaaaactctctaggaaagaaaaagacacacgaccaagacactcaaagctcaaaaattctcaatccaaacagcgaaattgaagaactcctactagaatttaaaatccctaatttctaagatcgactaatctctagcctctttgcagctagcgaagcaaaaaccctaggaaagcaatatacatctaagagagacaaataccacaaagtatacttgagttctctccttctgagtgatccactaagtattgttcaaagctcttccccttttcattagccacatttctctaagaatcttaatagatcatgagaatagctaattccacataacagagattacaagtcaataatgttcgacaattcaactcctatgacacaacaaatgaaaatttcaactaagtagaatagaaccagaataagatgctaactcacatcaccagctccactgggcatttcaaggcaaatcatgtgagttttgttgtacactggaaatgcttccatggctgcttcattgtacacttcctcatcgctcaaaaccgcctttaaatctgtcagaagtccaaaagatttacagaaatcgaaacaaagatgtcaaatcacgcatgatgctcaaaacaaaacaaaatgcacacggagaatctatgatctcgccttctcattgagggacacatcggaggaatcgtcggaaatatgtatgtacgatgcatctaagtacctttagcgacgtaattgatttctccagcgggagcgttgaggaaaaaccacttggcgatttcctttttctggtcgtaacttagttctgtctccagtaactcatcttcttcgtccgccatagctttctctagaaaaaagttagccggagagagaaattgtcgccgtcgatattctgaactctgtagggatacattcgtcattgcacactcataaactttcctgtgttggatcgcgattaaatcatgaccgttcgtttaccatgatgaattctgacggtgtcgttttgatgtgatagattgtgccacgtggccattcttactcgaaccgcatcgtttttgcagcaaatatcccaatttcaatcgaaacccattcaaattaatttaagcgcatgaaaggcattatctttagcaaaacacaccaaatctaatctttaatgtagtatttgctgtgattaaaaaggttcgagaaactgggattttattaaaagctaatttacaacaacaacaacgagatagataagagttcatgtgtgatcgaaaaaaaaaatctagctaaatctatattagacaagtaaaaacatgtccatttgttgtggcctgtgggacttaaacctcattactaaactaatattcctaacgggagtttaacttgcaagttataatccacggttcataaaatactctctccaagcctttaaaggcctaccaacattggcagattcaacccgactcttgtactcgttcattagtaaccctctagccgcaaaccccatcatctcggttgagtccatgagcttcttaatcttcaagctgacccctccttcgggtgagactctccttttgggagatctgacaatgcgatcatcgctttggccaatcggtttactactgggtgatgattcttctgaaaattgtgctcccatcccaaatgagtcccaatcgactctatgaaagatctcagcagcacggtccgagggtgttttggcattgtgtgacatcatagattgttgttctatatatactctatcaacttgtgcttttaaatcgtacagtctttgtccaattctggacgaaacggcgtcatacaggtgtttccttgagacgtgttgggctccttcagtgctgagaatgtcattaaaatgaatagggtctccaatgatcactgtcacctgcgaaatgtttgacgtaaatcaaacagattaaagattgcaaatacataattaagcaatgtaataacctaatgacaattagtaacactacaaaatgtctggcatttgaactctatatccttccatggacaatacatatccacttactcaaaatatgaatcacccaattatcgatagatcctttctttcttaaatcattaattcgagatccgattcactcctcggatcactaaaaagtcaagtccaacaaaaattgcgagaggtcttagatctgtatccaagggcttgcaaatcaaacaaagcaatacactcttaaactattttaactcgaggcaactaactacttctctgaaagttatggttttttatttgttttctgattttgggcggagcagagatcatgatgcatcaaactattaagagatcaaaaatgaaagctacaaacgaggaagaaaaaattggagattcagatatacttactgtcttgccaatccgtggaacactagctccaactggcattatatcctgcataccagtatgcacaaaaggaacaaccatagggagagtatctgcgtccaaaatcaacctaaaacaaataaaacttgttatagaataaaatgataagacacattaaagtggagtgctttatataagggaagtgaacccaaatcacacatgactcaccttccgatacccctcttcgctgagcccatagtctttccaccatcccgggagcgactgccttctggaaagatgtgaacccaccctccgttgttcaatttcgaaatcgcaatgtccattccctgcagaagatgtgacacttgttttcatcagtaaatttgaatatagataaaatagcaggtaacaatcaagaaaagctagctacaaaaacagcctgtgttacctgctgataaattccttcaccacgagaaattggcaaaactttgacagatcgagagaaagctgaagttacagggtttttaaagcatctatctgtagcacagagcgtccacctcaaattacgggcatcaagtagaaatttaggtggaagtaatgaagcaatgacaaatggatcatccacagatgcaacatgattgctcacctgaagattattaagaagttcatgggtaagaaaacaagcaggttcatctaaaaccccaaccacaaacacacaacatttcagaacataagtcaactcataccgttacaagaggcttgttctttggtctgttgagtaaagcatcatgcaatttctctaaaccatatacctaaaaagataaacaaaataagaactgataacaggactaaagataagaatgaaatttgtgaagcagaaatctaagatgtctcaaacctgaacacggttaaaaccattcatgaaaacatgacaagcatttccaataaggggaacagccacagtttgtagcatccggaaaagagcagactcttcttctgccgttaagtccttagaaactacaagaacaaggagttttgtcaattcaaattcccacaaatcaagatagtagacataataacaaacagaatcattggagcagcttggaatgacagctaaaactattgccaaaaagtgctaaaaacaaatccttcaggtgatacaaaacaaataacaccatcgagctaatctacgccaatattacgactcaaaccatctctcagagaaacagctgaagttcaaatcacaaagctcaattacacagatccactattagagttaataaaaggtaatgattcattcaaacctcgtctgcgataaaaagccggtggagaagggagagactcccggcgaaagttccggaatcgagtcacccagcggtggatagtggaagagaagcaaccatccggtgagaaaaccgtagctcgaccacggtgatcatcgacggcgattcgaaatcgatcacgaagtttaagattgaacaacagtgcactcttccatagatctgccttgtcaacaaaatgaattcccattctgaatcgtgtttctataaaacgagccgcgcgaaagattacttgtgaaaatttgattcagttagaaagaccgacggacgaaacttctatagtcgaaattttgaccgggaaagaaaaagctcaccaagagagtgagaagatcgtggagatgagagaaagagagcaagtgtcgggaggtttacgtgccaagggtttggagtgctaacgtgaacggcggtgacttgtgtgcataatagctattgggattaaagtttcggatcagcgcgacatgggcccatagtttcttgaaaaagcaaatctcaagtctgcttctctcaccgctgttaataacgctaacgattatcaaacatgatgacatacctcgtcaataaaaaaggttcacaaacttgttatagatatcagtaatatctgcatatcacaatacatacgagttgcatatgtctgcatatatacaaactgataattaaatcctaccgacaacaatattcatctcttgataaaaattctcggtccattttctgaggatataaatatgtaatactatgatgtatcactcaatagggcgataattcacgcaactttttttttatcactcaatactcaatagggtggtaatcccaaacttagattatacaacttttgattattaaacgaaacaacaaaagttcatgacaaagaaaaaaaagaacgagaaccagagatcaatcgctaaccaagatccggttcaccttaatcccaacaaaacaaaaaatcacactaacaaaacacccatatcaatcaagtggatggaactccaaaggctcggtctcagctttctcctcagcgaagatttttgagatcctctctgttggaaccaatggcatgtacgatgtgactctgtaccctttctctgcagccttaaccacagtatcattgtacttctcagagcagaaagcagctgttggtacagcaacttgagccagccttgggaatagaggaagctggttaagcttcttccaagctgaaacggcacactgctctgcttttggctcatagtttgcatacaactccttagcagcaggctcgtacttggagtagacggatttagccattccagaagcggtttcaacaacaccagcacgtcgaacctcagaggccaacgcacgtgccacaatgggtgctatctgagcagcggagatggcttgggcagacacttgcttgacgactggtgggacacgacggtcaagctcagtcacagacatatcaacctgcaacaacgcaaaacaaacttgtcagcttcaaaaagagggactctacagaacataatgacattgacccgtttacctgaaccttctaccaaagagatgatatgaaatcatcacaactttaactgtacttttttaatcacatatgttcgatgaagtagatatacaatcaacaacacagattcattcattgttcatcaacaaaggcactttcagcaagatccaaagatagggaaagagtcaaaattgtaccttctggtccatgtatttaaggacctcaacagggacgtcgtggtatttctcgtagacaggaccaacgacagtcttgacagctccttcaacagattcaacaccaggtttcaaaggaccagacttgtcctttgccttagcgtaaataagagcaaagcgaagcagagcttccacagcagcagcttgcacgaattgcaaatacttcaacctctctttctcctccttggtctgacaattcaataattataacatgcaaattaattagcccacaaaatatcatttgttttcaattcattaatctaatcttctacataaacaaaacattaacatgcactacgaatacgatctgaaagaattgaactacagatccatgaatgcgataggtagagacatgtgaacaaaattgaaccaaaaatcctccaaaattacaatcacagaaacgtaaaatcaagatttgagacgaaaaacgataagaaattgagagagatttacgtaatttaccatatcaagcttgggctgagcgagatccgtttgagtagccatgatgaaatcgatgcaaagagattatcgaaaaaggcgattcgtttgaagagaagagaagaaatttaaaattgattatatttgacgaacaaaacaaagcaatggtgatgagaaattgacgtgacctaggtttctttatataacaagggtttttggcacgtgtaagaaccttattacgcgtgtaagcaagcgtgtgttttctctaattgggtcggttaggagcgcgtctttgtatgcgctctctcgtaaccatccatattctttgggccgttgacgacttgtgggttaagtaaatgtgtgtcgctaagaaaaggaaattttttattttgattttgttttttctcaccagaaaaggaaattgtttataataagtattataataaatacaagaatattcttgttctaatgatgaagacttgggagtcaatggaggaatttattttagattctaatttacatagtttaatgattttaaaagtagaccaatgttcacacaaaaaaaaaaaaaaaaaaaaagtagaccaataaacaataaagggaaatcatgtgctatgggctcaaaacaagttgaagcccactacttaaaattacatgaacacaaacaaaaacaaaacaaaactaagtcacgtgatcattatggcccaatattacgagtaaaggcccaatagaaacatcgaacgaactatacccatgttagtgcgtggttcatcacatcggcaaagtatgaaatggagaagagcccaaaacatgacccaaacaaagctacactccaacattaatctcgatcaaatgactaaaacttcttatacctgattgtgctattgattccattgttagtccaatttcaaacttggtggagggaaaatattacagattcgagtaatattaattacaaacccattggttatataaaaataaatcatttgcggctatgattctgtttatattcggcatttcagattattatccacatttatctagttctgaatctttacacatgctaaaagagaactatctaaactctagagtatattttacatgaattcatgaaaacttttgttttatgggtaataaactctacagaatattttatactccgacttgttcttcttgttttccacattttcattatggtactacattcgttattacttgtaaggttacagattcgtctattgagagccataataatgtctaaaaacatatccaacgacgcatcattaattatataaaaaaaacaattacagccaaaacgaagtttcgaggctgataaattagtataagaagaaaaatgttacgaattaggttgtgatggtcccatcattaccttataagccaacatgccaccaacagctaataaaggaaggatcaattcaattctgcttttatttatctttctgtctactataattaattaatacgctccaaatatttattactcaaacacctcagattcatataattaaattaacggtaatcacttttcattaacaattgttagtaaacacaaaactacgcacagatctcaaaatcacttctcggactaataactatttttaatctacgcaactttgaattttttatttatgtatatagacaacaaccagaaaaaaaaacaaagaagcaatttcgttttttttcctttcaaatcaaagactatagtagaagtttttttttcaatgtgtaaaatcaaacccatatatcccggaaaataaaaataattaaaaaaatgaaaatcgagaagagagacagagacacaaaaagaaaggggcaaaataggaaattcaagtgactcatcttcttcaacgcctgcacctagtgatggtgctgcatccacggctgtaaggattcgcctgagctccacgctggcagttgtagtacgacgcaccacgccgtgaacaaggcacactgttcctcctcatagcaccgtagctaatgtacttcttctgtgctaatatacgccggcttatgtctgaatcgaactccatctcttcttcttccgctatacactctgcgatcgatcctgtgcatccagagaagagcgatgaagatccggctctcacgaaatctagcgaatctccgaagtctccggttgattccacggctgagattactatcgccaggatcgcgatgacggcgtagatcgcgcgagtgttcgtcatctttaagccaaaaccttctcggtgaatcagagtcttcctttgttaatttgcttttactctctttctctcttggaaacttgattctgtacacagctgaagacaacaggttaagcgttggtgtgtagcttcttataacctgaggtttttgttataatgggcttgtgtatggatatattaacgaaactgccattgtattttctccaacaaaagaataggtacgcgtttatttttttgttaattgattatgaaattgacttattatacgcatattcgttgctctttattttaatcatgcaaattacaatgtctaagctttgaaatattcgttgggtttattttgaagttttggatatgttttcgtgcatccacgactttgttagttattaggacggattcaaataaaattttaaattacaattaggttttagttttacatagcaaaatttttttattaatccaaattgcaatatttaagaagagcataatcttgagtcttgaatactatttctttacgaccgagaaaattaattatgttgattgatttcctaacatgttaatgttccacgagtttcgtttaattgtgtgtttttcattcttctaaagagccgaaaaaaaaaactatgtaatggcattttacgtaattaatgggtgaaaccaggggcatagctatgcagaaactggttgaccggtgtgtcattttccatctcgctctatcggccaaatggtatgaactctagttagacggcatccaacattccgttaacgtcaacgcacgtttctcctttttccgtttatgtttattgccggagcttttttttcactgccatcattcttactttttttttcttttttttttggtcatgtatatatttgaaagaaaatgtgatttacaatttcatgtataatcaaatgttcatctaaagatatattattttgttaattagtcaactactatccaattttgtgcacattcatatatttggcaaatatgcaaacttgctctagtaggtgaaaagcaaacttaaagacatgtaaaccactatccaaacatggttactaatctatacactccattcatgggtagcactatttctgcgttgacaatttatttagatagaatgatgtccgtgaaataagattaatttgactatccacatatataatttagaaacgataatccatgtgtgtttgagtgtttcaacgtttatgtatgcataaagttaatttagagaccattagatgatcgattcttattgcgaaatagtatttcttatcacaaatgttttatttaaaataagagagcaacggctagtttgtcttttttattagttttattgtcctccgggataaagtcgacggcgtcagagaaagagagaggcggcgcgtaacgtgagaagaagaaaccgttaagaacaaaagtggggcccaaatcacagatcactaaggacggcgtttgcgcgttaccaagtttatcccccaaaagccagctggctccttttaaccaattctaattgtttttgtttcaatataatcttaatcaacattagctttattcgattgtattttcaagtatttgatagattactaacaatcatatgatagttagtttttatattaaagtagcaatcatgattagaagacgacgacaaatgttttatattttgttttgaagaaacatatcacgagattgaaacttatcattcggaataattgatgtaaccgaacaaaattaagaatgcgaagaagatgaaattacataacacgaaagtgttatgcaaaggcaaatctctttacttttcttatgaggcaatcacgaataagataccaatgatgaggatatcaaaaagaaaaaaacaaagattccaagttatggagaacctcttcctacaacttttatcaagtagaccaatcttttttaaaagattgcacaaaaaaaaaaaaaaaaaaaagagacagagagatgtctttaaattaaaaacgaagattatagccaattcataaagttgatatttctataatattatattacgtaattttaaaatggtccctttctttggactagttcgccatcttttactgatttaatcgtataaagagagacaaagtggttggtaactttgaagaacattttaaaattatgactcattttattctgtctcatttgcttttatagagggttcatgaaaaactccttctcatagttgtgttttgatttaaacaaaggtaggcgtttgaaacaatcagtctaagtgaaaagataagagaatgcgtttgaaatttgacactttttggctgtgttgggagggaaagcaaagaggtgggtataataagaatatagtatagatgcagagattcaagcgcaaggtgtgggttggcattctatttttatgtcaagttagaaagaaaaagcaaaggcataataaacaaacatgactgaacaacacagcacgcgattcagaagtttcgccaagaaaggatcaaagtttgattgtagtggatgaagcacctaacactacacatatatgcatgtactctcacctttttcttctattctattctattctattctagacagggagagagagagagaaagacattttaccgtaacacgtagagaatttatatgtaagtgtggaggaataaatcacgatcttagtgccttactttacttgtatattctgtcccagtttccacaatcttctctggatcactttcactgtaaaaaaaagagaatgtacaatgagtttgaataagagaacagatccggtgcttatataacaataattaagaacttaaagagtgacccttgtttcttgttcttgacgcatttagtctgtttagtaaaagtctacttccaatgagaatagaggatgatgaaagaaaaacaaaacttaaatcatatttgaatagcattctgtggtggcattactggtatcatacacgagaaacatttctttcttgcaagatatactagtaagagtgtctatagctctttctattaccacacaagaagacacaagtctgttttgatcaatctctcttgtaattaattagcttaaaaaatcttgaatgattgcgagagaagggtcgagaacttacagctggatgagatgacaaaaaattcaagagaaagggacttgtgttaataatcttcattgtgaggtggtgtcgcctcgacaccttcgtcgtcatcttcttcttcctcatttgcatccacccaattactaggatggtgctgggagaaactttggttctgtacccgtactgaggacaagtgacaaagaaatgactactttttaggataagtaacgagacaagagaagacaaggctgtagaaatgattttgcaggtacctcgggatccttcagcatgatctatctgtgtgggacgttggctgaaatagagtcaaagataacaaagcatatatagaaagaagtacagtcactggagatatgtgatttcgggttatggggcatgctgaaatggttagtcgttaaataggctaagaaatgcattttagaagcaaattgcaactacacaagcaggaatttctaatcaattatggactatgatttaatgctgaacagctaaacatgccaagaagtgtttagtgatagtgattgtgagagtgaaggatacgacttaggaggagctgcaggagcagtatctccaactggcccgccttttgatatttccatattcctaattctatggatatccaagtctggttgtccctgagcctgtggcctatcctcagtaccgttcacgctcttagtggcagttcctgctaccgagcattgatttcttaaggttttagttaacaggaaatattgtgaatacaaatcataaccattagattagtaactacctgaaagttcagaccatactcgtgtgtgatcagatgggtgctcagaggcattttgcctagaccgttcttgaggccgtgatcctacttgctcggcagcatggccacctgtggagtttgctgcttcaggaggttctgccggaatcccttcctgaagttgagacacaagcattgtcgcaagaacgagtgttgcatcaaaactggagcttgacccatcacccaaaccgaattttggagccatcagtattggtctagcaacgaagtacatattatgacattcagtaacagataagatagtgactacaaaactagttgtcccggccaaaaaagaatttggtgtttaaatgagtggtttagctagctaatttgataagcatgcacctttatagacaagaaccatagtttagaagtattggccagaatgaaattgcaatcgaatttaaaagatgtcaagagtacacaagaagatgcattttaataagcgaaattcaaagcatgaaaaacataggattcttactcgccagctttttcgaaaaaaagatgaatatcggcttcacagccctcgcagaatgcaagaaatgcctgaaattattgaagatatttagttgacacaaacagaggtggatgaaattcaaaccagacttccaaaggaggaatgttaaacctttagttccttcaaggaaaatgtgatgtcaactggatcacctgcgtgagtatactgcaaaaattcttctgatggatcaatccatagctgtgtatgtaacaaagagtcaccatctgcggattgaaaagagaattcttagcagccttcctcagggaacctggatattccagttttatcatgatttccgtgtcctaacctttggtaggatccacatagctccgaaactcaacagcttttccacctatttcacttgcagcatcagaggggaaagaagtttggtctgtagcaataattgtaatctcttggagggatgactggaagtttccaagcaacttgctcagatttcgaggatgcatgactaaggtactaggaaatctacccctatcaagggacagatgctgtatatctggttccacattgcaagtaatccaatatgttttcttcatacctgtacatatgataaaacaaattcaagccacgcttcaacggtaaaccataaactgctcaaagttatctaagaagtagaggtcacagttaacagtttcagataatattaaactattatgaacaggtctgaaacatgccacatccaggtttttacacaggacggctacacaaagttactagagaatgtgataattgcagacaagagcaaacaatgtgtaagaacaaggaaatatagattttaccactgtaacactgcaaagtccatttgaccttagatgcatcatgatctggcaactgcacactcatatgatcaatgctcgcgagaggggttctaagaacagaacaaacagcctggtaaaaaagtaatatcagcaacaactacttacaccaatgaatttcattgctaaaaatttcagaataacagtaaaaataccttcaaaagtacactgaaatgagcttgaggaccagaaacagtatatacatcaaagaaacttgactgaaatgtgatacactgataggcagaacgtgaagcattcaaagtgtgcaatgccagctgcaaagttatgcacaaaacaaaagaaattagatctaacaaggcgaataaagtagacagtaaaatcagagtaatgtgacgaattgttcagctaaaagaggtgataaactacaaattcaatcaacacagcgttcctaagcctcttaaagcatttgcccagaaaacgatgaaccaaactcttggacacaagattttgggtaaactaacggcgataaagtaatcatcgacttaaaaaccctaatcgtcagtacaaggtgacgaaaataacttataaacaatttatttgcaagagtcgcaccaaatacttgccaatccttaaaattagggttacggaggaaccgataaagcatataaaggagagtacctgtgtcggcgaagcttggacaacgagctcgttaccgacgcgtgcgaggcagattatagacctagacaaggtcttgagcgcattgccactgatactcaactccatctctctctgtctctggagaaaaataaattcaaattttaatttaaaccttaaaaataaaataaaaattggtgaatgattttagtgggcgattggcgggattgccatgaaattcctgaaatcagcttaaagcgcgaaatatactaaaaagtcatagtatagtttcttaataatgggcctatattgatattagttaatgggcttttaaccgcacgatttaattgggcttatgtctcagatagagtgacgtcattgactagttcggtgccggtggtatactttaattggcatttattattgcgaaatatatttgttgcggtgacaaggacaaatctcgcaattgtactgttttcctttaccgaaccacaaatctaaaaatcgccaattatttgatttcatttttcagtttaaaataaaaagaaatgaaatatttgtctttcttttcttcttatttcttgcaaatggaatctacaattttctccaaactagcatgtgatatatctgacaatttatgggctagtatatttgttttaaattttttgtttgtttctccaaactgattatttactttattctcaagacaaagtgggtacaaacaactctctgtaaatgtggattccccttttttatgctaaatgtagacagaacacatcaactcataaaactcttctcaatatctctgagaaatgcagacaaaagttgtaactttctgcattcgacttttgaatatgaaaaaagttagatactttagcatatatatcatccctaaattatggtttcttactttttcattggtcttctcgatacgctgacttataatctttgactcctaaactccttttaatttatttgattgacaagtaacacctagactttgaaaatttgtaactaatcactcatgttagcattacgtgatctacggtaccgtgtatatgttatataatagagataacaaagtatgtagactattccaatataatacgtttaagtctctaagacaagttcatacaacattggccccacgtatatcaaatttgctgacacttgagaagttaaatgaaccaagtagaaagagtgaaaacaatagagaacaaatattgtgtacaagtctagtgatattcgcgaaaaaaaaaatgtctagtgatattcgttttactcaatctcaatggtaaaataaatcattcaatctagtaatctactactaagggaattttttaacatctttttctatcgacgtgagagataggattgaaacacacaattctcaacctctgctttgataccataaaaaatgatgaaagtaaatacaacttttccaatcatatgtctctccctcatttcaatattatgtccttgtaaacacattatatatgatcttattttgatgaactttgatataactattattaaaaacgcattcaaaggccaaacactagctttctaaaaagtcattcatcatatcaaactaagaaaatcatagtataaacttctcaacgaaatcaacatcatattctacaagataatattctttgcgacctattttgtgaaattatgaacaactaaccatctcactttgggaagctttagaatgtgacaagaaagatagagaagtttgcctaaattattaatttcaatttcgtcactacccacctattggtctgatttaccagaatccaatctaaagtccatatattttttaaaatacttttaattgaatattcatcagaattttggaaacttctaaccgtaagaataaatgttagattactaattatgggtgaattgagaattctttatccaacttatcatttatatagcaaaaacatcccccaactgacaacaattttgagtaaaactttataatctttcttatagccatatacgacagagaagggacatgtaaaggaaaatattttgtctatacagaaatttatgttttcctttgcatttgtaacatatttataccactaatattctatcaaatagtttcagtcaaaattaatttatctataatggcagttgcgtattgtgtgtgttacgaaactattacgacaatagagtttttttttctccgaacattcatatatccttaaataacccatgaataaaaaaacatatgaatgggaatcattcatacgtatgttgttaggtacgtgtatacgcacattcatatcaaaacacaagaataaattctatacaataaatgcaaaaattcgtttgtattgtaatttgcctcataaaacaatggtgggttgagaggaacaaagaaagcttgtacagtaaataaccaaatggctgaagaagccaaatgtgccaacaataagaggacccacttcacaccaacaccttcacgcttctttctatcttctctttgcttactagattttctcctttttaatctcttccttaaacaaaaaagctgttttcaaacttaaactaaaaagcttcatattgtcaccacattaattccaagaaaattcgcattaatgctctgcaaaatttaatgattttaaaattaacatttgttcctttattcaagaaaaattcgcattaatttatttatttaagagatgattacctaaaatggtgtgtataaattgcaaaattagctctgttgttctgctaggagagttaatggagaaagagggtgttaccattaccagtacaactatagttgcagagttcaggggttccttggagtagcattaaagtctcaaaggagagaaaaataaaaaaaaaatacattaaagacaaattgagtcttttctcataaatggtttctttgtagtgtttatgatttgtttttacagagaaaagatctaaaaagagaacaaagatatggtttattttcgtcagatttttctcatgatcattgtagtttcattacactgctgcaaagttagattcttttgcattgttgctaatgctaaagagcttgatgactggaaggtgttaacggtggaaaacggtgaaagataccgaacccatgtcggaagatacgccggagaagagggcggcgagaagataaagcttcgagttttggaaaagtttcgagctttactcgatttgattaaaccctctacttcacggagaagaaatctcgccgagtctgcttctttctctccttggccggcgccgtcgccgtctccgtttcccaacggtggtccaatcgaatctccggcgtatcctccagctcctccacgaccgattcctccacatctccgtcgtccgttacctcaacggacccatccattggaacaacccgagattcaacggcgaaaacatgagaaaggaggaacatttaagaagattcttgtacctgtcgttgcttccacagcttctgcaatcggtttcgtagtatgtgtcgttggagtgttctgtctctgcgcgagaagaaaaaggaaaatgaacggtaaaacgctgtcgtttaaaaggaaaaagggaaaatctcaaagctcgacgaggaaggttagtgtaaaccctactctcgatttcttgtacctaaactcactaggagttgacttggagagacaaaactctgtttctgttaaagaaatacgagaaacagagaaggatttgaacggtatcaatggtggattgcttgaagaagaggtaaagagaagtatagaaacagagatctcacatgattgggacaatgctagtagttattcgaccaaagagattgtgtcggtgcacgaaaatgatgaagaacaaacagtaaactctgtttctgttcctgttgttgtaatcaatgattcttcagacgatgatgagtcttttcattccgttggtggtggctctcagtattcaaatccaagattgtcaaatgcttcctctgcttctggtagtgttaacgttggttcctctcaacgcttctcagaacacaaattggatattcctgaatgttctagaagcgacttcggaatctctgtatctgctccaccaccaccacctccaccgcctccaccgcttccgcagttctctaacaaacgtattcacaccctgtcttcgccagaaaccgctaatcttcagacgctttcgtcgcaattatgtgaaaaactttgtgcttcttcctcgaagacaagctttccgatcaatgtaccaaattctcaaccgcgtccaccgccaccaccgcccccgccacaacagcttcaagtagctggaattaataaaacgcctccaccgccattgtctcttgatttttctgagcgtagaccattaggcaaagacggagctccattgcctaaactgaagccacttcactgggataaagtcagggctacaccagaccggactatggtttgggataagctcagaacaagctcttttgagtaagtttttaactagccacaatcaacaaaatgtttttcatgaatgtgtgattatgtggtcttgtggttattcagattagacgaagagatgattgagtcactgtttggatatacgatgcaaagctcaacgaagaatgaggaagggaagagcaaaactccatcaccagggaaacaccttcttgaacctaaaagacttcagaattttaccattctcttgaaagctctcaacgcaaccgcggaccaaatctgctctgccttggggaaaggtaaactaatatcaaccaaaatcaatccattgaggagctgatctgatgttaaaatgtttatctgtaggggaaggcttgtgtttacagcaactagaagcgttggtgaagatggtgccgactaaagaagaagagttgaagctgcgtagctacaaaggagccgtggatgagcttggctcagctgagaagtttctcagagctcttgttggagttccatttgcgtttcagagagctgaagcaatgctttatagagaaacgtttgaagatgaagtggttcatctcagaaactccttctccatgcttgaggtattacagtgtttactttatattcgtttattgatttcttgcacttcaagttacggtgattaacacttaaaagtactttactaggaagcttgcaaggagcttaaatcaagcaggttattcttgaagcttctagaagctgtcctaaagactggaaacaggatgaatgtaggaaccatacgcggtggtgcaaaagcattcaagctcgatgctctgcttaaactctctgatgttaaaggcacagatggaaagactactctgcttcattttgttgtacaagagatctctaggtctgaaggaatcagggtttcagacagcatcatgggacggatcatgaaccagagatcaaacaagaaccgaacacctgaggagaaagaggaggattacagaaggatggggctcgatctcgtctcgggtctaaacacagagctacgaaacgtgaagaagacggcaacgattgatctggaaggtcttgttacctcggtgtccaatctgagagatgggttggggcagttgagctgtcttgcgagtgagaagctgaaaggggacgaagaaaacagagcatttgttagttcgatgagctcgtttttgagatacggcgagaagagcttggaggaattgagggaagacgagaagaggataatggagagggttggagagattgcagagtattttcatggagatgtgagaggagatgagaagaacccattgaggatctttgtgattgtaagggattttctagggatgttggatcatgtttgtagagaattgaggtgtgttagggttcccaatagccctagccctttggctccgtttcgatgagcaatgttgactatgaacagaggtgtgactgtttggtttctgtaggaattttttttatgaaatttctgagttgtttatgataaccgagcggttttggggtttattgtggactagaggtgggcagagattcagactttgagtctatggatgaagatggacaaatatgtatatggatttgtatatgtatcatacgctaaaatcattgattcatgagagacgtcaacatttctatggataatccagagtttggtacttattccgtttcttgtttcaaagaactacatacatcatcatatacacatcaatgaggttgataacaaggttctagttataatatcatgatactgaacacaacaacttcattacacaaaacgacaatgcttacgggagtgtgatggatgagctcgagtgcttcgatgtttgttttgcccaatagtcatcatgaacccctcgtgcttgtatatatgaagcctttctatggattctttttattcttacaactaattttgttgatttttaccttgatgaggttgaagggtgaaatgttgtgaatggaacgtcgagatatatttcattgttgagatattcttgattagctcatttcatatagacatctttctaatgtttcttaagttgcgagttcgattttcacaaatagtttaataatttatatacaaagagattttaagagcacaaataattaaattatgtatttttattccaaccaaaaaattttgagtattaaatgtccaaataaaaatttaagaatatttttgttagttaagatagttaaaattaaaatatgggatactataatgattacatgccgattatatatgttaggtgattgtcttggtacgctttgtttaagtttggtacgggcattataccagaattatctggctatatatattgatcatataaatcaaatatttagacaaacacgttttattcaataaaatgcgttttataaggcattcacatatcttataacttacattcccattgctaccaatactgcttctttactatcaacgccttgtttcttttagcaatttggattctctggattacaaggttttactatgcattttggatctcttggattgcaaggaggatcatcgtgaagatatccactgcctctgtttggcttaatggcaccttgttccattctgcaatttggattctctggattacaaggttttactatgcactttggatctcttgggttgcaaggaggatcatcgtgaagatatccactgcctctgtttggcttaatggcaccttgttccattctgcaatttggattctctggattacaaggtttatctatgcactttggatctcttggattgcaaggaggattatcgtgaaaaaatccactgcctctatttgtatgcacgccgccaccatttgtatccattgtcctacctttcacaagatcatgtccttcaaatgtgattatatttaaatatatgttagtccaacataatttgtcaaaaaagtactgcataagattaatttctattcggtaggtttcacatataaggttaatggcaatatatgttcagaaagtaatgattttgaaacttcataatttctatgatgaaatatttttccccattctcggtcatgcctcttattcataaattttcattttcttatttttaaattgcatagagttatgattttccattattcaggtattaaactacaaattgaaaagtgtattaaaaaaactacagacgggaaaataaatatacttaccaaagacaagaacaagaagagaaaccaaaaacaaaagctgaaaggaaacgttcttcatcttccaacgaaaactgttacggtgtattttgcttttagtgatgaagcttaagtaaccttcgtcgtttttttataatgcaatgtacgttgtggggttttaaccaaaagaaggaatgtacgttttgggtttgaccagaaaatcttaagagttaatactaattgatttgagtttgactacactaactatatatggtacgcggtactatactactatatatttcaaaactgttgatggaataaaatcaaatgttaaggtaagttaacatgtattatctactacaaaatgataagattatatctcaaatttgatacacgattctttcttattaaatgagttctctgaaggcctcagaaatataattggctaatgaaagccacgtgtacatagagactgattggagggaaaaaacgttgaattgaggaaactcccaccagtcctaatcttctgatcttaggtgaaacgatttttattctcctttttttttgaaaattgattttctattgaataggcacgagaaagaaaaataaatacacaaagttccaaacacacatgagtgaaccaaatcattataggaaaaaggagtaaatcacgacgaaaaaaagagaggattaaatcaaaccatttccaaaaggccaaaagttgcttgacatagggtctttgttttgatcaattgcaactgcaatttcaattatactacaagcaaccatgtatactttaatctttcttaattatgcggacataaaagttgtgtcgtcttcttagaaaataccaaactggcttgaagagaaagttagggtttgttcgataaacgacatggctccaaaatcaagcaacagtgagatgaaggatggatcttcgagcgacccagaactgacatagtccattgaaacttctacccgcgttgcctcatcgttcatggtgaagcgcagggccgaaattcccaacatatatcttgctcatgctgaagaaaccaatttttacttgaatttattatacatactttgccacgttttgggttttgacttctttccatatttatcagcaactaatttttctgtttattttgtctattaatgtttgattgaaaggcaatggaagagagaccatttccaagttgatggaagagaataatatcatatcttatttactatttagcattgtactgtgaatagtcattaattaaagagggttaagtctctgttggaattttcagttagattataaaacaaagttgttttgtataagaaaaatcaaacaaatgtgttcctcaaattcctttaaaaaaaaaaaaaaaaaaagaatcacacaaatatgagactacaagctaaaatattttaatgataaactgttggctaggcttcttctctacaaaagaaaaccaaattggcttgaaaaggaatttagggttttgaaaaaaatcgacatggctccaaaatcatgcgacggcgaggtaaatgatggatcttcgagcgacgtaaatgtgatggaaccaatggaaacatccaccggcgttggcctatcttttctggggaagcgcagggccgaaacccccaaccctggtgaaagcgagcaaatagctgacgaggacggagaagaatacgaatcagtcgaggacgttgttgtggaagacgatcgaatcagaggaggaaggtgacgaagagagtcacagggatgaggaggatagtgagccggaatggggttatgatagcttcgatggccgagagtatcattcctctgatcagatggggtattcggacaaggagtttgatgagaaatgtcgttattatagacgccaagtcatcctaacaaggtattctcgagtagaaaatgattcattcggattttcgtgtatgttgttgttaatcacgtatctttggtttgtttagggtttctttgagccgtcagaccgttttcctcccctctggggtggaattagttcgctctacgatcttgaagcgaacgctgggaaaggccttaccgtccgtgaattctgcgctaacttgacatcttcatgtctcaacaagtataaccaagaagtggcaagttgttcacttttaatttggttctaatcatggctattagattcctaattatgtgtgtatatctaaatcaattatgtcttgttgtttttagggattgaatgtgaagttggaacatatcttgagggcgaattacaaccctggctccatgtccaagttttacattacatttgctgcaagagagtctgattctccagatgcaccttcagaggagtatcaagctaaggccgcatggtctgcagccgagaagacttatcccatcttttgtagaccaagtcctctacaaaagtgaccactcatatagactatacacgttacggtttaggctcttaattttgtttaaagggtgtattactaattgttatatattaattaataacaaaaaataaacagttaagactagagtatacactaagttgaacatattggaatcataatgcaaatatatagataacaaaataatttaaaaactgatgaggaatcattttttttgtctgatggcacaaacgcaaataagtgtcacggacgataaattactatgaattgtgttatctatgcgtttagcttcttgttagaaaaaaaataaaaaacccaaattgaattgaaaggtgaatctaaggtttactcaatcatcgagatggctcctaaatcaagcgacggtgagaccaagtatggatcttcaagcgacggcgagatcaagtgtggatcttcaagcgaaaaccaatcaacggagtcaatggaaattaccacgggagatgaatcttctatgctggggaagcgcaaggttgaaaccaccgacctggaggatcccgatgaaaatgacgaggaggatcccgatgaaaacgacgaggaggatagtgaaagtgatagtgattccgaatgggataaggatagcttcgatggccgagagtatcattcctctgatgatcagagagagtatgccaccaaggaccttgagaagagggcccgtttttacaagcgcacggtcatcgaaaccaaggtattcatctgtctatcacccttttccatctctatacgtatcgaattttgctaaatgggtcattataaaatctcaagtaacttagtagtttgttttggttttaggttttttgagtcaagtgccgaattcccaccttacctatggggtggaattgccacactccgtggtctggatgaaaagatgcgtacaggtgtgacagttcgtcagtttctaggaaacatggcatctctctttgtgttgacaaatataacaaacgacaggtaacaacatctctctactttggcttttcagagtcctagctagtttatatttatgagatatgacccattaattattcttgtctcttttttccagggatttaatgtgaagttggatcatgttttgagggctaatttcaacccagggggcaggacaacgtactacatcacttttgctgcaagagagtctgattctcctgatgcacctctagtggagtatcaagctaaggtggattggtctgcaggcaagacttatcccatcctttgcagacccacttcacctaaattgggtaatcttttttcacctctcatattcagattttaacatgtagttttgtatagttgacccagaaaaaagaacacgtagttttgtatatatatatatttagattgatcagatatggagtatcaaaaacaatgtggtttcttgacttgttagattgatcaattaaccactctgattgttatctcgtaaattctgcatatagtatactggtttttgtccgcttgatatataagcctaagaagttacaattaccatctgattttgctgttttttttttgttctgtcaatctgttagttgaagttgatggaggagctcaattgaaaaaggtatccgaggagatcatcaattgaaagaggcagccaaggtgatgaaagagagtagttgaagaatttcataaggttacaaatcttgtagaccaagtcataaggatacttgtttattctaagtttctagcgaatctagtagggaccaagtcataaggatctataaattaaacattttagatgttgaacaaaataaaaatagacgtgaacataaacggagaaaaaaacgtagacgggaatggataccatctgtgggagtagctagtttacactgctaagcattaaatatttgaaacaaacaatccttaaataacacaataactaatggtcaacaatgtccaaatctttttgactatattaaacagaaactgaattttcagtgttctttgtcattttgtaaattgatggaatcttgataaaccttctaaaaattatgcgtgcatgggtttcaactcaatacgtcaaagtcaaaaccatctcactcgggtttcttggctcaactcaatacgtcaaagttaaatcatttatgttgagatttttgttttcgttttctaacgcgtttgagttctttctatcttgttgactatgatcagtatgatgaaatacatatcaaataatacaacaataacaagatataaaattattggaaataatcgaagtaatcaatttctaagcatagatatcatcttcacaaggagctgatggctcatgtctaatatttccccaaactcctaatctacaaccctcatgaaccctagcaatatccgaattacatcctctgatttgtcccctaaaaatacatccaaatctaaaccctaaacatatactaccctttggttttccggtctcggttatgacctgataatttatattggtatgctcggttatggtcttctcttcattcaggtgccgcaattgctttaccggtatgaaaagtttcccaacgacttggtcggacccgaaaaatctcttacacttgatttgaaacacaaacactgactcattccttcgaaccttgtcatcttctatatagaatttcatacgataattccaccgtaagaatttcttatcccatgcagcagctggagtgacttgcttgtcacgtgaaccacgtgtgaccgagacggaaacatagacagttggtctgaacaaaagattgatggagttgagatcttgagctgatagaacgttaatctccaccggttgataatactccattataatcagtagaagaagaagagatgagtaacttagaaagaggaggtttcgggattataaaagttgtttgattaagggtcctagtataactacgaatcttttatatatatcgttttaaggatttgcatccaaatcaaaaagcttttggtatattattttgttgggtcaaaatcattatttattgttgaaattatgctatagataaatactttttattattattattttttatcaagcagtcttaaaatataataaaggataaatcagtagtttagatgtcaatctgaaatattttgtagagaggctgatcagtttcaaacaccgcccgtaactgaaataatattgataaaaactaaactaaaacaaaaccgaaaaagaactgatatatagtacaatcacgatgaatcgaaactataagaaatttgtattaaaaaaagattttccttaaaaaacttttacgattattagtatgatcatgactaaaaaatcctctacaacatcgaaaattgtctatcttgttggaaaaatatcaattggacaagagaaaatatatttgctagatccgataatatctgatttcaaataaactaaactagattttaacccgcggtataccgcgggatgatttattttttaaaagtaatatatattaaaacttgcaaattttatttttataaaatatttatattttacaatttatgattgttattaagtatttatatatattaattgttattaaaaataataaattaaagatttaacccgtattgaaacagtggattaattatattttactttttattaatgttgattcaaaaattcgtcttgccaaaaagtcatttattttattaatattaattttatttatgatatgactttgaattataatctaaacattttagctaataacttaggagtgtaccatatttatttaataggggccgaatgcacttttaccaaaatccaccaaaaaagtcttgcaaaaatactatagacccaaatgtaccatatttttttttgtgctaatttttatgtgattaagatttaattgatttcgtatataaaatattaaatcgttttacgaacttatttgtttataatttggtaacagatagatatttgaatattcagtatattttgctttagtttaggaaatttttgatgacccgtctttaaatccaataagccctataattaagagatgaatattgtcgttaaataattttgataatcttaatgatgtcattaaaagattttgtttttgattaaatttttctaatggcatgtaattaattacaaaaagtaaggttatgtactttccaaataatatagtaggatattgttatgctctaaaatgttagatctaatatcaaacgcgcagaattaaaacgcatttggtttcagttttcatgcaaatttggttaattgtttttttttttttttttttgcagtttgatattggctttaaaataggaaaccaataaagtttttttttttttggcaaactggaaaccagtaaagttagaaaaacattctggtttaaaatcggtttatatgtcaaatgtggatatttagagaaagagagatgttctattcactttgaattttgatacccttctccagataatactagttaataatacctaaggacagacttttgtttttctttaatgtaatctttcataaggaatgataagggacgtaacccaacaaacccgtgacgttggccacagcatcgttacaccttgttaacagctccatcatctgcagggagatgtccaccttaagctgtgacgggtctagtggtggctcgacgtggtccacttggttatttacaggctttggttctgagtcttgtgaagagagaggaagaatcgaaaccgaaaatggtgactctgtttctttctcacccaacatgaatttcactcgtactgttctgtggttaccattacggttattgcctggttttttcaaacaagacttgagctggatgtttggttggtgaaccggcggtgcttgctctagtagctggttcaatggtttagtgatgggtttgtctgtcttgggcctcttggctttcttcagttcatgatctccggatgcagaagaagctttcatgtcacggagaaagtatgtcacattcacattgccaaagagagatttgcttcctgatacatatcttaaggcagtctgcgcatcgagtttatacaggaagccaacacggcagatcgaggatttccaggaaactctgatggctgattgatccaactgtccaaagcgtccaaacctcgccttaagcagatcaatggaagggagagattcaccaggaggaaacatcatgaccagcattgttggctcaactaccattgcagatggacccgtcttcttttcttgttgaactatagctggtttggcattgatgggaactcgacattggtctcttactggatttaaaggtgcaagacttgatctctttgttgcatcttggtttgttttcttgtcagaagccagtggtttgaactgaatggttttctttagcttcttagttgatgggacatcttgttgactgtcagacgatatgcggtttctcccagcctttgattgttcattagctctgcacaaagtctttgcagattttgacagttttgttgcggaaggagatgtggccaagcttttctggtaaacatgtgatcggaaatgaaaaaagaactgccttataactctaaaagaacttctatctgaggatccaaagagagggtcaagcgagagagctagcaaattactcaacagctgcagaccatcaagtttcactatcaacatattggagcgtctctttgctgaatctacttgtgacgatttcttggcccaagcttctccagaagataacgctttcctcttatctggagtgtcacggttcagctctgacacatactctttcttctttttctttggttctggaggacaattctcagatttcatttcgccagaagaccgtttcacgacattgcctttcttgatcccaactcctgcagaaaatttcccaccactaaaaagcttgagagagcttttgttagatctagaatttgttccagtctcatcttgtttaaggcttttcattggttcaaatttctcctgatctggaaatagagttgctttttctcccattctcacatctgactcttgagctaaacccttgtcatcatcacgagagagctttgaaacagaggatttctttccaggaatattaccacttgaagaggtgaagttcatgctgacaagcccagtctgctcatgtttcctgggagtttggagacatggagtccttctctggagtagacgatcccaagctgaagatccgttgatgccctgaaactgagaagattcttggacctggccaaattgaactgtcatatcaccagcttcttctcttctttttggaagatatttgtcttgtttagtagaatcctttacattcatagcttttgtgtagctctttgggttgcccagagtttctgcactgaccaatgagccactcaaggggactgtaaacacaagcaatgcatgaggaaatatgaaatctattccaaccacccaacacaatgagatttcacaatccagaatttaagatcaaagatatgccatatccttttgaggcattctaagaatacaacttcatagctataaatcctacaataacaaccttaagaaaagcatttttgatgtcgaaggatacccaaaccacaaaactctcgaatgtagcctatatggctcgagaaacagaaaaacaaactcaacgagatcaccaatttatagagtaccgtatctctgtgatacataggagaaagatctaataaaactccataaaattcgattttggaagcagaaatattacaaatgtattcaaaacaatgccaggatcgctgaaaggtgaatctacctcgaaggggtgctctattaagtggttcatgtgtcttcattaaacagtatacagatcttgccctgaaagcttgttcatatgtttcatcaaactcctcaaacactgctctacggaatgcacaaaccgctactttcttctggaaagactttaagctgtctgtatcacactcttgaggtgctaatgcacaccgcttcacaaaagctagagtttgcacagatgaaaaactatccctagctttctgaatctgcttagaagagtaaatagcttggacctcgtaatcaggcacgtctacagcaaagtaaccttgagcattaataggcctaaagttatactgattccgacatttacaagtcaagccaagagctgaccttctacctacttcattcatagcttcttccacagcttttgcaaagtgatccgaactagtttgctgtgatttctccttcacatgaggttcaaaagggataagctcagcaggatcgaaccatccataactattatccccaaagaaagcaaccagaacgtaacccatcttcttcacacgacgaacagagggagacgcaaaagcttcattgaatatttgacctggccaccatggatgtgactttacctttccccaaaccatatctcccacttcaaaaccatagctcaatgccttcgaatttctagaacccattttctccctcgcaacataatcgtcaaattcggataagaaagatttgtagtccggaactcgccttttctccattttcttctcaccagattcgttgcagagctcataaaatcggtgatcagagtctctaatctctcttttcatttcacaaaatctaggttccgtttcactgttagacactcgagaacctaaatcgacatttccatttccatcacttccagtgtctgcagcaaccgaatcaagctccataaggaaagcttcggcctgatcaatcatttcaaatttcccggagccattgccagaaaaagtaacgaaactatcaccaaaaaccctaggattcacattcacctcagccgaattcatttctctctaaccacacttgaaccctcggtgttaaagagctttcataacaatgaaaccctagaaacaactcgaagccagaagatgcgtaactttgtttaaatcctgagattgtttgctggaagagaaaatttaagaaatttcatgagagtaaagctggagaagatgacaaaagcatcacttggtgagaaggacattttggtaacttctcagcgtcataaatggtgatggtgaacggtcgaacttcccatccagtaataggttgccacgtcatgggacaaaaaaacgtgatctttttattttattttattttgctgcctaaaacgtgattttttgtccacttacgaagtgaggtaaatttaatttaatttttaatgcaaacgaagactaaagagtgaagagagtaagagactcgtaaatataagaaaattatgattgctgatcgtaaactgatttagttttcataattttgtcagacactcccaaaacaaatatttcaaaaaagttaacgaatattctggtgaatcacttgtataacagagaacaaagctaaacatcggtagtaatcaaagctcgctaaaaaaatatcttattggaagaagaaacaatgcgagagactcagacaaaaaaaactatatatatttctttactgaaagcaaatatcgtccggaggaaaatggcattaccggaccaaaaatgatcaaggcgaatcatcatctttttcctgagggcttccagcgagccagccccatacgccacccgagccctgtcgtttagcgttcattgcagcttgttctgaggcagccttttgacgttgcaggagttcgagttccttctgtagtgtttccaatgtttgaagcttttgtcttagctctgcaacatcaacctgcagattcggagaaagtgacccaattagatttgctttgtttttgttcttatgacgtgatgaagcttatcaataaatgacagagaagatatgtgatagatccagtggttacaatggatgaatgttctaatcaagattcctattcatcctggaatatgagtatatgtagtcattaaatcacgggtttcacgagattccaaattctgtaggttatggtacaaaagagatgtggctacggtttagtacctccagtttgaaacaccttgattgttcggctgcaagttggccacgaacagattgaagttcctacaaaatgtcagtacaaagttaggtatatcatattcgaggaaaaattccgagatttcagatgttaaatgtgaatgcaattggaagactgctgcaaccagtctttatgaacgattggttcaccaatttattcatgtcggcttctgttttaagaaggtgataatattagtaccttgtacaaatctgtgtttcgtaattctgcttctcctaactcttgccttagttggagagtctgcatcctctctttgttcagtgatgcctccagctcttccttctcagatttaatagtcgcaataatgcgttcgctgtttccttcaacctggggattaatcacccaaaacataataagagtgcgagaaggtgatgatccggactggagtaactatattctgtgtcgacacaatcactaccacagcatatatgcataagatgcttcaattctctcaaacaaatcaaaaggtggtgctatgcaaaatatattaaggagggaaatttgacaagaagatacctttgatccagggttaacattgtccatgacaatttcccgtaccctgccttcttggctcacctcaacctcagactcaatgtctctggttgtggcattattaacagcagaaagactacctggcaaaggcgcttccagagtctttgtttgcaatgttgatttgtggcttggtttaagaagattaatctaatgccagataagaattagaagcagaactaaatgaaaaattaagagaaatgaacttatgggttcagatcacagtccctacttcgttattgtaacgtccattgtatccaccaaaagcgactagtacatcttcaccattgtatgaactcaccactaaacttaatccctgtcagtagcaaaggaaaggacgatggaaatgaaataagcatgacttgacttttttcgaagtcttgaaaaggcttctaccgtgtttatttgtatagctatctgggaattaatatggataaagtctgtttatttaagtacctcgctagcaagaggtacacgtccttgaactgaagcaacgaccgaccatgcaagagttgacatgtttagtacaacactctccgatgcccctgcagtaatttgtcacaaaattagtcaccccacacacacaaaaaaaaaaacccaagcaaatatcttttgttctagggggtgataaacagaacggttgggaagagaaaatttccaagggaaaagtgcattaacataccactcttgttatcaccgccaccaacaataaaccagttctccccaattgtcacgccagcatgtccagctcttggagttggtgcatcaccttgctgtgctggtcttgaccactccatctatatgtgacaattatatcagaggctgacaaagcatgtttgagagcagctgaaagaatagactcttagcttaacttacagtttgcaaatcaaggacatgcaggtcatcgaaacaggttgcatgtgagccgccaccaaagataagaaggaaccgttctgcatgcactgcagcagcatgatcagacctcggagatggagatacacccctgcaatttgacaccaatttaaatcctgaattgctaatctttcaataacgactaagatactaaaggagataggaggtcgatttctaacatattcatattctggttatatatctaatcttaaatgggtttgacttcttcgaaagagaacaaaatgcagaaacatcataaaatcttacacggcatctatctcatcccaggtcatcgtgtctaggtcaagtatatgcaaatcgttcagaagtgatctctttgcatcttgcccgccaaatatcaccaaggttttacccaccattgtaactgactggcctccacgtgaaacctaaaagcaagagataattataagaaagtctaaatttaagtaaccaaaatgcatatttgacttccaaattagcaaggagaaattctggatttagatgcaccttaaccctgaagatattatgggagggtaaggaaagaaaacaacttttatttttttgtcttttgacggccaaatttttttttgtataaaactgtaatattttcatacaaaggtgacaggaaagcaaatgagacaacatgagagaagtgaagatataccggtggttttccatatgtctttaacattgaccatgtaatggtatggggatcaaagaccttcactgtgacaggaaacagtagaaagtgatatgtaatcattgagattccagaaaaatcttataaatatgtgcaaattatcgtcttcaaaggtatataaacgctaaccttgcatagattctgagggatcctttgtgtgaccaccgatagacagcagcttgttgtcccatgctatctacaaaacaagcaaagaaggtaagtgaataatgtatagctagagtcttctttattacaaactaatatagcaagtgactttcatgaagagaatactttgctttagctgaaacccctctcctgaatatttctgggcaggaaagcaaaacgataataacaaaaacaaaacgaaaaagttaataaacttaccaaagaatgaccagcacaaggagctaacaatgtcggagttgatgtttcctgagattctgttgcaaccttggtttcaactcttgaccaagtccaactttttaaatctagaacctgtatacattccacagaagctttgcttaggaactgtcaccgggactggtattgtcaagctaggagctgaatatctcaattacattaggagcttatgcttataaaccatagaggttgcttacatgaagatcaccaaggtaacggccattgtgatttccaccatatatatacatcttatcttgaataactgctgcgccatgctgaaaaaaatataataaacaagacttagaaaaatacagaagatacatgaatgacataaccttttacttattcttcaaaagagagagaaaaaataaattacctcgtaacgagcttttggacgctgacctgatgtttggggtgcagtccactggttatatacagaaacagtatttgagtcttctgagactacatctttatcttgggtttcagccaaacgtccattctccgtagaaattgtttttgtctcactaaatgtgctcccattctcaacaacaggctcatcttttgctctctgctacaaagatgaatgcactaaaaaactcaaataattttcttcaatcaagcaaaagatatgtgtaatagttcccatggtttggacatcgaatcccatgggataccaaaacttacattaatttggacatctacaacaggatctggaatatcattagatgccctcgaataccaaccaggatcatcttcctgataaaaattgagcaatagagaagaaagcaaggttatgctccagttaagtctttaaaaaaaaaaaaaaaatagacctctttgtcggttacctccagaattttcacaaagagacgcattgcctcaatggagggcatggttccgagcccctgccaactaagtaaatatgaaatgcttcagaacagtagcatgtgtatctttcaggaaaggaacgaggacaactttaaagtcttattttcctttaaaaaggatcgtaagcattaacaacctcagtaatgtagaccaaaaggtccaaaacataggtaagcacttagtttttttccccagggatgcacattcaaatcctgcatttctattttcctctagtagcttacactaaagtactcctttcccgtttccctaatgcatttggattcttacgctctagtaattgatgaaatctaagacatctcctattaatatctaccatgaagcatattcctacaagtatgattcacaaacgcaagaatagaaataaaagaaccagtgataaatgcataaatgttaatcgtagataagtatgggcaaaacacagcacccaatctaaccttttccatttgctttgctccactggtctccaggcactaggtttcggagtgttgcatggtcctacagtagcctgtttcaatgttaaatccaagagatcatcagcactgagcctatctatcccagggataaaaactagtagactcgacattataattagtacaagagaacgtttctctctatgttaaggaacagccagtttcaccccctcgtaagaaattcatctacgactatactaatcaagttatagaatcaatgtagatccaagtaaactacgactgacggaccaacgctccctgagatctaataaaataaaactgtttcaatcatgtttccaatcaaatcgtgatgagatctcgggtaacattttactgagcatttcgaatatactaaccaggatcgaaaataacgatcaagcacagctaatcagacaagtaaagtgcgtcatttctaaaatccgataagaattcggcgagaggaatatgaatcggtgactaaaacaaagaaatcaacacccaaacgaccagatctcgtgaaattcaaaagcaaaatccacaatcgtgagatcaacaatggaagagatcagaaatggaagttgctgacctgctggtatagcgcatagagaagtagtgcagtatcatcggggaatttcgagatgacgtttttcgccgacgaatcagatccgtcgagaccgacataagatgcagcagcgtagaacctctccgggtaagcgggaccagaggttgccctaggcatagccatttgtctctctctctgactacgaccgcggatttgatcggagatggagaagccaatgagcagagataggcgttttctagtttcgtttgttcaaagatacaaacttatgattactttaaattattttcattaatatagaaacatattctcaaaatttaatatttaattgatcaaaaattatagtaattgcttggtgcagtgtttatatagcgagcggcacgatcaagaagacatgattatgctcgaaacttttctctttttattgtcacttcgtatttttgaccttaatcatcgtaatcaactcaatagtgtgaattaattaagaaaaacaaagagaccctatcaatatgaagaaaaaataagctttgctttgtagtatcttgtttctttttgggtttttacaatttgttttccgatcctttacattcaagaaattatattgaacgatttcgcagtagtgtaaatttccgatttcacctctgaccaagctgactctggcgcttgagcgttcagtgtataaagccggccactgtgagcgcaacaaacggctacattatgccgccggaaaagaggtgattcgactttaaactccaactcgtagtacttcaagtttctctctgaatcttgtctgatacttgattctagcaaagttcctttcaaatctgctcgttgaccagatcctgtcactgttcttactattgcctctcctacttcttttggccctccaaacgcttcgattctatatcgtaaacaataaacactttcataaaacagattccgcttcttgaaataaaatgacaattgctcgtcaagaaaacattgatgcttattggcaaaagaaaaaaaaaaacattgatgctcatcgatctaggtcactttatgatcttaacaatcatagcgaatcgggtgtctgcactaacttctgtgatagattcaaagtagtaaagagaatcatgtacttacattgagatatattgtttcacttcaaacatgtactaaatgtaataaacaatcttgaaaattacaactttgaaactagttgttagaccactaaaataatcgatctagtcttacaattttttctcatgatcaattagatttgtttgcaagatctagtaaaccatatcacttagtcgttaccagttaccacagaacaatcaaatgtttctactataagaatgatgttttttttttttaatgacacgtcagctctagggcgattttcttggcgactagggttttcattctttttcagcaagctagggtttcagcggcggcttgccgtcggtttctcatgtccgaccaggttttaccagtctcttctgaggcaggaacagttggttctccatctggatctgtccagcaaaagtcctatgcagcagtagttactaaacggccttctctgaaaaaagatgaatatgaagtctctgtgcaagacggtgtcccaaccattgcagttccgaaagaagttatcactgaatctgtccctctctgggatgattttctggtgggacggttcccatcacaagctccgcatgtcgctaagatccatgtcatagtcaataagatctggactcttggggacaaagcaattaagattgacgtctatgagatagactctacttcagtaaagtttcgaatccgtgactccgccacgcgttcgagaatagtcagaagagggatgtggaacattgctggtttaccaatgattgttgccaagtggtctccgattaaagaagaagcccagccagagattaaaacaatgccgttgtgggtcacagtgaagaatgttcctcattccatgttctcctgggatggtttgagttttattacaagttcagtaggaaatccaatacggttacatcctgaaacagaattatgcacaaagtttgatgaagctaaagtttttgttgaagtaaatctttcgcaagacgttccaaagtgtcacaggttcaaaattgaggaggaaaaagatgttatcgtggagtttatttacccctggttgcctcccaaatgcacttgttgtagtaagtggggtcacctagtggatgtttgtgtgagtaagctcaagcctccagcgctggtgatagaaagtgagctagaagaaggtgaagttttagcggatccttctgcttctgctaccacagtgagagttgctgaccatgagtcagctaatagtgggaataaagaggatgggattcagaactcgattttgatttctcaggaggtttttgaacaacaagtggtagcagagaaggtggtaccaccagaatctcagtcggaaggagatggttggtccatagtctccccaggtaaaggaagcaaaagtacagaaaagtcaaatgggaaaccattaacttttggccaagcaacaattttatcctcttctcggtactctgtcctgagtgatcaggaggagaatggggataaagatgagttccccacaatctcctcagaggaagtcattgagacggagcgaacgaactctattgatgacgttgtctctactcaagcgatcgaaaagaattccacttcggataaagagaaagcaggagcggtgagagtaaatcttcctcgctcctccaagagttcacacaaagtcctttcggagtcttttactcaaaaagctagagacaatgtctccagcaattcgagcagaagaaactccaaaaaacatcattaaatgtcggggttcttctggaatgtgcgcggttttaacaaatcaaataaacattccgttgttcgtgattgggtgagaaaggagtctttaacttttgggggtttattagaaacgagggtggatgaaactagtgctagcaagatcatttctaaggtatttcctgggtggtcttctatgactaactatgaacaccatcgtttgggacgaatttgggttatttggaagagttcggttcgtgtcactccggtttataaaagtggacaaatgattacttgctctgttttgactgaagagaatgcagaggaatttttggtttcttttatctatgcttcaaactatgtggatgagaggcgggaactttgggaagacttgagaaatcattacaatatgccaatgttccgtaccaaaagttggatgattcttggtgattttaatgaaattctggagggggaggagcattcaaattttgttacttcaccttttattccgcagggtatgcgagatttccaagaagtcgttagagactgctctctagctgatatgagctatcatggtccggtgtttacttggtcaaacaagagagaagaggggataataaataaaaagttggacagagttcttgttaatgaagaatggaatcgtaaatttcctgcggcttatggcacttttgaagcaggagggtgctcggatcatttgcggtgtagagtaacgttggcctctgcaactccgataccaaaaggtcctttcaagtttaataatgtcctcaccacaatgcctgagtttttgcaaactgtccaagacttttgggctggtactcccgtgctttatcattcaacctctgctatgtttcgattttcgaaaaagctaaagagtctaaagcctattctcaagtctctaggtcgaaataagcttcataatctgtctgttcgtgtggatcaagcctatacatccttatgtgagaagcagaaactcgctttggaaacagcttcttctgaagcaattgcagaagaaaatcaagcttacactcaatggaattctctagcagtcttggaagaaggttatttgcagcaaaaatctaagttgcattggttggatgtaggagacctaaataataagtattttcacaatagtgttaaggccaggatcgccatgaattcaatccgagaaattttatgttctgatggcattgtgcgtacgagccaagaggatataaaagaggaagccgtgcagttttttaaaaggttcttacaagctaagccagaggattttgagggctctagtgtcagcgaaatccagagtctcttatcttatcgtagttcaattttggatcacgaaagattattgagagatgtcactgaagaggaaataagaaaggttctattctctatgccgcagcataaatctccaggtcccgatggttatacagtggaattcttcatacatgcttggccggttttgggtaaagactttgtaatcgctatacaatctttctttctgaagggtttcctgccaaaaggtgtaaacaccacgattctagctttaattcctaagaagcaggaggttagtggtatgaaagattatcgcccaatttcttgctgcaatgtgttgtacaaggtcgtctcgaagcttatggctaatcggctcaaagaaatcctccctgcctctattgcgccaaatcaatctgcttttattaaagaccgattgatgatggaaaatctgttgctagcttcagaactagtgaaggattaccataaggattcaatatctagccggagtgctcttaagattgatatctcgaaagcttttgactctgtacaatggccttttctgataaatattctaaaagctatgtgcttaccagatatttttatccattggattgaactctgcataagtactgcttctttttcggttcaggtgaatggagagctctcgggttttttccgcagtgaacggggtcttcgccagggctgttctttatctccatacctctttgtcatctgtatgaacgttctctcttgtatgcttgacaaggcagctgagggaaaacggattggttatcatcctcggtgtcgtaatatgagtctcacacacttgtgttttgccgatgatataatggtgttctcagatggaactactaaatccatcaagggcactcttgaagtttttgataggttcgcggctatgtcagggttaaagataagcttggagaaatcaacagccttcatggcaggaatctctccacgagctaaggaagctattcttcaacagtttccttttgcgttaggtacattaccggttaaatatcttggcctgcctctacttactaagcgaatgtcgcagatggattatcttcctcttgttgagaagatacgaactcgcattacatcctggaccactcggttcttgtcttttgcgggtagattacaactgatcaagtctgttctttctagcatcattaacttttggttctctgtttttcgattgccgaaggcttgtcttgttgagatagagaagttgttttcagcttttttgtggtctggtcctgaactcaatgctaagagagctaaagtagcttggtcggaagtgtgtaagccaaaaaaagaaggagggctgggtttaaagactttaaaagaaacgaatgaggttagtcttttgaagcttatatggagaatactgtcggctcgggattctttgtgggttcaatggctctctaaaaacttgatacgtaaggaatcgttttggtctgttaagggaaattcttgtatgggatcttggatttggaaaaaaatacttcagcagagagacaaagctagtcaactccatcgaatggaagtacgttctggaacttccacatccttttggtatgatcattggtgtccgcttggcagacttcatcaactgttagggccacggggaataatagatctgggtattgcgagtcatgctacagttgctgaggtcatgaatactcatcggagaaagagacatagagtggatcttttaaatcagattgagaattacatagcgttggctatacaagacagaggcacggagagtgatcgctcactttggaaacaaaaggaggacagctttaagtgctctttctcttcttcaactacttggcagcgaataagaaccataaacccaagctgcgattggtatcggggagtctggttctcttctgctactccgaaattctcgttcatcacttggcttgtttttcagaacagacttgcgacgggtgataaactccgcaaatggaattctgaagcttggcatagttgtgtgttctgtgatgaggaattggagacacgagatcacctttttttttcgtgtcccttttcctctcaaatctggtgctctttgacaaaaggtcttcttcatggtcgacgcatctcgagttggagccttatcactccacatctgctggatacatcccgtccgtatctacatctcttcactcttcgttatactttccaagcaacgatccacagtttatggcgagagcgtaatagtaggcgacatggggggcttgctatcccggtaacgcaacttgcaaagatcatcgacaagaatattcgaaacagattcagcacggctataaagtctgggaatacacgactccaaggcgggctgcagttttggtttcaaatccatagctagaaatcattctaattgttcttaactcttttagattcttttaaatcatgtcgcattcattgtaacaatcgtttttttgggtgaatatatttttacattctttcaaaaaaaaaaaaaaaaaaaaagaatgatgtttttacttacgagaaactgggtgagacaggggaaacgataacactgacattaagctcaccggtcgaaccgggcggtccaaatgcaacaaccggttcattaacgtttttccggcgactgtttcttgccggaggaaggtctagcgaattctcccgttctgacttctccgccgctctatacaaaagcgtctggtctccaacccacgtagccggatatataaattctgtgattacaaaattgacaatcatttgatttatcttccaattggtaatatcttaaaccggagaaattcgatgacttactaaccgaatccttcaaccgtatcgatacatctgctatatcctccaatcggataaatgacgtcgagttttagattccggcctatccctggcgataaaccgagtataaaactcgtggttcctccgaaattcgcaccaatcgcaagaacagaggacgatcctacacccagaagaagccgtcggttgaatttctcaaccagtggagaaaactcctcggccggggtagttttcaggtcaccggagggttgttgagcgattaagaagttggaaagttttacattagtgggagatgagtatagtagagagaaataaggtttcagagacatttctcgtctctgttcgttaagtgaggtcgctgagtgttgccgtcgactctcttatcacctcgagagggagattatacgacaacgttttaatacaattaccaacggtggcgtttagaacaacagccgaacggcagcgtttaaagagaatcgctctcccaaaaatatgaattgcttttcagtacttcactatcctttaatttacttagagacccttaatcattaatacttttcagtacttcactaaacttaacatgtatacacttcaacccaattttttttatatttagataagttatatattatgtatcaatatgtttgtgaattcttatcgagaataatctattggaggaggaattgtgctcttattaattggtgaaatgaacttgagttaagaaaaagaaaaaagcattgaatttttaaagaaggattttctaaaaacaggttcaaaatggtgatataagtagtttgttctgttttaacatataccacactatatgctttaaggatcatgtgtattataatgatgaatgtaagaactccaaaataaaataaataaaaagatggtcgatagtagtttatactttatagaagtggtaagggctgcatatcatcattcgaattttaatcagcactgttaccgaagaaaaacaatagtatatatatatatatatgtatacaaataaactaatcttcaatgagttcaactaaacaatggaaactttagttaattatattgaattaatcaaataatttatggatacgatcgaagccgaattatatgtagcaaatgatgtagtatatcaacctttatgatgtatatatgaatgcttccgatgaaccctaaacattgacaaacgacagttggatttcttctaacgttaatcttcgagtctccggcaccaagcaccatgtgaatacaattgttgctccacagattatagcggatattataaaagtccctgcaagttatttttatttatatagacaggattagccattgcttttttcttatagcacacgattaagcatgttagtctagtattatatatatacaaaaagaaaaaagaacatgttagtctagttaattcaaatttaacatatgaaagaaaaattaacatccttaaaagaaaaagttataaaagaaaaactagagacgtatacggtatacttgcatgcatgaaagaattaaacaaaagacttgcatgcatgcctacatgcctaggcagcgatttaggatttagcaaatcatttatgcatttgtatatatatttgcttcggtttattcaagtaaaactaatagaatattttgatttgtaatcgaatgtgtatatgctttatgttactcaccgcttgggctccaaaccaacataaaattgaaagcatagttggcgatccaaccagtgaaccaatttgctatggtcactaaactcccagctaatacctttatatccattggaaatatctgccaagaaagtaattaacataaataataataattaacaaatgatcatcggtatgactataatccaaaaacatctgtaaaatagtatgtttgctcatatgtgtatacctcagacattataatccatggtaacgctcccattccaattgcgaacatcatcgtaaacgactgtttgaatgataaattgttatagctagtcaaaattttgaaaatttaacaataatcaatatatatatatatatatatatatatattgtgagttttgactttcatattatttttgatcaagtatgattgcctaaaaaaaatggctgtctaatttggtttagtgtacttgagatattaaagaaaaacagaataacacatttgaagtttgtgtaaatatatagtttgatagagtttttagattataaattagagtgaaattcaaatagtgaaaaacttaccaatattccaatgaaacagaaaattggagtaatttttccaattcccgggacatctttaactccaaacgctactgccaatgtgatacagcttaaacacaaccccaacgctgaagtctgcaaattcgatgtatgaaaataaaaatttatcttatttatggactattttacttgcacagtaaaaaaaaagatagactgaacctaaaagatttaaatttttctaaccataagaagtgggcgtcttccccatcgatccacgaggattagacccattaaagattttggtacctatgcatatgatcattaataagaaattggggtcaggatgtgagaatacaattaatgaagcaatcatatataatattttttttttcttttgtcaaagtgcatttaaaacagaaaaatatctatctaataaatttttacgtacgacgataagagataacaccatcatcccaatccgagcaggaaaccctagaaaatcaaaggattagtttgaaaagcaaaaaacaaattcctaactaaattataaacaattcaattaggaaataaatctgattaccggcaagtttaaatagagtgcttccgtaagaacttattcctgcagttccacataactgttgcagaagcatcaaaccaatgccgatctaaacaaaaatcaaccgaatccaaacaaaacaaataatttgttattcagttcttatataaaaatcaagatcactagaatatatttaatgaatgaataaaactcttcttttcttactgtaagttgatgagcatatctcttttcgaaaagactacgaatgttgatattcgaatttttcttcgaagcttcaactgaaatctacaaatttaaaacaagtataagtgagaatttttgcttaggagtagattgtttttcttttttcttttggtgaatgaatgatctacaagactacaagtgattttaaatatatttatgtcaaacatctgtattttgtgggactgatttgtacgtatgagtaccttgatttcgcaagcttcaggcacaatatcgtattttcttcctcttaacttttgaagaacttcttcacattctttatcacgaccttttttcgcctgtaaatattatgttcatatattattatatatttacttacaaattacaacaatcatgttcatggatataagtttttcacgattgatttatatgactaaccagccatcttggagactcaggtatgaagaacaaaccaataacttgtatccaacatggaatactacctggttaattagatatctatattttagtttagggcaaataaaataataatcaggagaaatgaatctttaaaatcgggatagttgatgggaatgaatcacctattatggctaaagttctccatgacaagaaatttccaaagtaatatacgactgcaactccacagttttgcaaaagctgtgaagtattgatgttagaataaataagtcaaatttatgtataaaatgataatatacgtctaaacttcgattttaaataggtaagtcacctgattgctaaatgtaaaagcccctcttacgtgcttgggtgttatttctgcaatatatacaggaacctatacagaaaatatttatggttacgacgatatatatatatattttttttgtcatcttttcaggaaatagctttaccacgtagctaatgagaccaactccaattcccaccaaaaatcgccccatgtcaagccaaataatatcctgtgtgccaaaaaagaaatttaaaataagaattatatactacaaaaaaacatagactatattactaaaatggtgataaaatatacaattttgttaaacttgcaaaaataaagaagaatataagttatggagggaaccttggctagtgaaattgcaagccaaccagttatgcagaataaatcagccacccacaacgtctaagaaatattgtaagacaaaaaaaaatgagggtgtagaaatttacgatataaatttttgggcttacgacaaaataaaagaaagataggggtgattttgagaataattgatacttaccattttatgaccgaaggcacttgcagctttggcgctgaatattgcaccgatcattcctccaaacgtcgacaacgaaccaaacagcgaaaactgtaaacatagttctcaagaaattaaaattaactagtcatcactgtaacaatatgagctcgtacagtagtcaactttttctattttgttacccctaaataatttttcatttgatataaaaaaaaagcgatgtaactagtagtttcaacaaaatacgtatacgtttgcgtgtatccatccacttgtaaaattggaagaattgactgaaaaattatattaatgttgtttcccataaaaattgtgatgaaagttggacttacttgtgcgagagaaagatccaagtctgacataatggaggacattgtatctgcagtataacctatctgtgaaccataagatgatagaaataattaagttgttcttttttaactctatatacataatgaagttataaactcttactttaatacaattacttgaatttttttttaacctttactgtggttagaaacttgaaatttaaaagagatgtcgagataagatatggctataggtagcacgtactatcaatccaacattttcgaggtccacaagattgaagatatgaagagataatatatagtatagaaactatattattacctttttcatcttttgtcaatatatataaacttagcttttaattcgaaattaagtattacaaatctgaggccaaaaatcatcatggttttgattatctgcgttaaaataatttctaaacaacaatcttgttgaaagacaataaagtttagtatataacattaatgctaaagaaaagaagttggtggtttgaatctgttccttagctcattatacctctggcctagatctggaatttggttctaattaataggaacatctatatgagagtgcatatatagagaagaaatagagagctagagagagagagagagatgggtacatacggcagcgccaaaggtgaaggaggcagagacaatgatgaaggtggagaagataagaagtggagttgtatttgcactgtcttccttttttgccaataacaatcctttctccatattattctctccttccattttcttcaatcaaaccctaattaagaacaagaaacaaagagataaaatatttgcgtgaagtagaatgttttttctttctcttccctatgatatatagactagctagctagtataatagctaggattggttaaccacaaagatggaaataaatatcatgctatgttgtgatgtaaatgcatctggtttttattgagtctaggttcatgttcattgtttgtatcaaccagcgtacggtttattacattttggtttaaggatccggtttgctttggttatatgctgtttaagtcattcatctgaataagattccctcaacaataaggccgttagcctaaaatcgtcggttgccatttttcttgttcgaacttatttatggactataagacagaaacatcaacttgtgaaaaccgttgaagtgcaatataaaaaaaggttcaatcattttttcgtaaagaagaaaaaaataaaaggagagaagaacggacacgtcattttagttcgagacaatcacgaaaccatagtacacatgtgggtgtggctcttgttattcactgtcttgaattaaatttagtgctggtttatgatgtcgaaagcttgaatatactagattgattaatcaattgtagctatatcgttttaaaaattctgtcatagttataatttgacggtacttaaaaaacaaaatttatcgcacaaaacaacgttgggtgttgaaactcgattcattgaaccaagacgccccaaaaaaatcaaaggtctaatcaataggtgggaagaaaagacgtattttgaacttccacctaatcatcgcatcacactcatcatcatgattgtttttgtttttcatcgtcaagatttaagtacaagactttggttcggtttgaccaagaaaatagattccggcgcaatggttagcaaccaggtcgagaagaccaaacttcttcgggaaatataccggttataaccggcccaaccgttaaccgacgtatgcgtctgcgtctgcctctgcctcgaatctcttcttcaatttggaaggtgcatgatattgttagtttgttttccactatagcaaagcaaagttcttaacaactttacgagatttgtgctcttatatttaacaatttttttaaaaaaaatttaagtatgcatgttggtatattatatacttatcagctatggttgacttttgaattatattcaaagacacagaagaacaccgaaaagtaaggaattaggcacgttggtgaaagagagtttgtggattttgtcctaaaacttagtcacaataagtcagctttaggcttcagctttaagtatctccagctccgtaattcttcaagcagacacaaaacacacactttttctccgcagctctcggatctctatttcaaatagcgttttaactttgaggttgaaaaaacaaactcatgaatctcttctacttttcctcgagacaccagagacgaaaggtttccatcaaaacatcaaggagcatctcttcttaattcttatctggtaataatgtttttttctttcacttatcacttattcaagatttggctttaggagcgttattctctgtttagttaatttgagctaagattcatattttcctctgttttttttccatattctctgaagcatgacaaaagattcacactttcctctgttttcttatgtcaaaattagaaccaataactgaaagatttggtcaagaagaggaaatgggaagaacatgtttgccgagatggcgattaggaagactaatggcaggattacaagtcatcttaggattactggtgatcactgtgagcctctcatgtctctaccgattccattccgtgggttacttcttgcaaaacgaagacacttgcaacaatatctacacaatcaaagaagtcagcagcgaaggattcgacctaaaggcgctgcacgatcgtgttgatgaagtactagaaaagatggacaacttgtacgagaagctagagaagacggtaaaagatatggagaagagcaaagacggaagcaaaaaggagatgaagaagtttcttgaagatgaagtgatgaagccattttattatgctcatatcggattaaggcaaatccggttgccaaaacccgaaggaatcagaaactcaacggaaaaggaagagcctttgatcaataagtttctcattgaagagataaggcagtacattacaccaaaggagaatcgtgttgggaagataaacatgtttggaacagagagagtttacaacactattggtcatgcttgtgcgttgatgaagatggagctagagaagtatatggattatgacgttggagcgtattgcgatgatgattggaacttagcacagaagctgatgcttaacgggtgtgatccgttacctagaagacgatgcttgacaagagcatcaatgacttaccaaaaaccttatccgatcaatgagtcactgtggaagcttcctgatgatagaaatgtaagatggggaaattatcaatgcaggaacttcgcgtgcttatcaagcaagaacccgaaaaggggttacacgaaatgcagcggatgttttgaaatggagaaagagaaagataaatgggtcaagaacagtagtttgttagttgattttatgattgaagatgttctgagagtgaagccaagtgagatcaggattggattggattatggtgttgggacaggaacatttgcagcaagaatgagagagaagaatgtgactattgtcacaacagctttgaatttgggagctcctttcaatgagatgattgctttgagaggtttgatcccattgtacatatctttgaaccagaggctaccgttcttcgataatacaatggatatgattcacactaccgggttaatggatggttggatcgatcttcttctgatggatttcgtgttatatgattgggaccgagtgctgagaccgggagggttactgtggattgatagattcttctgtaaaaagaaggatcttgatgattacatgtacatgttcctgcagtttaggtacaagaaacacaagtgggctatttcacctaaatccaaggatgaggtttatctctctgcattgcttgagaaacctcctcgtgcaatttaaggattacaatatgaagtttaagcttcaatgtttgtaattgacattcttactcatttggttgtctaatccttgttctagtttgaatacaacagaggttttcagctctgtttcacttgataacttaatcgagactatttgtatcaattcgaaacattgaaagtggccaaaaaggcattttagcgattgctgaacgacattgatgagaattttaatataagcataaacatcattttacgttgcagaaccaatggttcactaccaaaagcccctgaataagccaaaagcttgttcagcaactacaatacctctggtcaagctatcttgaattcgtgaacttataacaccattttctcaggtgaagatgtcatcatctactctagtaaaaaggagactagacttacctaacgaagattcaaaacaaaaccaacccaaatgagttagcttttcaagttggtacaagggacatgatttgagtcttgatccgtcccatgcacgtttggatttctctgtagatcggtaggttctgtgggcatcgtggctgcaagcttgtgactgctgcgtctataagctgtgcgacatcagctggagggtactgtctctccgtgcacatctgcaagtcacgagaagtaaagttcaatgtattactatgaagctgcagtctgtttaagatttaggataaatgatgaatccaagtcctaggttaagtggcatttggcacacacggatagctactttcaatgtcccgaaaagtttagaaactactaaagcctaggtttagtaccaaaccaactctaaacttagtataatagattcataacggcctccagattatcacgttgggtatgcaatccttctaagcaatttcctaattacctgaatcatgagccaagtggcaacacaggaggtgataagctctgaaggcatttgagcgtttttctctgaaccatcttgtgagtttaaatcgttgttagccacaggctctgatccatttgaaggagatgggttgtgatgatgctctatactgccatttacatgctcgtgatgtttgaccatagagctgcgtaatagctgatttttgccaaccaactctaaggcttcttggatcattgtgttcacatcttccccttccttcacagatgatgcagcctagaaaccgtagagtgaccataacttagcaaaacatatgtatgttcgagaatctagaaaagtggatgaatcgatacctttatagctgcatccaccattgcttgcgctcttgtttttgaacccttgacaatttctagcatctctggctccatttccttgtcacacagcacaagaataagtgtattcaagattaatcagaaggaatgaattacgtgggcactcaaaggtccatttattatgatcctattcgatttccaaaacatttgaacaaatgtaccgatatgaaaaatagaatatcagtaatccattaccttttcatctaaagcatgctgtagcgcttgtgcccgttgaatctcagcttcttttgctttgttataagttgtgatatatgaatgattagtctgccgtggactactagtgttgcttgatactttaccatgcagaatgggagcaatcatatcaccctgtagagaatttatgaattaggcataaaatttacatgaacatgcacaggaggatctaggaaggtttacaggctttgacagaagtagtcaaacttccatctttccctacctgattcagaggaggattcatggaaaagctgacattttcaagtccgcaaggagggaatagcacagacacaccaaggtttgtattcccgcttagctgtgcttctttcttcatagacaagcacttatcaatttgcctccttagaccctctggcatgtattccagtggatttaaaggcatgcaatcaatgtcctgtcacaaaaggagatgatcaaacaactgagaccttattttaccaataaatcattgtgtatatggaactggtattgtatttgaactaccataaccaactcaacgcccaagtcatcgaagagaacattgcatttgttatgatcaacagtgagaatttttccatcatgaatctcccgtgttttgggatggatggcaatgactctgttcccaactgctaatggccgagccaaatctgtaggaagcccctccctagcacccgttcgaagctctgtataatgctttcgcacagattcgcggtactgtttaagtttctcccgctcttcatgtaaaaatctctcagagaatcttcgtggtctaccaagagaactgcaaaaaaacgaaagaaaccttttataatctacctatattctctggaagtatccaataacataacttgaacaaaccttttaatgacgctccattcaagacgagtaagtcttggaatgtgaccaagccccacgtgatttaggtaatcgacaaactccatctttgaaaaccagggatggtcgatagcactataaaaccattcaaatatgcaccttcgacgtgcaaagggaaacgacagagaagtagcaagcttatcctgaaattggaataaacaaatatatagatgtacaagatactgatgtgcgtaggagaagtgaagttagaggctccacctttaacaacaactcttgttctgaaagagatctggaactacgtgcagctttatgagtggtttcagaagatttagccttttcttgtaagcttttctgcagactcttctttcgcctgtttggaggtttctgcgataaactggttggacccgagtcagaaacttgtttaggtgacgctactatatccatcccaggtcttttcttatcacttgttatagcagattcctccaacgccttaacagttttcatctgttttgactgagccggaacttgaccagcgcgttttgttttaaccaaagacttcatattattctcatcttgaggcaattcctgcaacataaaaaaccaaatcatatgaggtaatgttttcttcagaatcacaaatttgaatactcaatatgcatttttaataaagatctcgaacttgtttcaaaggatagaaaacagagatcacggagttcaactaaggtcaaaaaatttatgtacaaggaagcaatataggacttgcaacgggtttcaactaattcaacatacacacagactaccttcttgtttatggatttgttctgactaaactctgctggagcttcatcccctagtacctgaaaatagagcacaattaacatttacagctaaaagatgcctagaagaaagagcacagattaagagaactatcttgctaacctttggtttacgttttcttaaactgccactagtttgtggttgtagcttccctgtgggaacatcatcacaatcagtggataccagccttgaaggttttgactttctcttgttagcattctcaacagaagaaattgcatgaaggagactatcatctggctctacatttgctttttccccatgactgcttgtggaagtagcttctggtgtgctagatttctcgtccatgtcgtattctgttctttcttccttcaactgagcagataattctggacccaatgcaatttagttaaatttaacaaatacagacaggtaaaggccctaatgcgaacagtgaacactgcagaattaacccaatctatataatgagaatatctagaaaaaaaaaacataagtttcaggtatattgaagttacaagcaaaaccacacaaaactcacctgactccatcaaatttgctggaagcattgaagctgacaattcggccaatgcttgcagggcatcaaaagctacacaggaaaagactggcaataagtttcagatccgcataagttttcagcagaatatgaagatagttagtttgaatggacaatgcagaaaagataaataatcaaatataacaacagtagagcttgcaaacgaaaatatgttaaatatctctaactttccttacagaaaggggtaacattgaaattaaaatcaggcttcaaattacattagtttttacctccggaagtatgtttgtcatctcttttctttgggctgcgcggtgagtatttctctcttgaggcttcaatagcagcctttcgtctttgtgatttacttctgagcccttgtgtggcactgcatgcttctccattgtcatcagaatcattacattctgcttcttcgactttcactcttttcttgtagactcttttccccttccgcggagcctccatttcgccagccctttccatatccatcaacaaggtagtatctttatcagagtcaagtttcctttctcggctactttccatccactcctcgaaaatggagctgccacagtgcttagactgagattttctggttcgcgactagtcagaagcacaaagttaaatagtgtttttcagtgaagcaaactcacacagaaaagaaatcaaaaagataaccgcttaaaattttgtcaagctgagagataccattttcccccagctctttatcggtgagctatcgctaagttctgttcttctatttggtgattcagaaacttttggagaccctccccttctcgatgcatctgttaatgctaacgctaaaaaatgtgctacatcatcattggcatcgaattgcttcctggctcttttatttggtggagtagagccttctctatcatccctcataaatgaagtttgtacaggaacccgtggtgtacgttttccagtggcatgtcgctgagttcctacatgaactaagaaataaagttacacgatcttgaacgaattggtttacaggtactagacagatggatatctattcctggactatacaaagtcaataacaaatgcagaacaagtaatcaacttcctaacctgcttaaatcatagagtaatcatttgatttagcttcttcagacgaaaataaaaattagaaaactgagttaacacaatgtagcactttaccattagctcgtgcttgcttcaaaaacgtgaggcatccatctggtgaaccaattgactgttgtatatccacttcctctggagaatcgctacgttgaggtttagcacgtttgcgcttttgttgtttccttggtacttctgaagcatcatggccttctccttcactgccactcccttcctagaagaaatatcatatgaatgagttacaaatcggtccacataactttatcaaacatacaaactggcccaacagataggccagatagggtacacaaaactcaaagttttcaatgtcattggtgttactgtctactcacgttaacaatgaaaggtttttcaccaaccacccacattttcaaccaagaaatttcattttctcatctactggcaggtcacttcacataatatcctttgtgtggcagccttaataaaatagatttctcaccatgacactgtaatgatctgtcatcatcgcaataaggccagctacagaggcagttccctcggggagagataaatacgcctggaagaagaagcatatcttgtgaatgcaaagttatgtaggttttacaacatttaaactaaagcttggaaaagaaacttgccacatcgatactaactaaaactgaaacatagcatgtccttactcatacccgattcatattaaatagagcttccaccatgtcaacagacctgctattccgaattgcagcagccacctatacaaaaaacagtctttaagaactctgattgccactgaaactcacataaacatatgtgagtgaaacagttatttacccttctccactcttgtccgtgcttgcggtaagcatcatagaaacgctcaagttctaatctggtccactgaggtcccagcttgtcagacaatttcttcttctatgataggaaaaataaagcacagaataaatacatcagagtaacatctcattcaacattcaagaaatgaagaccaatttactcacacgtagcttattttttttcgatttcccagcatcttttcttggggaagtttcattggtgaaacgcttgttcacactcctcgacttcctaactggtgccatttgcacgtttctctgcacaagtatattcaaatatatagttagaaaccaaaaaatgcaattgtgacaaaagacacactttaaactgatacggacaagatacgacactaagtcgataagcaaatttggcttcctctaagacatgtacaaactacgaatttcaacatttcaccaggggaaaaatcaagacgtttttagggtttagggtttagggattagagctaagaaaaatcaaaactctacgttttttaacaaaagagtagaaccaattcttggatcagtaaaaagcagtgttggggaagataaatagctgcagtaatcgagatgagaggaaatattaacgaaaatcagaatttgggtattttaaaaaacacaccaaattaaggaatcaattacacacagtgaagaaacacgaaaatcatccacaaaagtcaggagctttgacaaaatttgagaaaatgtgttgagaaaattgtttaaatttcagatagtaaaacaaaatcgaattcgaaacttcaatcgctaacctataaatataaataaaacgcagattctacaaatctgaaactgattcctcaaaaaaaaaaaaaaaacttcaatcgagtgagcttccaaaaatacccactaaacctcagctgagaaaaaacggaactcgagtcaaaagaaaaagagctaacacagaaagtgttaaagaatccaaaaaaaaaatccgggaaaattttgagagtcgaaagaagaaaaaatttgaaacggaaaaaggaaaagccttttaaaaaccctaatcgaagcagatccactaaccaattaggtgacttgaagagtgaatagagagatacccgaaccaccggtgggttcgaaagagagatagagaaagctcgagcctttagtttcaaaaagagatcgatgagaaaatatttgaaacaagggttttagagagagagaaggcaaattaaggaagaagaaagaaagattattatttgtttaaaaacaaaaaaaaaaaggaagtgagagaaagagagagagatatagaagaattagggaatgagaaaaatgagaagagaggtgttgccgcgaaacttgaatacatggacgacttcagccaatcagctttccagatttgtcacttttttccattttttcgatttatttcttccttttattttgtttcactcttaatatctgaagctagtgcatgtgtgatcttgaacgtccacgtggattgtgaggttgtttacatcgttggattgttttagtttcacttgtgtggattctggtatcggtagcagaggattatatttgaaattactggagttttataaaccgaaaaatataaataaaataataatgggggaaatcagtttcttgaagatcttactaattgagtaattatccaaggataatcatttttggttagagcttcccaaagaaaaaaatatttggttagatttgctaaaacatttggttttaacaactttagatagggttaatcatttttgttttttcttataaaaaaaaaatagataaactatttaaaaacgacagcggattaaatagacttggttacatctgattctatctggcccaaataaaaagcccaaatacaaactcatgacctatagaaacccaaagtaacttgacattaataacgaagaagagagttttcaattttgtgatggatattatggcaagaggccaaatcattagtcaaagagagcattggaaagacttgcgcaagtcaaattaagcaactgagtttcgtttttttgctttttgaacagagccaaagaagccatatcaggataacctataaactaccacacaaactcctaacaaaaaaaaaaagaagtaatgatgattccaagccaatcttgcttctgttttttcttcatggtttcattctttctacacactcttgcttctcctacgcttcgccattgccgccatgaccaaaggaatgctcttctggagttcaaacacgagtttccgcgggtaaatgaatccaaccaaattccttatgatgtatcgttaagttcatggaacaagagcattgattgttgttcttgggagggtgtcacgtgcgatgctatatctagcgaggtgatttcacttaaccttagtcatgttcctcttaataactcattgaaaccaaatagtggtcttttcaaacttcaacatcttcataacttaacccttagtaattgtagtctctatggagatattccttcttcattaggaaacctttttcgtctcacacttcttgacctttcgtataattatttagttggtcaagttccaccttctataggaaacctttctcgactcacaattcttgacctttgggataataagttagtaggtcaacttccagcttcaataggaaacctaacccaactagaatacttgatcttttcacacaacaaattcagtggcaatattcctgttacattctccaatttaacaaaactgctcgttgtcaacctctataataattccttcgaatccatgctcccacttgacatgagtggattccaaaacttggactattttaatgttggtgaaaactcattttccgggactttgcctaaatctttgttcacaattccttcattacgttgggctaatttagagggaaacatgttcaagggacctatagagtttaggaatatgtattcaccatctactaggcttcaatatctatttctttctcaaaacaaatttgatggcccaatccctgatactctatcccaatatctcaatctcatagagttagatcttagtttcaacaatctaactggatctttccctacgttcttgttcacaattcccacgttagaaagggttaacttagagggaaaccatctcaagggacctgtagagtttggaaacatgtcttcatcgtctagtctcaagtttctaaactttgctcaaaacgaattcaatggctcgatccccgaatctgtatctcagtatctcaatcttgaagagctacatcttagtttcaacaatttcattggtacaatcccaagatctatatcaaagttagccaaacttgaatatttttgtcttgaagacaataatatggtaggtgaagtaccaagttggctatggagattgacaatggtggcactttctaacaattctttcaacagttttggagaatcatcagaaggtcttgatgaaacacaagttcagtggttggatcttagttcaaattcatttcaaggaccatttcctcattggatatgcaagcttagatcgttggagatcttaattatgtccgataatcgcttcaacggctcaattcctccatgtttaagcagcttcatggtttctcttacagatttaattctacgtaacaacagtttgagtggacctcttcctgatatatttgtcaatgcgacaaagctactatcacttgacgttagtcgcaacaagttggatggagtactaccaaaatctttgatccattgcaaagctatgcaacttttgaatgtgagaagcaacaaaatcaaggacaagtttccttcttggttaggatctctaccgtcattacatgtcctcatcctacgatcaaatgagttttatgggacgttgtatcaaccccatgcatccattgggtttcaaagtttaagagtcattgatgtctcacacaatgacttgattgggacgttaccgtcattctatttttctagttggcgtgaaatgagcagattaacaggagaagatggcgactttagactttctgaggctccatacatgggaaaagttttgaatgctactgcattctttgttgattcaatggaaatcgtgaacaaaggagtagagacggagtttaagcggatcaacgaagaaaacaaagtcataaacttttctggaaacagattttctggaaatatacctgaatccattggattgttgaaagagttacgtcatctcaacttgtcaagtaatgcattcacaggaaatatcccacaatcattggcaaatttgatgaagcttgaggcgttagacttatctctgaatcagttgtctggtcaaattcctcaaggacttggtagtctctcgtttatgtcaacaatgaacttctcttacaactttcttgaaggtccagtgcctaaaagcacacagttccaaggtcaaaactgttctgcattcatggaaaaccccaagctcaatggtctcgaggaaatatgtagagaaactgatcgtgtcccgaatccaaaaccacaagaatcaaaagatttgtctgagccggaagaacatgtgattaactggatagccgcgggaatagcttatggtcctggtgtcgtctgtggattggtaattggacatatattcctttcacacaaacacgagtgttggttcatggaaaagtttcgtcgaaaaaagcccaaagtagtcaccagaattgctcgtccctctaagcattaatttgtgacgtatatgtttgttgactagcgtatattgtttattacaacagcttgtatatttttaacttatattacaacagccagcttgtgtaatcaattgttcaattttttttctttattcaacaaaagaattcatatattgttatatattactgactacagaagctgagagaagaatatgttcttacaagttgggatgtctatgagactagaaccaacaaggatgtctcttgctagttaatttatatgacaaaaggctgaaacatgaacttttaaagatgattccagtcttgattgcaccattaaacgtatcataatccagcgtcaacctcacataagccttcttgtgaacctcacgcaagccttactggttccagtctgatcaatgagttaaagtttcttggtcttatttaacatgtttagaaaatattcaactcacttagtttgattctttgaatcaagttttcagttattagttccaacttgtaaaaatggttgcagaacaaaatgatgaggaagttttttagtatcacataagtccagattcaagtttttttcaattgtatctaaaacacacacaactttcagattgaataaaatctgaatttcattctcagcagaggctaatataaaaatgacaaaagaagaggaggaggataggagctatatgtctactatttttatttttttagccaatgagagagctccacttcataccccacttttaccaatcgagcgatttcacaaccagtctcacccatgtcgcgttgagcgcgtgtctacgatttctaaaggggtttgtccacagaaatcatgccttttttgatccacgcaactcactctcaaaaatccatcgcgtgtcttattttttttggttttcttctctaaaccaaattaaaccgaaccgagatcaatttgaatttcaaaaccaatgtaaacccatcaaacccatcgctgtgaaaacaaaaagctcggccactgtaacaacaaaaatggagacgacacaacttggaagagaaatcaactctaaatagccaagagaatgttcgaaaaccccctcaaatccgatgcttcctttgattccaacctccaaaagcccatctgctcaaatcttcatttcgaggatgaggactcgaggagtattacaaggtacctcaatagaatcaatggcttccatggattttgaaactttacttctaataaacaccattgtaatgtcttgttgtgaagttgtgtaaggaacaaaggatagtgaaagctgaagagtgggattcgtttatggagtttcagagttttttttgactaagtggcctctgtttttgattcttcagtggtcaattttgtgatgggatttgattgaaattggagaatgatttcatgaaatctcttcgggctgaggttgattcatgactctttcatttttctagtgtctcattgatgatagacataagaagcatacttaaggccatagagagtggtgaattggaggcaatcaagcctttgccttggtaccctaagaatctttcttttcacggaaggagattagaaaaaaccagatacttgagaggtacattttcatgccagttgcttcagaacaagtattcacttccattcccttacttgtgttagttcagcgcttgagaaatattatgatcttgtttcagactttcagctgtcaagagacaaggcccgttttactatcaggttaaaatcatggtcagcttcttgtcccaaaccacattgttgcaaggttttgtaataaatcttggctcgataatgcattcagaaacttcttctactcatatctcaaaatatgttttgaattctaaaccccatggttatcaatataaagaatattagtatctatttttctcttttctggtgtggttgcaatttatcgtttgtctctttcgtggaaacccttaattcaggcggtattaagtctttctcataaaactttctaagtcaaaccaaaattccaatcgaaattctcagcatgaaagtctcgaacacgtttacatttcttacgcacccaaagactcttgcttcttgcacacgtctctcttggctgtcctttaccataacgaatttgatgagattgtttcaaaataaaatgtttctttttgacaagtctgggattttaatgtaattatcaatagtcatgcacattatacaacatttaaaagaatacgggggttgttttgcaattttcagtagttatacacatttatccgtaatcactctgctcaagaagcttctcctcttgtgtgattctcctgcaatcgctggtgatgattcctctaactctttcgtcgccgtctctgaatcggctcgttttatccacatcacgttactcacactctctatttctcagcaatttcaattcgctctctctgatccaccggaaattaccgtataaacctctttttggcgcaaggtgtcatgctagtagcagcagcagcagctcttcctccttcacggcaaagtcttccaaagagattcgtaaagctcaaaccaaagtagttgtcgacgagaagcttagctcgatccggcgactgttttcggagccgggtgttggaatcgacgcttatatcataccttcacaagatgcacatcaggttctctttttttaaacctcttcttaactcgtgattacgaattgaataggaagttctagtagattcaaaactgttcaattgtgtgtgtttttaagtcaattattggtccaagtgggcaagtttgactatagaaaggagtaggtagaagtctactagagagctgcaaatttgtgttttgttttctatttttctctctctctaaatagagacgtagaagccatagctatcataacctgttacttacaaaacaaacaaaatgattccaagccaatctaattccttttctggtagtgttattaccttgtatttcttcctcctgggttcccttgttctacgcactcttgcttcttctaggcttcactattgccgccatgaccaaagggatgctcttctcgagttcaaacacgagtttccggtaagtgaatcgaagccaagtccatcgttgagttcatggaacaagactagtgattgctgtttttgggagggtgtcacgtgcgatgatgaatctggcgaggtggtttcacttgaccttagttatgtccttctcaacaactctttgaaaccaactagtggtcttttcaaactccaacaactccagaacctgactctcagtgattgccatctctatggagaggttacttcttcactaggaaacctttctcgtctcacgcatcttgacctttcgagtaatcagctgacaggtgaagttctggcttcggtcagtaagctaaaccaacttagagaccttttactttccgaaaacagttttagtggtaacattcctacttcatttaccaatttaacgaagctttctagtttagacatctctagcaatcagttcacattggaaaatttctctttcatactaccaaatttaaccagcttgtcctccttaaacgttgcctctaatcactttaaatccacgcttccatctgatatgagtggactccacaacttgaaatattttgatgtgcgtgagaattcatttgtcgggacttttcctacatccttattcacgattccttcgttacaaattgtttatttggaaggaaaccagttcatgggacctataaagtttgggaatatatcttcatcttctaggctttgggatctaaaccttgctgataacaaattcgatgggccaatccctgaatatatatctgaaattcacagtctcatagtactagatcttagccacaacaacttagttgggccaatccccacttctatatcaaagttggtcaaccttcagcatcttagtctttcaaacaataccttggaaggcgaagtgccaggttgcttatggggattgatgacagtgacactttcccacaattctttcaacagttttggaaagtcatcatccggagctttggatggagaatcaatgcaggagttggatcttggttcgaattcacttggaggaccttttccccattggatctgcaagcaaaggttcttaaagtacttagacttgtccaacaatctcttcaacggctcaattcctccttgtttgaaaaattccacttattggcttaaagggctagttctgcgtaacaacagcttcagcggatttctcccagacgtatttgtcaatgctagcatgttattatcacttgacgttagctacaaccggttggagggaaaacttccaaaatccctgatcaattgcactggtatggaacttctgaatgtgggaagcaacataatcaaggacacttttccatcctggttggtttctttgccatcattacgtgtcctcatcctcagatctaatgcattctatgggtcgttatattatgaccacatatcttttgggtttcaacatttgagactcattgatatatcacagaatggcttcagtggaactttgtcacctttatatttctccaattggcgtgagatggtgacatctgtcttagaagaaaacggctctaatataggtacagaggattggtacatgggcgagaaagggcccgagttcagccatagtaattcgatgactatgatatataaaggagtagaaacggacttcttgcggatcccatatttcttcagagccattgacttttctggaaacagattttttgggaatatacctgaatccgttggtttgttgaaggaattgcgtcttctcaatttgtcaggtaactcattcacaagcaatatccctcagtcattggcaaatttgacaaatcttgagacattggacctatcccggaatcagctatcaggtcacatccctcgagatcttggtagcctctcttttctgtcgaccatgaatttctcccataaccttctcgaaggtccagttccactaggcactcagtttcaaagccaacattgttctacattcatggacaacctcagactctacggtcttgagaaaatctgtggaaaagctcatgccccgagttctacaccactagaatccgaggaattttcggaaccagaagaacaagtgattaactggatagcagcggcaatagcctacggacctggtgtgttttgtggattagttattggacatatcttctttactgcacacaaacacgagtggttcatggaaaaattccatcgaaacaagcgcagagtagtcaccacaagtgctcgttgaacaccatcacctctcacaatttctctgagtgattgtgaaacgtatatgtttgttatgatatctgtcagttgtgttatgcataaactctttgtctttgtaattttctactttatggtattgtaagaaacggctttggtggtatctgatcttctatatgttgggttgaaaatgcattcagatttttcttcctagtcaaatctcaacttgtcataagaggatgtttcaattgtagagccaaatggaagttcttcttcttctaaatcacagtatgaaattctccaactcgtgttttatttcattctccccaaagtttcttgctccgctcacacgtcaatcttgctgtccctgagtataccaaattcgatttggagattcaagataaaaaataaatatgatttggaccagtgcgggggttgttatgcatctatgcaattgtttttgccattttgatatgggtaatgtgttgtttcggtgaattttacatactaggagcttaagatctactttcataactgatgttgcctgtaatatatttctgtgccattaggaaagtcacaaatttatgttttacttctaaatgtatccataaactgcctgagtttttcatggcttgagtgtgatttttctccatattttgtactagagcgagttcatcgcagagtgctatgccaggagggcttatatatcaggatttactggaagtgctggtaccgctgttgtcaccaaggataaggcagctctatggacagatggccgctattttcttcaggttttgatcattatcgtcctttaaaattatttgattgccatctcatattgaaaggaaatgtggagtttcttatctacattctctgcaattattctatcaaaggcggagaagcaattaaactctagttggattctcatgcgggctggtaatccgggagtccccacggcgagtgaatggatagctgatgttttggcgcctggtggaagagttggtattgaccctgtaagctattattaaaccttctaaattgtgtctccttttgtccttaaatattgtagtttgtggtttgttatttacaagactttggaattcatgaagggagcagttccttttttccgccgatgctgctgaggaattgaaggaggttatagcaaagaagaatcatgagttggtttacttgtacaatgtaaatcttgtggatgagatatggaaggactcaaggccaaagcctccaagcagacaaataaggatacatgacttgaagtatgctggtttagatgtggcctcgaaattgttgtctttgaggaaccaaattatggatgctggcacatctgccattgtaatatccatgcttgatgagattgcatgggtgcttaatctggtaatactctagcatagcatcttacatttgaatctgttagttttgtgccactgatatcagcttatccttcacataggtcccaatgtattgatgttgtattctgcctcttctgactgcagagagggagcgatgttccacattcacctgtaatgtacgcatatctgattgtagaggttgaccaagcccaactttttgtagataattctaaagtaacggtggaggtgaaagatcatttgaaaaacgcagggatcgaacttagaccttacgattccattcttcaaggaatagataggtaagtacttgattgtccatgtccatttatgaacttcagaaaaaggaatttccctcactttgagttttctcagtttggcagcacgaggagctcagctcttgatggatccatcaaccctcaacgtagctatcattagtacctacaaatctgcctgtgaaagatattcgaggaattttgaaagcgaagccaaagttaagacaaagtttactgatagctccagcggatatactgccaatccttctggtatttacatgcaatctcctatttcgtgggcaaaggccattaaaaatgatgctgagctaaagggaatgaagaattc

SEQ ID NO: 1029 - DNA, 79296 bp, Arabidopsis thaliana
gatctctaccgattggactcttgaggaacaatctctattggaagatttgcttgtcaagtaatcttctcgctctctctctgtatgtttaagatttggatttgctgttttatccaatgttctttctatctgactagatgtgactagatgtagtgaattctgcgatatgttattttccatggcctttcaagcatcatgtagcttgaatcggaatatgtgttgagaattgttagctttggtcgggttttttgaattatatctgagaagagaaacagtggtatttgattagctgattgtgagttttggatgtggtttcaagtatggtaataaataaaatactagaaaaatgactagctagctagtgtggtatcatatttatgataggctcattagtgttagagcaatgtgaaaattttaggatttaattagaggatgagttgtctacttatctgtaatgactggttgtaaatttttgtaggagccttgttaaatcctatcactcttttagtaattaatctttatataggtacgcgacagaaccgtcggtttttcgatatgcgaagattgctatgaaaatgaaagataagactgttcgagatgttgccctgcgctgtagatggatgactgtaagtttcttgattttgcttaatccggcgactttttcgttgttcttgattaaccttcttcgtgtattggctttattgattagtaagaatcaactgacggtttttcacctccatgtggttgctgatggattgcagaaaaaggaaaacggaaagcgtaggaaagaagatcattcctcgaggaaaagcaaagataagaaagtatgtggatttcaatcctatttgctgctacttagcaatttcgatactagcaaggctaagaaagatatttgaagtacaaaccataaatcagcttgattgaattctaatgtgtaactagcttgaacctttagtcatttacttgtgagtttggacggatgaaagttcttgtgttgtcttgtggatccatttataagtctacaaaaactgattgattgtctttcacatatctgtttagcaggaaaaagctacagattcttcagccaagtcctcatctcatttgaatgttcatcctaatggtccttcttatgctccgcctatgatgcctatcgatactgatgatggtatttcatataaaggtttgtctaagattctaggctttttccatttaaaggctaaatcttctagattggattagaaggagcataagtgtttcggctttattgcagctattggtggtgtgagtggagatcttctcgagcaaaatgctcaaatgttcaatcaactttcaacaaatttctcagctttccaggtgaattcaacttccacttttcatcttgtaagttttgtataattcgctgagttttttggacttgatttgattctctgccttgtgctgttggcttttgagcaatccagtggttttatgattgattttgtactatatcagcttaagtttacgttagttctatccaattgtgtacttatgaaagattctttcccattgcagctacatgagaatgtcaatatcttgtgcaaagctcgagacaatatccttgcaatcttgaacgagtaatacattttcccatatatctatagatcatttcgatgtcattgactcactttgggaaatgccattcttttccaacaaagttttcgagctattatagtgtatcaactcaaatcttaacgtgctttgctgattgaatggattgcagcttgaatgacatgccagaagttatgaagcagatgccacctcttccggtgaagttgaatgaggagctggcaaattcgatcctccctcgcccatcccatcaaaggaagtcatgatcgaggcgatagatggttggttctgaccaaggagtctctttaatccgggatcaatgaagaaaggaataaatcgcgggatagagagagagctccactcgtactggttgatagaatgaggggtttcccctgactcatagagttatagtctctttttacaatttccgtcagtctctgaatgttttagcaaatggttaattgatacatgagtagggtcgcgtatcgttgtttaggatgtgaatagatttcaattggtatggtataagtctctctgtataaaattggtatcaagctgaaaggtttgagattagaaagggcctatatcctaatgatgcacacccgtgatgcatttctctcatacaaccccttttttagaatgaaacgaaagtactgaaccatttcttgtaataataaagccgactgttttgtaacacaaatgtaagtcttgctcgtagcttacagaagaaatctcgagtcaaaaggtaagtcagtttacaaaaacgaaaagttttctattcagaagattattccaagcatcttagaagttccaagagaagatcgtaactctctcacacatcagccaagtctttgattaatttgcgctggtaccacttgcaggagtcttcaactctcaacctacaagaagaagcaatggtgagcaagaagttgacctagtaagaaaaaggatacatagtgtgagagtatgaaactattgtgagatgctttcttttatgaaatcctttcatcctacaacagagtggaattaatatatgattgaacaagttgatcaaaatgtgaatgaatcgtttctaggtacacaacactatgagctaccactagtaatgtaacttaagaaggtgtgaaactgcttttgttattgaaattcaccaaactagagagactctaaagtctcaagcaatttgtccaaccaaactctagaaaactcaagttaatgggcaacattttgtggcttatataggcagtggtgaaatctcaatgtctgaaactaattgttctttcatgagaagcagtaccagcaaactataacacctctagaaattcttgaattctccgtagactaaacaattgtgaagaaatcaatgaacaatgagaagtaacccaccaaacataagagcttgctatgacattcagatcacgtggatagcttgattgatcaaccagagttatgagatcatctcactaacaaacaatcgtttcaagatgcataacactatgagctactactaccaatgtaacttcatgtaagcagaaggtgtgaaactgcttttgttattgaaattctcaagcaatttgtccaaccaaactttagaaaacttgttaagtaaattggcaacattctgtggcttatacaggcagtggtgaaattactacgcttgcttgacctctctagaaattcttgaattctaagttgattaaatatcaatgaacaatatcaatgtaaccaaccaaacaaaaaagctttctgtaaaactcagatcatatgaatagcttaatttatctaaaagagtaacgagattatctcactagcaatcaaatcatagttacgaatggagggagagaggtagagaaagagctgacctgagctggattcgggttctcataaccaccagactccaaacctgatactctaccttccagagcactgaatttctccttcatctgcagcattggaattttgttaacgatttgcaggatattcgaatgaaaactttcccaaatgatgaatttctaaaacattgaaaatttacatcagaagaaatagcgaaacgttcggcatagagatcacgccacacgatatgagcaatggaacctccggtcacggaaaaaccaagcgtaaaccagagaaggcgagttctcaacatctctttcttcttcttcttccaatttctgcaatgtctctgaatctctctgacgcattaccgagtcgtcaaccattttttctttttgatatgggcctttatattggcccattagtttgctaaaacaaactaaagcatttaagttttttaattgagatgggcctttcttatatagaagtccaagcatttaactagtaaaaatgtctatcgtggcccaaaagaccgtgaaggtccgtagttgataggatatgaagcagattataattttgtaaatagtgaaaaaaaaaaaaaaacattatacacaaattaattcttgtatcaacaaatagaccttcaaaaaaaaaaaaaaacatatcattcaaatgattagtcaataacatgttcaatacatcacactgtcctaaccaagataaatatggttgcaagacaataaagagagatcatttaaataaaagttactttttcaagaactttctaacttctaatccaatagccgtcaaggccaagaccgcgaccgcaaaaccgtaaccaccattccaactagttccagctttagccaaatgaataccgtagaagatgttagaaatagccagtatgatcagaagtcttcctatgttatgatgataccaattccaatattttctgtatttcgattgcttatccggccgagctagcaatgccagcatctgaaatatcaataaacaaaaccatgtaaacatataatcgtcttgggtgttcttcgcagtatatacttcaaatttttgagtgttattaggaagacgaacctgaagaacgcccatgacaagtatggttatcccgaggcctttgtgcttggaaacattattggccttgagccggttttcaagaaccaaaccgcaaatgacaccagttaaaccgaggagaaaaccagtggtttggagagcgatatgggcatagaaccaagtggggtcccattgcttcatatgtcgagccactatggcgccaacgataatcaatattccccagccgaacatgttcattagcccatgtgtcttctttagcttagagtgtggtgaaactttaaccacactttgcgaaccttttacattcatcaatggaaaaccaaaacataaattagtccaagcaactacgaaacaagaagaatttctagattctaatacaaactcatgttcttttattaagttttgtaccctccatatcttgaaaatttttaacactaagttttactcatgaaaaagttaatctgttttttcactgcatctcacaatcatcaaatcaaacaaaccaaaatagacaatgatgagatattaaaaacaaaagacctgtacatcattttgttttgtctttattacccgaaatattgttgaattgccatttggtacaaaaatcaactaaaacttaattactactccaagctacagcatctagacttctagagagtcccataatctcataatgtggctaaataaattcaatcgtgttttttgaccaaaaaaaatacaataagaaaattggaaattagtgttttggaaactatatgagtagtagtagcagtagttgggcagggtcggtataatgtgaaaatgactccaacaaagaataatggtacaatcttgaaccagttcctaatcgtcatcatcgcatgtgtttaatttgttttgaattaacttagaaaaatattatgttgttggaaggcttaccaaactagtggagatataaaatgattaagcagtcaaataatggattaattcaagattgactttaaataattagtcaagctgggttttgcttacctgtattataattgatggtcgtggtggtcacgaagcggtgctctctcaacctaaaatccggcgaagatgggaagaatccggcaggtcccacagcgtaaagaagactctgccgcggcagcgtcgccgtcaattgaaatctcatgtaaagacgcgacgacactgattcgatcttcaacgagccgttgacgatcgttagatctccttggtcaggattaacctctccgggagatttcccaccgagcaagtacggtttcacagtcccggaaccgccgtcggaaggtatccaaccaacgatcgcgctgcttccgatcatctgaccgttggtagagaatccgatcccgatgaaagcgcttgaatccggcgccgataagataaagctccatgtgttctctgccgttcttgcatactacgcgtgaatattattagaaattcggtttcaatattttcagagttggaaatttgaaaattaggaaaattgacttactcggaggatgaaattttggggagtccaagcttcggtgcattgaaggaggctggtgttgaaggtgaggtcgttgagaggtagagttgagttgcaggaatctgtagcagcttgttgagcattaactatggtggagagagcaattaagacgaagatgatgatggaaacagaataaagcttcatgttttgttctctttctctctctctggatctgaaagatgaaagagagaggaaagtaaatgactaatgaagaaggatcatgatgatgacgacgacaatgaattgtatatatatatatatatatatatatatatatatatcttgtttatgagatagtgtgtgtgaagaagcagttgagaattcaactaattttaaaattctttgtatcgttagaattcgtttttttatatcattattattactaatctggtaaataaagagctctgtttcattaagaaagagtaaaaatcctttcgttctgtttctctgtctctcgtcggcttaagatgtggaaaaatgattgcaatgtaccagctaacttaacatgttttgatcatttaaagacaaaaataataaacttgattgaaaaggacaaaatgataaatctctctttaatttttggagtacttgctacgaatcctagctttttcacgaccagtatcggtctagtcagtttaagtttcaagtcaactggttattgattgcatctgccgcattgtgtttattcattgatcgaccaatgggatttttcagacatacagataatagtatgtactactatacatttgcctttttggtgttattacttttagtacttggattcacataaattttgtaacaactggcttctattagctagacggtctatttcccgtctaattcaaaaccaaactttgtaagacagatgaaaggagcaatgaatttgtaatccagttaagctaaaatgagatggtaacgtgattgttactcaaatctctggtttgggttttttacactttcagggaccagagaaaacaaccgatcctgacaaaagcaatatctgttatcctacacacacacaatataaaagtcattgacataccaccgcttgtgccatctcaacaaacaccatttcactagtctatatgggctccatcatctgaacaagaaccattcaattgttggcttttggcatcagcaatcctcgccgcacttcagtcatgtaatccgttggcgatggaggaggtaatgtcttgtttgctgcagccaggatctgtaattgttttgacacaaaacaagagatggggtctcatcattcatgtactcacatctttagaaaaactagaagcatatgataagagtttgaagttagttccacctgatgaggtagtttaccccaaacactccctccatagtacatgattggtcgcactgtgaaacagagaaagtaggcaaacttgaaaatcagttatacttgactaaccggaagacagagatccagataagaacatagatatatctgattgtatttggaggcaactcaagcagcacaagtataatagacacaaaggacaaaggaaaacttagaatcccttaatctcaccagatagatccacagttgggtcgtcgtattgatgcatttcagctgcccatcctgttcatgacaaatcaagagcacgtaaataagacaagtacataaaactgactgcataagcagtgaattcaacacaccttatctattaagttcaaagatttctaaaactagcactgactcaacaaatgcttagcatagcaacagttgatagaagaacgaccagatagtgatacagagcaaagaataaaccagctaaatgtttaaagagatagttcagatttatacgttggctcatgagctgataagctgcactcctggagcagtcctttattgttattatcctctgggtctgggatatgttttccatctgaagaccagtagcaggaggctgatttctctcattatcgttgttctgttggctacttgttcgatctgcatttcactctttatttagccaagaaccatagcatactagcaaaaccagatatagcttgaacgacgatttattttcaagaaaacaggcaaacaaatgggtcaagtacacacatggagaaatgaatcaaccagcggatttgctaataaagagagagcgagatctgaatttcaggctaaactcctaataattcactttcttagaaacggttcttgaagttaccaactatgcacaaacacaatgtgtacagattcgcatgcaatcaattcctgaatctacaaaacaagattacttctattcatcgacaatctttgatctaagctataatctccacagaactagatactctcggaattaagaaccgaattgattaagaatcaataaagaacgactgaggcaaagaagacagagagagagagagagagctcacatacctcccgacttccggcgattcccagaagccttcctgtgacacggagaagcaacatcgaaaggtaagaacggagtagcgaaatcagtagaataaagaacactcgaaatcagcagatcaaagaccactgaagaagaagaagaagaagttacctttgattaggaggagtgtatcgattctgattggagctcgaatccgccattgacgagttaggatttacgcagttttttcagagaactctctctctctctctctctctctctaccggaggagatctgtcaacagtcaactgtttaacgcatagagaacgttgaaaagcgtcttctcgtctgaagtcgttcaatcttcacgcgcgaattcttcgacgcgtgtttatcaacctctcgcgcgcttttattacgcctttccgaaattaacgtttcgtgttcaatttccggtttgctgaaccaactgtatgtagatttctggttgaaacatctactggtccaccattggactttatgggccttactacatttttgggcccaatattgtaatttagctgatggatccaaaaccggaatcggatctgtacccgctccatcgtgaggtctctcacagcgaaagaagggttttgagggttttcacacctttcgctgtttcctcgtcaatttctttgtttggttgttctttcttcgcatccaaagatgaagctcgtcaggtactgtttcgttctcagttcttcttttctttagaaaattcatgttgttcttaatcttagttagctcctggcatggaatccattcccaatattgagcctgagctgatttgtgttatatggttttgattggatcgagtaggtttttgatgaagttaaacaatgaaactgtgtctatcgagctgaagaatgggactgtggtccatggaaccatcactggtaagttcttattgttagcttccggtttctttgtagctcttctcatcttttcttctctctcgatttctccgttgctaggtcttatacaagtcgcgatctgttcccttattttcaattggccctaatcgcgtccttgtgatcacatgaataggttgagtaaacacacagttagagccagtagtcataaaggtatatttattgaagtttaagcttgatgatttgggcaggtgttgatgtgagcatgaacactcacttgaagacagtgaagatgagcctgaaggggaaaaacccagtaacacttgatcatcttagcttgaggggtaataatattcgctactacattcttcctgatagcttgaacctcgagactttacttgtggaagacactcctagagttaaacctaagaagcctgttgctggtactgcttcattcatttttggtgtttgtaatattcgtcttcataagctaaaagacttctttatcagtccatttattcgttctctctttctttcttctttagggaaagctgttggacgcggtcgcggacgtggccgtgggcgtggtcgcggcagaggtcgttagatgtagcagcgctctggaacatgttgaaggtttgtgagtttaatttttaggagaatgtacgagttatgtaactagcaactctggcaaaggaaagatttgattgagaaatagtatgattgatgctctagtaaggagttactttgtaatggaattccatggataacaagatttggctttacatgttataagagcatctacaagtagagaatttgtgtgatactgatagctcaagactttttattcatttaacaaatctgactatcaaattgcattaacatgttgacaatcttagtatagaaaaactgctatctcctccgttaatcttccacatgaaacctatctcacatgatcctgcaattgggatcttgattgtaaacgggttccccgatctgattgtagggatcacacgggtagggataggaagatggcacaccatatccatcatgaggccatggttgataacatggctcaggtttttgccatggttgacaacatggctcaggtttcttctcttcaggtttcttctcttcgggtttcttctcttcgggtttcttttcttcttctggctttttgtcaccatccttaggtggttcaactttagctacgctaacaagctccgcaaatgcaacttttttcctgagtgtgttgattagagcaatcatatcgacttcaacaccggtcacctcaatctggttcctgtgatctccctttatttccacagcgttcacgcctataaaccaatgcgataaatctttagattcaacaagaattacaatcatcaagttctctagtgtttgtatcattgttacctttaaactgaaccgcagttttcattgcctttgctcgagttgtgtcatcagtcatagcaattcttatcaggatcttttgctgagtacaataagagaactccttaacatcacaaagagaagtctctctctttcacaagagaatcgaagttattacttgttgttgagtacacaggagacataccttcatgttattgtcttctgagaatccgcgtgatttgtttgatgggagtttgctccgaacttttttgtgtcttcttcgatcacaaattagaggaaatataaataaggatcgattttatatattcatttgttccatgagtcgttgtctcacacaacggaatccgatagtttgaatatcgttgtcaggttcatatcttcggtccttacgtgttttattggttctagttgccgattcgtacgagcttattaccaattttttaattttaaaaagcctaacaaaaatctttatttgattgagtcaaaaaattagatgaaatagttatttgactgggtcaaaataaattgattaaataatggtaaacaacacaaataatatttgtttactacaccgttgcctggtagttttagacatgtatggcaaaagacttaataatttttgagtcgatatgtcaattatgatgattaataagttttgtttgttcatcatccagttgtgcataacaatgaatagaacagatgcgttaaaagtcttggtcttctctagagtacatgtttccctctaacttccttctcaataaaaaaaaagattaacttgactactaatctgtcatccatctgtattaacaaatgttatatgcttgacttgcaatacgtactttcgcaatcatattgcagttttctaacgtaatgaaacaataagcttttagtttatactaatgtgtgttgtctaatgctaatttgactttaatttcttaacacattacacattgatgatgccaattgcagtgatatcagcaacttgcaaccgtttgatccaatgatatatcataggtaattaggtatcatatctcatggagataaacgggtaaataaatataatcttatttgctaaataaaaaataatcaagtttaagttttaacatcttcatatacaatctggtttctgtgatctccctgtattagcaaaaaaaaaacatgatttaaaaaagaatttggaaagaaaagaaaagagcgggaaataaatccaaagatttgaccaagttaaaccaaaacttttttactatctgagaaaaccattcagtttccccaaaataaaataaaaaatcagccttaaatcccgtgtctagggttttctttcgtagctgattgggggctgcaagagtttcgccgaggacgattgagaattttgattttcgaaaaatggattctgtggaggaagaaggtgttgttagggttgaagaagagaacggacgcggtggtctccgtaggcatcggagggtttctacgaagctggcgaattacgtagatcctccgactgacgacgaagaagatggaggacccaagcgaaagggcaaaaggggtggaaatagggctccgaaaaagacaccgaagaaagacgaggagatgcaaaagaacgaaattgatgaagcaaaccgagtcactggtctggtgaaggaaaaaagagccgcgactaagattctgaatcgcaaagactccattattgaagtaggagaagcttctggaagcatgcccaaggaagtaaagggaattaggattgggaaaaggaagggagaaatcgatggtgagattccaactaagccgggcaagaagccaaagactacagtagacccgagaatcattggttacagaccggttagtgatttctctgtaaaatttgtactcttttcataccttacatgacgaccaattcattaattttgggatatattatataggacaatatgtgccatcaatgtcaaaagagcgataggattgttgaacggtgtcagacctgcaatagtaagcgttattgtcatccatgcttggacacttggtatgatcttcttcttaccttgaactttaatttcgtttcttgttactgatttcattttactgtccagaagcctgaaacattggtctatttacttcttgcaggtacccccttatagcaaaagaagatgttgccaagaaatgcatgttctgctctagtacttgcaattgcagagcatgcttgcgtctagatactaaattgaaagtaattttttctcgtatctaccatatcttgcttgcttattattatttttcgatttacttaagctccttaccataataattactcctatgctatgtaggggataaattcgaacctcatagtcagcgaggaagaaaaggtccaagcctctaagtttattctgcagagccttctcccacatctgaaaggaataaatgatgaacaagttgctgagaaggaagttgaggccaaaatatacggtactttctttgcttttatttatgattggatattcgttattattggatatacctgcattaattcccaacaaaatctcaaagtgagtgggttcaattttttaagtgggaaactggaagctcattagttccaggagtttgaagataccttaatgttgtttaaactcacaggactgaagtttgaagaggtgaggccccaagacgctaaagctttccctgatgaaagactatactggtatattaccctgatatttttgtttcagttaaaatgacaagttcttatgtcttcatgctgtttgataacatgcttcgttgttgttctaactttttgggcttacagtgatatctgcaagacttctatctatgatctccataggaattgcaagtcctgtagttttgatatctgccttagctgttgccttgagatccgcaatggaaaggctctggcatgtaaggaggatgtgtcttggaattatattaaccgaggtttagagtatgaacatggacaagaaggaaaagtgattgaaaagccggcgaataagctagatgataagttgaaagataagctggatggtaagccggatgataagccgaagggtaagccaaagggtaggccaaagggtaagccggatgataagccgaagggtaaactgaagggtaagcaggatgataaaccggatgataagccagatgagaagccggttaatacagaccatatgaagtacccttctctgtggaaagcaaatgaagctgggatcattacttgttgttgtggtgctggggagttagtgctgaaacgactacttccggatggttggatatctgagttggtcaacagagttgaaaaaactgctgaagctggcgagcttttgaatttacctgaaacggttttggagcgatgcccttgttctaactctgacagacatattgacatagacagctgtaatttgttaaaagctgcttgtcgagaaggttcagaagacaattatctttactctccaagtgtatgggatgttcaacaagatgatttgaagcattttcagcaccattgggtaaaaggcgagcctgtgattgtgagaaatgtgcttgaagctacatctggtttaagctgggaaccaatggtaatgcatcgtgcctgccgccagataagccatgtccagcatggatcacttaaggatgttgttgctgttgattgtttggacttctgtgaggtcagttttttcctgagtaaattgtattgtccatgtcctttttataaaagtacttaattttaatggctctggtacttgcatagcaattaatttattcttgtctagataagtaagttcatgtttttcccttctggcttgatttctgttttactgactgttcaactttgtttttctcatcaacagtgaatataattattctttagctttttccagggttttgccttttctggtagatgcattgaatagctacatgtcaaattcatattagtcttactaggcaacaaaatgcctcatctgttacttttcagatttgtagttgtaacttcttcttatactcgtatttatctaatggcttgtaatggttgcaggtaaaagttaatcttcatgaattttttactggatacacggatggccgatatgatcgaatgggttggccactagttctgaaactgaaagattggcctccagctaaagtcttcaaagataacttgccacgtcatgctgaggagttcttatgtagtttgcctttgaagcattacactcatccggttaatggacctttgaatctcgctgtcaagcttccccaaaattgcttgaagccagacatgggaccaaagacgtacgttgcttctggatttgctcaagaattaggccgtggagattctgttactaagctccactgcgacatgtctgatgcggttagtacccatatgatttgtcttttctcgttttcatatccatttctttcttctaagtctgtccattcttattgtttttctttgcacatctataatgatttcagaacctatgaaaacattaaaatcagataccatttcctaatcggtcacttagattttttattacatttaggattcgtctcctcttcttttccagatcagttccttaagttattctgtttttcttttggctgagttttgtggactctttcgttgaactcctctttttcgcattttattcgggctacactcctcctttgaagcaaaggaactctccttagatttgttgcatcctcatattctgctttagggccgaaaatcaaagtctctggcctaatgttcttgaacattctaagattgcaatgtccatttgaaagttcttacgctgttcataggacctatggaccaagctttatccattcaatgtgagtccatcaatagctttcttagtccttcataggcctggcattcggtttttggttctgttaagttcgttttttccgggtttggaaattgcccccaaaaagaatcggatgttatttcggtttggtatataataaatgaaatttaataaaaaatattaatcttaggtaaatgttttgacaaaaaacaaaataaaaacttgtacaggttaatgtatttttaggtaaatgtattttttgtgcgcaccccaaagccttcatccattctgcttagtagagcactttgcttaggtggattgtatctcagactttcataggatgatcgtctaaatagtatacggaaaagatgcgacattatggtcagctccgtggatatctgctgttcaagacgcaagaaattgttcgttttgctggcgcgggcgaggactattaaatcaagtttgtttagttgctgccagttgagcttcccaattcggcaatgaccgatcttaaatttgaaaatgctggtttttcagcattttataaatgtttgattgcgggactaatttggctaacattgaacttggtagacaaaatcgtcgaatagttgaaaaatgagattattattgaatgaatacacattgaatgcaaagattacgcatttcatttgtggtaatagttccaaaagaaaaataaagtgtttgtgattgttcgagaagatatgaaacaacagatacaatagagctaatcgtcgatacaactggtgtagccaattatagtcgtctgtcgtatcaataatgacaattaaactgaaatgcctagattttacatgttgctgctaccactagttgccagaactggaaccaaaattaatgaccaacatcaatttcgcagaattgtcagtactagaaccgaaatcctgattgaacatcccgagctgttgttacttcttgatattgttcggaatgatgttattctctcacatcctacacttttcataaccttgtaagcgacaaaacacattgaaatcgattatgagatgatgcagttgattttttttcaaatcatcagtaaacatgaacttgttgatttctacctcaatgactctttccaattaggtcaaaaaaaagttgtcattatagaaaataaataattatttttctctttggttttttgccaaaaaaaagaatttggtcaataaaacaaaaaaaattaggtcaagcatttttttttttttttggtcaatagttaatttagtagattttggttttgtgttattacatcattaccttccgtttttttctcaatacttcttttatgaccatttaatctcttagaaacgaaaataaacataatctctctcctcgctttctaattaaaataatagtttgaaataaaggtcaactgttgctgtaaaataaaataaaaaataacggtccagggtgttatttttatattataattagttttactcacttttatcttaacttttcttctttagtatcttaatatctgtaccctttggttatttcaggtgaatattttgacgcacatatctgaagtgcccaatatgcaacctggaattggaaatctgaaaaagaagcatgccgaacaagatctcaaggagctgtatagctcagtagctaacaaggaggaaatgatggagattcttgaaaattccagacaacaagtccaaaatgttgaaactgatgatggagctctttgggacattttccgtagagaagatattcctaaattagaaagttacattgagaaacatcacaaggagttcagacatctctactgctgtcctgtgtctcaggtacaaactatctttgcatgcttatacatttttccttctcatgttcaaaagtttgattggtcacagttttgcatgtatttgcttatcttacgttgaccttcttcttttaggttgttcatcctatacatgaccagaacttctatctgacgcggtatcatataatgaagctgaaagaagaatatggtatgctttattttttaagtaatcaacctcattatcgtggcagttttggtcatatcttatgagctttatattgtaggcattgaaccttggaccttcaatcagaagcttggtgatgctgttttgatacctgtaggttgccctcatcaagttagaaatttgaaggtaatattttatacttttagcttaggatacactcaatttgagcaattggactttcagtttttcagcaaagaatcatcaattgatcatttgagttctcttgtgtcttgcagtcctgcaataaggtagcgcttgacttcgtctcacctgaaaatgtcagcgagtgtttacgcttgacaaaacagtatcgtctacttccaccaaatcattttgcaaaagaagacaagttaggggtatttctcttgtctcaagttctggtttttttttagcaaagtttccaaatcctctcttattgttatttttttgtttgttcctgtgtgtttacctgaacaggttaagaagatgatagtccatgcagttgataaagctctcagagacttaagtggagagaagtgagttcttacttctcttctcgctatctatggcaatcgtcagtaaaaatgtgttcttttcgtttaagcttgagttctttttttgtgtttgttcaggtctccagaacctgaagagaagaaacaaaatatgagagggccgaagaagggggcagccaaggcagttgccaaggctctcaaagacttatctccaagtgaaaagaagtgagtatttacttctcttctcactaccttcaaaaacactagtaaactgagtttttttcttttgtatgtgtttaggtcttcggaagcagctgaagaggagatatcaaatgggatagtcaatgcaatcgataagggtctcaaagacttacctccaagtgaagagaagtgagtatttacatacttcttctcttctcactaccataaaaagacatttgtaaactgagctgatgtttttgcttttgtgttggttcaggtcttccgaagccaaagtggagatatcaaatgggatagtcagtgcaatggataaggatctcgaacacatatcttcaagcgaaaagaagtgagctttttcttgtcttctgactacctgtaaaaaaatactagatttttcttcgtctaagctgagtttatcttaattttgttgtgttgttcaggtctacggaagaggaaggggtgaaaagaccaaatattgtgaggacatatgagcggagaaaaaagctgggaagtgaagtaaccaacgcatacattgacagattagaaatggagaagatgtagtagtagtagtagttttcaattaacatcatcttttgttatagctttagcaaactcttttgctactttcatatctctaagttaaacagagtagtactaagggatagactaagaagatacttagttatatctatgtttggcatattttgtattctctcctcaatcatctacaaactctgtgaatttactcgagtctaagaagtatttaacttcattcctgtagaaaaatagctatcaacataacagtaacaggtatagaaattgtttgttaagttactctatatgcaacctattcttaacgaaacaaattgcttatttttgtttcaagttgtctaagttataagtggagaagaaagattctttaacttacatagctagctaggccttaaagtgtcataacaatttaacatttaatcttcttaaccaaatggaatgtataatcatattaaacacatcgtatctctttggaggatcattaaccaaaatatgcctcttcactttcttcactccctcgtataatctcatataccgctcttccggtatatccatcagtatcctttttagttccggtatttccttaaccgataccgaaaccgagaacttctcccagttcaaaacatcactaaacggcaaaacatagttctccgaaataagaaccggtacacatccgctgtatatagcttccggtactctcggactggcaacttcgtgaccactcgggcaaatacaaaaccggcttttcctcatcatctccgtgtaatctaaaccgtccggtagattctcgtaaaccagaatatctttatccttttctttccagtggttaagaagaaccggacggattttgccgtgtgattttccagcgaagaaagcaagtgttgtacgagagattggatctaaaccaccggttaagttgttgatgtctccggtcagtaaattaatttcgggaaacggagcgtctttctctggattaaaatattctgatatgttggcgttgcatagtactcttatggaattgaaaaatagtttctttacgtaccatgttgccctgtgaccctgcaacaatgtggttagttaccgtgagagaaccaaacactggtaaataaaacaagaaccacttacccagtcatggcaagacaacatgaagtgatcaaacccatcgcttgtgttccaataaggatatttcttggaaattatttggacatagtcggcgatgacacgttccaagacagccttatctcgaacaactgggtcgaaaagatggtgtaggatcatcacaacactaaaaggtaagaagtagacatgagccttgtccggatctcgggttcggtacttaaggacatcgttttccataaagtttaggaataatccttccatggagtatatgtctttacaaagtccatagtgaaatattggcggatctccttcttcgtatacgtatatcttgaacatcttctccataagaagataacttctgcaacaagtaaacagtattcataaagggtaacttctatgacaagtaaacagtttttttttttttttttaccggtgaaaggcataagggttccggtaaatgtcgccatgaggaacatagtcttcgtctccaaggggagacgatgtagtagaactataatttaattgagcttctctgatcaacaccctcgcggttgctaattctgcttctactttcccatcccttttccaatatccagaacctggatttgatccgtttctctttcttttttccttgaaaatacaaaactaaattcttgaaaatacaaaacatagaaaccatttttcttgataactgtaagcaaaaacgtgacaaataaaattacttctttggaaatactttttgtacatggaaacatatttaacacacatatacactggtaaacatgtttgaaacaattgtaccctaaatcgatgaacggtaagaaagatggataccgtgatgaaggcgggtgagaaggaagaggtccatagtgaagaagatgttgaaaaataaagatgagaagatgaatttgaatcttttgctatgaaaatggcaaagcctacagcaaaagtggcaaatgccaaaagaaaggcgttcaggtatttcggaatgtaatctctcataccttttccattctaattcctattccattattgtgtttgtgtttagtctagcgagagagagtgatgatgctgatactaaggagattttaagtgagctaattaaagagtctctcaacaccacacaatacaactacttcacatgcattacagtgacatacaaaaaaaagaatacaaggatgtcaaaactagactcctggttttatggtctgccatagaatctcttcacacaacacaaccttttttgtattttcttcttatcgttgataatgttctagaattagggcttttattgggcccagtgcaaataaagtggataatgcataaataatactttttaaacacaaattatgggccttaggattggtccattagaaaaaccttatgatagataaataatgtggcccatcaatgtcacctccatctccatatacatatctctcatcataaacagccgtcaaaacaacatcaatggcaatgcacactgttcgattgtcgccggcgactcaacttcacggcggtatctctagcaatctgtcaccacccaatcgaaaacctaataattccatcgtccgatacggatgcggatcttcgaagcgtttccgtatcgtaacggtcttggcgtcactccgggaaaacgatgcaaacggaagggataactccgtgagagctatggaagtgaagaagatctttgaagactcgcctctgcttcctagtacgaatccccactttcgattcctttgagctgtgtgacagatatcttcttcatttgcagtagacataacgtatatatgtaaatagtagcagctagaatttggatttagtgatgattagttcgtttttgtttgaataatagagccgttatcatcgaaccagctcacggaatctgtctctaatggctcccgcgttcgtgttgcgtatcaggtaactaattcaaaggaactgaattgtttctgagagtcataatgttttgggactttattggctaatgaatgattctccaattagggagtacgaggtgcatacagcgaatcagctgctgagaaggcttatccaaactgtgaagctgttccatgcgaagagtttgacactgcttttgaggtcagaatctcgttcctttactgatcaagactgaaatgatcagtatttcattttcttaagttttggttgccattagtcttgctttgttcttgtttaggcggttgagcggtggcttgttgacagagctgttttaccgattgagaactctttaggtggaagcatccatagaaattatgatcttctgctgcgacacaatttgcatattgtaggcgaagtcaagctagctgttcggcactgtttgttggctaaccacggtgtaaatattgaagatttgagaagggtgcttagccatccacaggtatgccacatacctttgtgcataatcgagttctttttctcttggcactatttaaacccttcttcgttgctttggatcaggctcttgcccaatgtgaaaacacgttaaccaaattggggttggtcagagaagcagtagatgatactgctggcgctgcgaaggtatgttttatgttcctagtatgtttatatattcacactcacaacttacagtggcagctaaataagtttgtgaatttgattcgcagcaaattgcattcgaaaatttaaatgatgcagctgcagttgccagtgaaaaagctgcaaagatatatggtttgaacatagtcgctaaagatatccaggttttaaagactttccgaatgccttttccaatttttcatccatatttttacacttctgctggattatttgattgtgaagttcaatcaatttaggatgactgtgataatgttacaaggtttctaatgctcgcaagagaacccattatccctggaactaacagactctttaaggtgagaaatccagtataacttccatctgcaaaggcaactctaatttctggcaatgtttttttttctctgatggaatgagttactttgattcttgtagacaagtatagttttctcgttagaggaagggcctggagtacttttcaaagcgcttgctgtgtttgcccttcggcaaatcaacctcacaaaggttttgattaacacactcaaaatcttccttcattatgtgcagccttgtttccagtcccttacaatcaattttattgtggtttcgatcagattgaaagccgccctttaaggaaacatcctctccgagcatctggaggactaaagtaatttctctcacaaaaccactgttaagtctataccgtacccagagtgtctgagcagtgatgaaagtgtctctctttctgtgcttgacagatactttgactatcttttctatgtggactttgaagcatctatggctgatgaagttgctcaaaacgcacttaggcatctcgaggtaaagcctttggtcacttgatctgaaaacatgtacatgtgactaagactctggattttgttattggcaggagtttgctacctttttgcgggtactgggaagctacccagtggacactacaatgctctaaacatttcaaacatcttcttggtaaatagttcattggtttgcatttcggatctgagttagtaaaattatatcaagtgaggtgaaatatttgaatagtttgtgacagagatccgcttgatgatatcataatcctggtataaggagctatatccctgaggtgaggtctgagaggagtcaccaccttacaagacattccgctcttgttacaaattctgtttagttttccaaaaaagatcatctttgtttttagtaagaatgtagtcactaagtcagatatcaatgacaaataccaaagaactagtgttttttcgtgtttcatccatacatagatacttatcctgtgtcttttttagaaatttctttttgtatgacgtttcaaaattttgattgactattgttagtggtatatctttgagttaataaacgagatataatctgttttcctgttcacaaaaaaaaaaaaaataaaaaaatcatatatcatccaattttcttttggttcagattttaaaacattgggaaaaatagggactagatgacaaataacaagaaatcagaattttggaaggattaaacaataatcgcttcttgtgcaataagccaaaaacaggattaaacagattcgctcagttctcaaaacgatgaaagtagcggagaagattgttttcctctggaatgattccgatggatttgctgcaaccatttctgatactttaaaccctagccctagttcccctcttcgcaaactgtaaactcgactcgtcctttctcgatttccgccttttacttactatctccgcctaacattgtaattcctgcagagaagaacagatccagcttccgttggataagtatggcgttgaaggtgtggaaaccggcgggagtatcgttcatttcgtagatgaaaatgaagtttatcaggttcctcctctttaaatcgcgtttatattctattaatcttcatagtttaattgagttcgtttctcgctttatttatagtcgttgtttgttcttagaactgaaattttattcagtgatatagttaagctgaagaatagtggtctccttaatttgtacaagattgattactttctgattagtcgactctgtttacctgcaaaatgtgatatgatgattggattcttaaggatgtgcaactgttactatgatttgtcttcattaaattgtatttgccgaaactaaagccttatgagaaaaaaaactaagtctctatatatgcttaagttagagtgcttagaggtgttgacttggctagtgaaaaagcaataacaaatgccttttcttcagtctgtcagctaaatggaacctaacttatgatattggactgtcttctaagcttggtcagattttggcccttgatgataatattatccccaaattggttatcttgcaacttgcaagacttgatatcatgttttcttgtttctctgttgaatgtgtatttctggactatgatttcattgcttaactttcggactatttcttatattgtttaaggtctcgatttttcttcttcgaagttatgagcctccagtactagtgtgtgctatgaatgaactgctggacctaattacaaggggatcgtcaactctacccacaatcatagctcctttctttgtggcggcatctaagctcaagttcaataacagatccctggaagcaaataacagaaaagctagtcttcattacgttcaagttgctacagaaacagagaccagtaggttatttgcttctcgcatcgagaaaccaccactatcgatgcagatccattatgaacctttgtcatgcttgcttcatctagctcgtgttaaacgcctgcctaccgctattctcataggccaaagaagcaatagcctaactcataaagctctagacgaagagcttcaggtaattttacttagtaattttgtctcagtttatgcttgtttttcgctggttgatttcagctgaataacgagtttgtgttgttgttgtcatcacaggtgatccatgaaacaggggagctcgtggctagttggacaggactgtctttctcaagagacagaatcaagtggagcgcatcaaagacatcaaaagaagaagaaagtccgtggcgtgctctttatggctaatcttcacaggtcaggtctttttcatggcccaacactgctacagtctttgcttggacctgcagtaaatttccctattgtagtagtacccttttgttaaaattcttatgctcagcagaaccaaatccacgtcactctgctttttctaggatatttatttatgaaagaaacagtttctttttttttgggctgacttggttcaaccaaatcttaaactctcagaagcattttgatttaaaggtacatatatttggtcaactcatgggaggatcataacataggagtgggattacttaatataatacaaatgattagagttatgattggtgggagaggcataaaaaaagagagattaaaattggtgtgaagtccataaaaggcactcatgaagtatagtaatagagatagttaatgttatcttaagagaaaataagtgaggtgtcgtcagctctgctaactgctaagccggttgtttaataataggatattgatgaagaagaaggaatacgatgttttgtaccaaagtttttcggatcgtccgagaatcttatcctactgacatttcagcatcatatgttattttttttgtttgttgtttttatatatcttgttcgatctttttagtgcgtcttatcgtcgccttttcgctttcattatcatttgattagatgactactattcacttatttgccaggcagatttgttaatattttaaccaattagggtctttgatcattcgtctttgattggatacatacgagtctggataaagagcaattcattttgatgttttcttaattgagaacgaaacacaatattaactcaccattaactaatactatattatatgagtttaaaaattaacacttgctcaatttcaaaaacaatagttttctgattaacaatgcatcatttcaattcgacttctcatcttgtaattataaactttgaactgaagttatgatcaattatttagtggtactaaatcgtatattcaataggaacttaaattgtaaacatgtgaaaacagtcagacacttaaaaaaatggaggtggggtttcatccaagacttaaccatcattctttcatatttggtctatcatgttttgcttttttatattactcaatttaataaatcgatatcgagtacccaagaaatcgaaataaagaaatgggtttaagtaaaccggtgaacaatattaatatgaggaaagaaaaaggacaaaagagagatctatcatattgatttcattatttttcagcgactttatgattattatttttatgaagaatattggggcaaaggctagtagtacgtagacgtagtgtgaaatatctttctggtctgaaagagttatacagacgtatctaacttggcagatattttttggttttcattcagttctctctcccctcaatgataaatatcattaatttattttatttgttctaccaaaagaagatatttttgttatatacgcccaccgaaaaatgaagaagaagaagatatttttggcttttgtaaggtcaaagcaaacagatttatcaattattattattattatctgagactgagagagagagagagagggagattttctgaattctgattcgtcgaaaagcatcaaaaaagtgaacgcttgagaatccattatggcacaaactagccacttggtaacttccacgtcgcgagtagattatcttcaatactcgcatgcgcgtgagtaaaaaacatacaacctttttttcttttctttctaatagtaatatctttaagaaatatccataaaaattttattgctttcactataaatacgagagggacccacaataccctacacgaacttttttgcactttttcgtctttttaattaataaaaaaaagaaagagaaggaaggaaattaggcacttttgataaatcagattatgtcagaagcgcctacatgtccctttgcggacacacccacccattgtctatccattcatttttttttttcatttcttcctccagagagagagagagaagccacaacaagaagaagaagaagaagaagaagaagaagaagttctggaatagtcatcatcttctctgtttctaggctttgtttatttgtctctaaagtttctggattcaacttctgaagaagatagtagtagtccacaagaaggatcttctttacgtgagttgtttgtttctcttctccctctgtcttttcttttctgattttaataatcccaagtgtgttcttattttcttgctatctgttgtataattggtgttagtgattgattattcattgtatatcgatgaagggttggttttgatttttgttgaattggatcttttgatttggggttttaaaacttgttcggatgatgatgattgggattgatccaaaagttttcgttatttattggaaattcagattttttcgattcagttccatttgaactagtaagtcaaacaaaatctctagatttactgatctggggtttatactttgaagcttgagttgttgttgttttattaatttatttcgattttcagtaatatccatttgtaggttttggtctctgactcttgtttataataaaagctctgtattgagtaaaatctcatgaaagtaggtttcctttcccttttttatccttctcctttggttattaatctcctacaacctttttttagaaattactacctatattcagaaagattccatctatttcttcttcaaggcttgcttttttgaaccaaaagtctctctctttttcatctaataatttgtttacttttttggacagcagaaagttgatttggtcagagccaaggaagatgggttacatgtgtgacttctgtggtgaacaaagatctatggtgtactgtcgatccgatgcagcttgtttgtgtctctcctgtgaccggagtgttcattccgctaatgcattgtccaaacgacattctcggacacttgtctgcgagagatgcaatgctcagcctgctactgtcaggtgtgttgaagaaagggtttcactctgtcaaaactgtgactggtctggccacaacaacagcaacaacaacaattcttcgtcttcttctacttcgccgcagcagcataagaggcaaaccataagttgctattcgggttgcccttccagctcagaactcgcttccatttggtctttctgtttggacttagctggacaatctatttgtgaacaagaactgggtatgatgaatatagacgatgatggtcctaccgacaagaaaacttgtaatgaggataagaaagatgtcttggttggatcctcttcaattcctgaaaccagttctgtaccacaaggaaaatcatcttctgctaaggtaactttttttctcaatatgttattacttttgcatccatggatatacatatctatcatttctttactaaattcagagttgttgtttgttttggtttaaaggatgttggaatgtgtgaagatgacttctacgggaaccttggtatggatgaagttgacatggcacttgagaactatgaagaactctttggtaccgcctttaacccctctgaagagctattcgggcatggtggaatcgatagccttttccataagcaccaaacagctccagaggtttttatccattaccctttcttcttagatttatcaaattggatgcatctctgtgtgattctaataatgctctcttgtttttgctcaatccagggagggaattcggtgcagccagcaggcagtaatgattcgttcatgagttcgaaaactgagccaataatttgcttcgcatcgaagccagcacattcgaacatatccttctctggagtcactggagaaagtagtgctggagatttccaagaatgtggtgcatcatcttccatacagctctcgggggagccaccatggtatcctccaacattacaggataacaatgcctgctcacattcagtaacccgtaataacgcagttatgcgttacaaggagaagaagaaggctcgcaagtaagtagtagtctgaaactgcaaatacatgagcatcattgaagtgagtgcaggattttcctaatgtgactctggcttcttttttctggaaacaggtttgataagagagtgaggtatgcttcccgcaaagcaagagctgatgtgagacggcgtgtaaaggggcgatttgtcaaagctggtgaagcttatgattacgaccctctcaccccaaccagaagttattgaagactccttttgaaaggtacatagatatatatacatggcgaagaatcgaacaagaaaggttttgacttatgggcagtttcaagtgagcaacttggaaaattgtgggttagtaacaaaacaagactactgtagcatgaacagatttcaagactgactcttgtaagcaatcattcattcttgggattcaatcgttttttttggcctcagaagcttcattcttgaccagagggattattctctgactttccttgtccaaactccggtttcttcttcttcttcttcaggcgtctcacactgatcagggttccatgaattttgttcttctcttggtagttaaaaaggcagggaaggagatttagagtaatttaaacaatatgtgattgttgtatatgcctttgtatttgtttgtatactcataaatgtttttctgttttgtactcggcattcttgtaaattaaagacattatccacattcttctatagacaaagaaagttatgtggtaccacttaacctaagtctcgttctgtaacaaccgactagtactagttcaagtttaacgagattttggtttgtagtaacttcaagaggttgatccaacaatgaggcaatgcaaaacatctgaactttattatttaaatgtcagattataaaggggagtccatttatgtgagtttaggcgctttatcgctgtttacttaaacttagcttctactatgtcaattttgaacacttatcaaaagtgattgagatgcaaaacagtagttttcaagatgacatatggaccaaaagtttttaacatttatatttggagtatttcggattttacaacttaatgtgaattttcttgaagactcatattcacaagccttaattttcgaattgaggaataaacattcagagaaagttgattcgcgagcaagaaatttgtccaatttgattgctgactcggatttgaaaacattgaccaaaggctaagaaaagaaggaagagaggaagagtcttcagatacagactcaggtagcaaagttcttgtcttagctcagaaacttaaaaagagagctaaaaaagacctcttaaaagctaagaaagaaaaaaatttgctaaatcaaaagaaaaaaaaaaagatatagaaaacaccaaaacactggtttcatacaatacctttccctacccttatgatcattctctctgtaaatctccttcatgcttaagccttcaacttcatagcttcatctctttggtaatttgttagatggcacacacacacacacgcaagtcaacaaaaacccgcacccatatatctttcctgatttctctggaatttgaaacttgttgaatcttcaaaatctttttctcctttatacttcctgtttcagtaattacttggccaattcatctgtgtttgctgaggctgttggaaaacgttaggcgcaggtgcaaccatttcagctccagccacaccttgagactgttgtaaaagcggatgatggactcctgttgctgttactgcttgtcccggatggtacatacctgggaatgcgacgtgaccagcttgtgctggagcataagtcacgtgttgcccatggtgctgtaaaccatagaaagagcttggcacatctcgtcctggtccagtaatccatacaggtaatgcttcactctgcagagaccccacaattataaattaatcaggaaagggaactaaactttcaactgagttggttttgggagggagagggaatatgtacctgttgccctgttgtactgtagccgttgttttctttcaactgcaatgagttgagatcctcattggaagtcgaattcccggccgatgcagcagaggtgggattatatcctgctgggaaagacccatatgttggtccatacccaccagtaataccgacatgagtcatgtttcctgtattagtcccaggcttgtaatgagggagtgtgtatttgcctcctgttgcagttccaggaggtggaggatatacaccgcttgcctgaggttgctgagcatatgcaccattgcttaagtattggtgcattgtagggggaggtaaatagaatggggagaagtatccatatggcacgtagtttggtggataatgcgacatatgtaagcccggagggcggaaaacaggaacaggctgctgcgtgacaggtatagagctctgcattagtccagcagcttgagttaccagtggtggtggactagcagtagacaggaccaagttatttccaccctacaaatcaacatgttcaagcatttcagaccagaaaagtaataataacagctatatttttatctttcaaacgtgttatagggcttctgaacatataaatatgcagtccaattagaaaccataggtttacttcaattttatcaagaagaaaaaatgagacttagatccaagtagctgacatgaaaatttgactatttgattgatgatgctactgttggaagattgaattaaacgaaaaagtctcaaaaccatcttaaattagatcaaaatcgtgaaggtgtgaattataaaataaaataaaaggttaacccccaaaaactacactaacctcttgcatggtttgagatgaatgcggaggcaatactgtaatcccattaaatttggaggcaacccctggggaaacgaagggagaaacacggccatcactgtcaggacctgagcggtagaactgagcatagtagctcgccgtatcaaaaggttgttggcccttcaaacaacaaaagtatagttcattacgaagacatattagaggtgacaatgcctaaaaattatataatgagcaaaatgttactgatcaatgaagagtataagctaagtataattaatggtttaagtagatcaaccattcgaaaacttgacaacttaatgtaattaagggcataccataaaactgggaagacgaagggcatcacgtgcttgagggtcagaagtctcaaattgtggatgctggttcccaggagctggaggaacaatcccaataatattacttggaacctggtcaaacgagttttgattgctttcggactccaacatattctcctgcttggtgacatcatactctggagctgtatttgttgcagtattaccttcaccagccatattatctggaacttgtgaaggtgactcggagtaaacattaccgtcctcttctttttcaatcgaatggacagttgggtgcctgaatgcataaaaaaagtttcgcttagggactggtcatataaatatagttatatttcaagacataaagttcaataactagaagtgaaaaaatttgggtttcgtgttcggataagtgttcataatgtaaaggttatcatgacttccagaaaatcagtgactgcacaaaatgttttactttctgtttggaacttaagagccaagcaggacaaagagttgtttctatgaacaaaacccacttaactattgacactatcagttcaactgacaccctacacagcatgacaaaaagatatatattttgttgacctagaacctgatatacaccgtagtgctttggaagtttcggctatgctactaagcaaaacaagcgactacactaggaaatttctcttacctatttccatcagtaatctattattcacaacttctttctagctcatttcactctaaatttagagtatttattcgcataacaacatcaacaataattgacaaagtagagaaaggtagatacctaaattcctcctctgcaaaactttcttcaacttcctgcgaattatgagaaagaggtgcagatctcttttcactctgaggaaaggctactgtgctagacgtaatagaaaagtcagcatcaaagcttccaaagcttaacttggttcgttcagcctctggaacaagaatatggtttggaataataacatgctgacgttgaatctgcaagtcttcaagctgtctctgcaatctggatgtggcttctgccgaaggggtagcatcttcaactgatttgtcactggcttcagtaggaactgcaagagtttcacctgtagatgatgcaccagagccctgggtagtgttatggttcactactggcttcggtttccattccttaatggaaccagcacctagaaacaagtatcattgacataaagatgtcagaagattccagtcttgtgcaaataaaaaaacaaaagaaatacaataatgaagaactgcagcagacaaaaagtgtttcctgtaaaagcaagtcccgctgtatgcacattttatcatctggaatatgtactatatgtttcttatcacagatagtagaaatccagtacagcaaaaataaatgtatcactgttacctctttgaggaccgacagtctgatgtgaccgattactgtagttagaagaaggccgactacccgtgctgttgctatgagatgaagcaggccttgaaccataagtatcattcacggcagtcttcccaaccccacgggatctggtatgggacttgctttctccaatgtgctgttcaggtgctgtttgctctgatttgggatttgaagatgtgaatcgaacttcagaagaggatggacgagggagtggcagagaatcaactgccttctgctcagtatgcacaaccctagagccaactgctacacgatttttgcttaattccacagaagacggtgcaccatcaatgttgtttgagggcactgaagatcggccagctttaagttgacctgaaccagctggtaggttggaagactggcgaacatcagagcttcctgatttcggaccaacagtacttttatccatcacagcagaatggctgtaaaccaaaaaacacaaaacaaaaatcatgagaaggatcatctatagagtatatccatgctggaaaaaggcccacccatctttaactgagggtgttatacatccacctataagtcacatagaatcaaggagaatgatacataaaaggaattagtactataggatgacaatcaccttgagaccagagctatatctttcgtttttatctcttgagaggttgaagttgatggatcaataacctgctttggaccgttttcttttttgaaagaattctttgcaccagcaacatctgatcagaagtaaacattcaccacacagttcatcaattacagaaaaattaaaaagcaacatgttacagactgccgctagggaactttctctttcacattctttcgctaaacatactaaaagccaatcatgaacacaactagtatgtcctaggaggaaaatcaggaaagaatcaatactgagtaaatataacaaaaagtattgtgaccgcaagtaaccaccttccagagacaactaatgtggcatattaagagatgcgagttcatatgattgtaaaacattgagttcatcagattgttatttaccatttgatgcatgacgagaagagaaattcatccgaccacccctgctaccacggccccctccaccagatctccattgtgattcagcagaatccttgttgttgatgttctgtaccatttcaataacattgtcaatacccatgtcccaaatatatgcggtttaatagacatcctttacacagaaacccatgaagagaccaaaagaactgcaaaaaccccatacctctttcctcttatcacgcttttttttaacctcatggaatggatctgcagagtcataaacaattttttgcattagcacataagattgtatagaaaaacacaacaaaaaaaaacttaaaacatatcctagcaaccatctctaaattacatggtacacaagcaggttacatgaagcactcgaaaagcctgatgcaataccacatctccaaagaatcctattttcataacaatttgttttggtaagatgatgaaaatgtggatttctaagcactagattcatctacaacgcagcagtctttgtttagaactcatacctagcaaaagtattattcctagacaaaccactcagaaaaattctagttagaagctaattctctttgtttcacacatcactagtgtaagtaattgattcccgtatattccaaatcaattcgtgaacctttttttgtgaaaaggaggttacaacacaatatcacataaacaactagagacagcttaaaacttaataggcgaagaaaccgatgatagtgaattcagataaaatctgaaaaaaaaaaatcaaagagcagagaaatcagatgctaaaacctaagttacaggagaaaaccccaaatcgaaaaatacaatctcgatccaatcaaagaagagaaattaggtaaagaaaaaagtgcagagaaggtcgagattataccctgaagaagtaagcgttgagcggtctcatcaggatccatgttacattcatgaagcattgcgataatctcatcctcgctatagttcccagcagtggtctccttaatgttctgaatcatcttccgagtagtagccgaaatcgaaaccctagcgccactgccgaccatcctctcttctatcaaacgtaaaatctcgcttctgatattttaacaggaatcgaaatctggacctagaccaaaagaggtctgagtacctatatatgtatacgaagaggcgagtgataaatcagtacgagaggatgggatttgaaactagtttgggtcgacgaaggagaagaagaaagaagaaggaacaagaaaaaaaaaaaaaaaagaggaagggggcgagagaaaggaatgagcaaaataatacgcactgtgattttggaagcgtagggctctcttttcttttttcaattttgttttgcattcctttgtagctttttaatattgagtttttttgtttgttttaatctgaatctttggtaaataatgataaccaaattgttgtcacaatctttttttgtccacaaatatatttaaattaggatttaggatatcttctgaatatttacactacataataatgacaaacataaaacatagtatttaagaaaataagaagaagataagttttgattgtaacttgatcatattaaatctcaactatctcaaacgatgttacccatatcattatgagatgagcgatttaatgattagcatattattatttatatttttacatctcagtaacgtattattgttttctatgtaaatatttaaattatcaaataattataatacgttattattatccccaccatgataattacatatatatttaatttactgaataagtttattttttttgtctttggtaatttcttttacaataccaaattaaaatattttaaaaattggatttcaaaaacataatgagttatatggttgtccaaatatttaccaggtccagtacgcttttagcattattaatagcaattagcaactctagggattgtcatttacataaacaaatcttcaattttttcattaattttcctgtgttttgggtccctattgcttctaaattctaataaaccgtccagatattgctgttatggaaacaatttttcaataaatctcatcaactgattctatcaaaatctaatcactaggctttttcccattagcattagcgcataacaaagttttgaatattaatatcattatccataggcagcttagattttttttccttagcatcaaattaaactcaaaaccgaaccaaaccgtaaatccacaaactaattttggttcgaatttaaaaacattatcttttaattttgtcatgccccctctgctaagtgcaaccattcgtcttctcgcttcatcgttttctcttttccgatggcaaaagcttgcctcttgcagtctactctactcccagcttactctccacttcacaaacttcgtaatcaaaacatcaccctctctttctcaccgcttccgctgtcccgatgccgtcccggaatccactgctcagtttcggccggtgagactacaatacaatccatggaggaagctccgaagatatcatggggatgcgagattgattcacttgagaacgctacttctcttcagaactggctctctgattcaggtctccctccgcagaaaatggctattgatagagtcgacatcggtgagcgaggcctcgtcgcttcacagaatctcagaaaaggagagaaattgctcttcgttcctccttctctcgtcatcagtgctgattccgtaagttcacactcctaatttcactcggaatcaaagaatctaatcttatattccttgatctcacttgcaagcaatccctcacctcttgttcagatcaatgcaaggttaaagtatctggctttcatgaatgtgaatatctaatatcggagattgggttttaggaatggaccaacgcagaagctggtgaagtgatgaaacgttatgatgttccagattggcctttgctcgccacttatcttataagtgaagcaagtcttcagaaaagctcaagatggtttaactatatctcagctcttccccgacaaccttactcgcttttatactggtaagttttgtacttgtttctgtagctgaactttggtctcagtttcttactccctacagcctttttgtactatttcaggactcggacagagcttgatatgtacttggaagcttctcagattcgagaacgggcaattgaaagaatcaccaatgttgttggaacgtgagatattgttctttctttctttctttctctcaactgctggaaatcattgatgcagtcactagtacttattgtttgtaggctagggggttgatgattatgtcttgcaagacactgctcatgtctttttcctttttcttttcctcagttatgaagatctaagaagcaggatattttccaaacaccctcaacttttccctaaagaggtaactggtatacgcccattttgctacagcttactatttggacatgtaataagatgcacttctgtaattacaactagtgttggttctattttattatctgagcttaaatttgttttgtccacatgtatatgagtgtgctatttcttggttgcaggttttcaatgatgagacatttaagtggtcttttggaatcctattctcacggttggtaagaactactgtatcataagcaatcattatcttgataattgatgtaaatctagatgtcttgaatttgaaacaacagacttgttctttaatcttagcatgactttctgcataatatagctgtctccaacaatttattgtttgaacaatgaccactcacaaccaaaatattgcattatttcgtttctctttccttccgtgtgctgcgtgcttgtctctgcaattcagacttaagcttctctaacacaggtgcggttgccttctatggatggaagatttgccttagttccatgggcagatatgcttaatcataattgtgaggtacttctacttatctttatgaccaattagctcctagattctcctaatcagaaagcatgattgacttatggtaatcaatatttcaaaatctgcttggaaaggttgagacgttcctggattatgataaatcttcaaaaggagttgtctttacaacagatcgaccatatcaaccaggtgagcaggtaaataagataaattcattcagataacctgagcgagcattgaagtttaatataagtcagtgtataacacaaagaagtcccgtttacacagtttgccttttagcgcttcagtaagtcagtccaaagtggaaccaatgttgtctgaagtctctgatatgtttcagtaacatgacattgtgcaggttttcatatcctatgggaataaatctaacggagagctattgttatcttatgggtttgttcccagagaaggaaccaatcctagtgattcagtagaactagcattatcacttaggaaaaacgataagtgttacgaggaaaagctggatgctttaaagaaacacggattatcgacgtattccattctccaccatccatgttcccctctcaaatttgtagatctctcttgattaacttgagttttgttttgattgtttgtgttaacttttctctggcagacctcaatgctttcccgtaaggataacgggttggccaatggagctaatggcatatgcttatcttgtggtgagccctccagatatgagaaacaactttgaagaggtttggcaactccatcttgaccctttttaccatccaattcttcccaaattcataatacatctcttatcaattattatccatttcagatggcgaaagctgcttcaaataagacatcaacaaagaatgatctaaaatatcctgaaatcgaggaagacgcattgcagttcatactggactcatgcgaaacaagcatatcaaagtacagccgatttctaaaggtaagtaacaaaacagctcatctctctctctttgtgggaaaattttcactccatctgcttatagtttgctttgtcaattatctaattgtaggaaagtggatcaatggatttggacataacatctccaaaacagttgaaccgaaaagcgtttctgaaacagctagctgtagacttgtccactagtgagcgcaggatactgtaccgtgctcaatacgtaaggaacaactttctagccaatacgatagataagagtctgtggatcgatccatgatattgtggaatctgtgtttttttttttgttttgtttgggtcagattctgaggaggagactgagagatatcagaagtggtgagctgaaggctctacggctcttcagtggacttaggaacttcttcaagtgaatgttgaatgaggacatttcaacagctttaagatggatcaaaggtaggcctcgttgtgcttcaaccaaaaatgtagttttttattacaaaaaaattgaacgttggtgtaggcatggttggatctgtctcactcgtataggaatatattggtccagccatatatgtaatttgatcattttctataaactcaaaacctgaacctaaattgattaattaaggaaacgcatgagagagtaagggtagaaacatgttcttcgtatttgatccgaatcgaactgaaataatcgatccaacaaacaaagataatttgaaaattaagaatatatctgactacaactcataacgaaaaccgtaccaaaactcacactccttgttaccgcaaacaagataatctgatggtacacgtcagaacatttgtttctttagcaaagcaagtaaacattccactgtggcaaagtaaaaaacgagaaacctataaagtcttcctaatgaaacgtactgattttatggagtttccattttcgacataatatgacgtggcaatatctaaatggtttaaagatgttttatctccaatgatataacgccacgtaagcccgctgaccaaataacccaaagagtaagcaagcgacgtcgtttatagtttgatgatcttgtcgggtaacgaaactgccccttgagtcaaaacaggcttcttcgtgtccgattctgaacgagctcgctctttctcatccaattctctccaccgtcttctactccgatcaatcttcaaattttcttaacactcatcgaccagatcgagtttccatcgatctaatcaatcaatcatcagatttgatcttctcaagaaggtaaatccctctcactctctgtgtcaaacctaatcacctcgtaggaatcgaaattggaacaattcaatttggtttggtttggaatctctagtcgattcttcttctaaacgattgaattgcgttttgtgctttgatataattcgaaattattgtggcagatgagcttgaagggtacgatcgtattactagggctcttatggagcttccaggctacgttagggattagattcgtgatagaccgtgaagaatgtttctcccacaaggctgaatatgaaggtgatacgcttcatgtctctttcgtcgtcatcaagtctgactctcaatggcattttaacgaggatggtgtagatcttgtggtatgactttttttcttctaattgaacttttctacattctacattgcaaaatcgtcgaaaatcaatagaattggtattcctaaacaatgcttaggatttccattgttaatgttggtagataatttgaagtatgtattgataaagaatttggttactctttaaagctgttatattgtaccatctggttaatttggtggttgttgttgttgttgatatattttggatgcattttgaatagatacatggcccaacaggcgaacaaattcatgacttcagggagcagataagcgcaaagcatgattttgttgtccaaaaaaaaggggtttacagattctgtttcacaaacaagtctccttatcatgaaaccattgacttcgatgtacagcttggtcactttgcatactacgatcaacacgcaaaggacggtaaggattatctgtttagttttgtttcagtttcgtttggtgatgaggtatttagctgaagatggtttttgtgcagagcatttcactcccttgatggagcaaatatcaaagttagaggaggctctttacaacatccaatttgaacaacattggttagaagctcagaccgatcgtcaagctatcggtaacattttttcctctaaaaaccacatttgttgttctcacttcaatattgagtgatggtttgaatatggttgttccttgtgcagtgaacgagaacatgagcaaaagagcagtacacaaagctttgttcgagtcgtttgcactgattggggcaagttttctccaagtttatcttctgcgtcgcttgtttgaacgcaaactcggcatgtctcgtgtctaaaagtatcgagtttattatgactttgaacttattttgccttaaaatgtaccagggaatctttacttaaaacctttttacagacagatcgtagttcattggaagatttgctttctcccatgttcaagaactaatcctctcgtgatgataattcttttttttctctttattaacagacaacttttccacaagctaggttttcatttcaatagagaaaatagtgattccttaaaaccttttttccctaaaacaaagagaataacaatgtgatcaagctttgaataagacgtgtcaaaagtactcaaaatcccttaactggattcgaactcttatagagaaggttataaaagtggacactagactaagttagttgggcccagagtagatagataaagccagctatcattttcttagtcgtcgtacaagttacctgaaaataaaataaaaacacaaactttcctgaaaaagtcgtctccagttttaagcattgataaatccgacaagaagtccgattttgttccatagcttgcttgtgtttttagtggattgagtcactgaaagagaaatcataaggctttgttgatgatggatcatttggtggagacgaattcagttccgagcagattggtggaagaaaggcttgatgagattcgtagagtaatgggtaaagctgatgacgacccgttaaggatcgttggtgtaggagctggtgcttggggaagcgttttcattgcaatgttgcaggaaaattacggtaagtttaggggcaaagttagtgtgagaatctggagaagaggaggcagagcaatcgataaagccacagctgaacatttgttcgaagtgattaattcgagggaagaattgttgaggaggttgataagaaggtgtgcttatctcaagtatgtggaagctagattaggggatagggttttatatgctgatgagatattgaaagatgggttttgcttgaatatgattgagactcctttgtgtcctttgaaagttgtgactaatcttcaagaagctgtttgggatgctgatattgtcatcaatggtttaccatcaactgagacgtttcaggtgttcaatgagattagtaagtattggaaagagagggttaatgctcctgttattatctctttggctaaaggtgtggaagcagagtttgagcctcatcctcggattgttactcctacgcaaatgatccatcgagcgagtaaattcacttcccattgtcttttatctgattgctagatgaatatttgatatcatcttccttagtatttttgttgatgtagagaaactttctatttttattaaggttatatgagtattgactgtgttggcgttgaagtgtatgatcagtagttgttgtcattggaaattctacagtttgcttgtcatattctctttgcagctggtattcctcttgagaacattctctaccttgggggacctaatattgcttccgaggtatacaataaagagtacgccaatgcacggatttgcgggtctgaaaaatggaggaagcctttgggaaagtttctaaggcagtctcatttcatagtctgggataatagtgacctcattactcatgaagtaatgggtggcttgaagaatgtttatgccattggtgcaggtaagatcaggtgtcttaaatggttatctgaataatagtgattcaaagtaaattactggaactggtgatcagaggtcaaagtttatgagctagtgtttgttttggcgtttttgtattccacaggaatggtggctacactgactaaggaaagtgctaccagcaaatcagtgtactttgcgcattgtacttcagagatgatttttattactcatttattggccaaggagccagagaaactcgctgggcctttgcttgcggatacctatgtaacattactgaaaggtcgtaatgcgtggtacggccagaaacttgcaaaaggagaacttagccttgaaatgggtgacagcatcaaaggcaagggaatgattcaggtactccatatatctcaatgacttcggttttaagtgttaaattagccttaaattatgtatgtttgatattgagaatttgtcgaatttgtaactttcatctgagtcgaaatagcaagtgtccataccagcaaaattactaagaactttgttctgtataatgtaaatttatgttcacaaaatccagtttatagcataaaacagtaaagagtattgcacatttcaaagaaactaaagaattttggagattgaatctaaacgccactgagaaaatacaaaattctgtcatacactgttgttatcttgtggtcctagattatttatatgaaaggctaatgatgaagtgctttggatgatgtaatgttcatagggggtttctgcggtgaaagcatttttcgagttgttgaaccaatcctcgttaagtcttcaacaccctgaagagggcaagcctgtaactccggctgaactttgtcccatcttaaagatgctctacagaattcttataacaaggtactctcatctctttactgggtaaataacatatcaacttggacctcattcataaacatgattcacaccttgatgatgtttttagagagttctcgtgtgaggcgattcttgaggcgctgagagatgaaacgatgaatgacccacgtgaactcatcgagattgctcacagccatctcttcttccagccatggcttcttggtcagaaaccttgagcactttcttctgtataagttcccctgctaggctttggtgcagacttgtttgtattttgaagatttatcagaaatacgcagagtagataagagttgtatacaatttatagttggagaataaaagttgtgtactttatagtgaaactcagtctcatattatatctttgactttcctttccttagaaacagtttttatacaatttataaatattgtgtatgggagctaaagatacatgctatacctatacatcacaaattctatatctgatatttggagctttaaaagaataaactatccaccagaccaccagtcatcatcatatcatcttctcaaatttatcaagcttatttaccctttgcatagacctcagtaccaataacatgaatatccctgcacacaaaagaatatttatgaagcttatgtatccttgtcatagacctgaaatatacctgcatatacatctacatgcacgtgtgtacaacagctttgatacctgctccaatgaaggatccattggcaacaagctgacttccttggttgctaaatgtaaccccaatattaagtagagttcctccaagaactgtatacatcgtcgccatctgcagtattgtcgctttccgggctgctctttccgactgaaccaatacgaacaaacaaaatccacaatgggtatctattgctttacaaaaccatgacaaagcttatttactttaataccagttctgtcagggtgattagaccatgaaaaaactgctttacctcaagaacccgaacacggagtttcagatcgcctgaatcgagttctttcacaaactcttctattcgctgcactcgatatggcatagacagagtagaagacctggcctgtacaggttttaaagttgaatttagtacaaatagaaagaaaagaagaaaaaacagagaaatgaaataaaatacgagggaaaacattacatcatcagcctgctttcttatttcttggacaagctgagttcccgagcgttgcctttgttttagatccaggagttcctgtttttgttgatattcatgagaattgacacaatgataaaaaaagagtagactggcgattgcaaaatatttgggtttcgagaagagaaaagaggtaagaacctgcgcataaggagccgcaaccttcacaaaggaaaattctggatcaaggatgtaaccaatacctgcaaaatcaaaagcataactgatgagacttgtggaatattattacaaaaagaagataaaagaacagattgaataggcaccctcaagtgtggaaaatgctcggatgacaaaggtgaaagttgatgggaaacggaatggctgatcctgggaaattgcaaacagatcctgccatagaaaggaggaattttttaatgtaagaaccacatagagatagagctcagcttctttttcaggtacagttttgatcggtacctctccaatagctgccaaagtctgttgctgatctggtgattggcttaataggttgtccaagaaaaactgaacagatctccttacctaaaacaaacacgtataaagttgcaatgagattacatatgtaaacttcgcataaataaagagtgagactgtaaggttaccgatgaaagatctccagtgggttgaagtgcttcaaggtctataaggttttgcatgacctgtaaaaacattgagttagttttcttattttcagattgagaattaacccttgcaagaaaaaattaccttttttgcatctttttcataaacagaatagaagagatcaagtaatctcttccgagtaaatgttttgatctctcccatcatgccgaagtcatagtagatgattgattcatctacatcaattgcaaggtttcctgggtgcggatccgcatgaaagaagccggttttgagtatctaaaacagccaaaacatgaacataagtttgaaccataagaaaaaaaagaagacatggacttcaagaactgttttgctatcttgttattgacctgtataagataagcttcaatggcccgtgatgcgattctagaacggttaaaaccccgtgcagctaaggcgtccaagttgttgatcttaacacctaatcacagaaatcaatgagtgtttataccgctacatactttatcaaacgacaccaatatattgggtagtttcaacacgaacctggtacatactccaaagtcaagaccttcatggcagagtaatcccaataaaccaactacaatgaaaacgagataaccagaatgagtttcatctatcccacaactatacaagaacttatctcatgggggttttggtttagcaagttaaacttacaggtacgcggacccagtttatattccggaagtctctccggaatctgtcagcgttcttagcttcgtttatgtagtcaatctcttgatacaaaattctgaaaccaaaggaaatatcagtcctacatagcctggagccacaagttataactacgtcttgggaaaactacttacaaggcacattcttcatagataccaacccaatcgtttgtaccaaatgattcacttttctggaaatactcggcaatcagcttcagatttcctgataaaataaattacgccattttcagcaattctcaaacatccatgcaggtattctattatataactcagaagttgttactacatacgtagatcaatatcgaaaagtttctttagtccgggtctttgtacttttactaccactttctcgccattgtgcaaaacagctctgtgtacctaagggaatacaatttgaaaaattatgatacaaacatcaatatctagatgaattgcaaagaaaacgataagcgagtaggcgttcttgagggtgttgctaagtattagatacctgaccaaggctagctgcagctatgggttgctcttcaaattctttatacattacactaataggagccccaagttcagcctcaatgaagcgctttgctttctctggagaaaaagcggggactctgtcctgaaaaccagtttaagagaacagtaagaaaccaaatgcataatttcaaaagtatgaataaagaaatagcaaagtacctgcaacttggaaagctcatccacgaattcgcgcggaaacaagtctgacctagttgaagacaactgtcccagtttgataaacgttggaccaagctgcaatacactctctctcaaccatgaagctgtttctcttcttctgcttttctgattatataacaacaggtgaaattaataagaatcaggaccaacaaaacatcaaccaatgaatcatttaaattagactaaaatgatgaaaggtttacctgtttttcttctgtgaatcctccaacataagcccatttcgaattatcgaacaagatacgaatcctcagggaaataacaaatgaccaaacatcaatactgcgttgaagtgagctataattctcatcagcccagctaaaaccttcatcagaaggaagaaccctaactccttcaaccggtggaggaaggtacgattctgttgttttctttggtgccttaaccaaagttgacgccgcaccattaatgtttctactactaaccaaactcgctccattaacacctttcccagccgatccattcacaccatctttcctcttcaccacctcactcgcaggaaccattttgactgaacgtccattgattccaaccttagagggcaattccgactgtctcatctcaatacgaaatctcttagacttgctgccataacactgagtggcttccccagtgaaatgattctccaaagagctactgaaaccaatagctttggtgactcttgcggtctcaccgccatagcagcagctctgagaagctaataaagccgccatttccacctaatttacaagaaaccaattgaatagacacaatcaaacaacaaaattcaataagctggattcataaaactggaatgcattggagaaaattatgcggcaagcatcatttgtataatctaaagttctaaactataaaagtatgaccaacacaaaatttctagtgatagaactccattaaatcatacttgagcctattcaaaaccatcgagttcaacgacacctctaaattattgatttgataagagaatcacaacgattctcagccatgaaaaagatataaataatcagcgaacattaacacgtactatagcaagaggaacccaattttactacaacccaaacctgttctgaacctgggatacccaaaagtaattaagaaaaacaaaacaaaaaacagagtagaaattaagaaaaatggaacctttatcaaagtcctgaattgggttgactggtgagacaaagatcaacccagacccagaaatttcgtagcaggaatctgtagaatcagctgtattaagtagaggaatttcttggaacagagtcgagagagagagaggtaagaggactaagttgcgtaatggtgtcgtccttatgactaatgagacgtgtgttgttccaccgaattttccaccttcctaccaaaatcaatattgagactttgtgcgtaaataggaaaaaaattggatttgataggacagggaaaataatctttgtaacttttagtgccaaaattaagacaataagagttttggaagatgcgtgtccagcttctacatctcacgtttattgtgtggacagttcgaaagagagtgttgagcatcttttctaacaataaaattaaaaggatataattgctcgttagtaatccacttaaaggggtttaaccaatttaaacggtaaacttttttaagagcaagcaaaacaacaatggttcatttcaaaaaggaaaatgacaaaactacatattaacatatgaacaaaacttgtgacgcttcaccacatagtttggcttctacatgatcggatcataggcagctccaaaaccgaagttccacccacccagactactattggaagtcattactctatcacaaaaccattcgtctagtttcttcttcccaagtatgaaatgttgcatttgcgagttcggctgaaaacgaatatttcttgctcttcagtagcgcctcctgagcaagtaatgacttccattcaccgctcaactctttcctttccttggctctaaggctcctcaacttctgtaacatctgcttctgtgcatagttgcttaaatgctgaaacagtgtcgtctcaagcgcatcctgtaaagcgcacagctcatcagcagcaccatcttcctccttctccttctcattagcctcattctccatatgtttgtcaacattttcagaaggtaatttgtcatcataagagtcgcctttttttgcaaatccatcaccatttccaggttcactgtttgtcactgcttcaactacctccctatccttcccaccagtctcattctccatagttttgtcaacattttcagaaggcaatttgtcattgctcccatcaacacatcaagatttatctttgccccatatcgccatggacaagtcaaaagcttcagaatcttgggggttactaaagctaggcagcaggatgaatcattatgttggaccgttagtcttcttttttttgctttcataaacttgtaaaaaataaataacctcttgtcaacaaatttcatttacatactccaagcccgtgggccaaaaggatcgtacggagccattttttgttggtccaagactccaagcgaagaagactatggacttcttgtattattagccaaaattaaaatttgaagttaggtaacaaatttatggatttaggaaaatacgtttataattgtattttcttatttagacattgcaaatcccatgccgttttcttttgttgttttgtcaatttcatgccgtatgattaaagtttacaatgcattttgtataagacaaatgctttttgataaaagaatattaaggtacaaaaaaagaaaaggaaggtaaaaagattcctttttccctctctttgggccttaaatagagacagagaccgaaagaaagaggagaaacctcacacaaaattggtcctaaacgagtctccttcagtcgtaatttgcagcagagcaacgatggcagcgactccaatggaaggcaaatgggttcaggtcagctttctcgcctttgtgtttctcttagagacgaatctcgtttcatcggatattacttgtctcatgttttcggatttttattgaatcgtacgagactttcggcttttgaaattctaatttcgttttggaatctgtttattattctctgtaaatctgtccaagttctctgttagattgctgatgtgattatacacttaggttcaataatcattttggttctacaacgaatctcctagtttatgctttctctgatcaattttggatttgtggatgatgagtttgtcatttattgaatggactatggattattcaccggcagagttgttcatatcatgttgattaacagtttactgatggaggagggtttaattttgtaatcatcatcacatataagtatttgaattatttatcttgtgtagacactattggattagtagactatgactttgtcattattcaattgactagtatttgtgaatgctgactcaactctttgtttctttctcattgatttctgctaatactttttgtaatgttgattataaaaacattgtaagatttagtatttgagtaatttatgttttgtgttatttgtcattcagcttaaacagaaaggaaccggaccaggagcaagaagctctcatgctatagctcttgtgggaaacaaaatgtatgcctttggtggcgagtttcaaccacgtgttcctgttgacaaccagctctacgttttcgacctcgaaactcagacatggtctatccaggaagcttctggggatgctcctcctcctagagtaggtgtagccatggctgcagtcggacccatcatctatttctttggtggccgggactcgactcaccaggagctcaacgagttatactgttttaacactttgaccaaccagtggaaactactctcttcaggggaaaccggtccacagaaccgaagctaccactctattactgcggattctcagaacgtgtatgtgtttggtggatgcggagttgatgggcgtctcaacgatctatgggcttacaatgtcgttgatcagaaatggattaagttcccatctccgggagaagcttgtagaggaagaggcggtccaggactcgaggtggttcaaggaaagatctgggtggtatatggattcgcaggagaagaagcagacgatgtccactgtttcgacatagctaaaggggaatggaaagaagttgagacaaaaggcgaaaaaccgtcagcaagaagtgtgttttcgactgcggttgttgggaaacagatactgatatctggaggagagattgacccgagcgatctggggcatatgggagcaggatgtttcacaggtgacgcttatgggcttgatacagagacgctggaatggaggaaatgggaggatggggttggatcggtggagcatcccggtcctagaggatggtgcgcgtttgcagctggatcacgagatggtaagcaaggtctgttggtttatggcgggaactcgccgagcaatgataggcttgatgatatcttcttcttcactcccaacactctactcaagtgattggtaactaagtatggtttggttttcttgccggtgagaggggctgtgtgaatgttcctttttttttagtttccttttggattggatgaactatgaagatgtgtgatgtgtttcattttcctctgttatttgtaattaaataatcgaaatttttcattaaagaagataacgaataacatcagcttaatggttattttagcaactaaaccataatagagatacacaactaaggatgagagcatcaatggaagctttgaattctatttattacccactcactctctgtctcattgagtcagtagttgataggtatttaattgcaagaatctctctatattggcaaaaacaaggtcaaataaaagtttgttttgcgaataccaaatccatcaaaagatacattggtttaccttgcaaaattattcaaaatatctcgttttggggaaaagatgttgcagtttgctactcacacgacacacaccaacctatatttaatactcactgaacaagtaacccaatgcatgctcttgtttcccacactcccacaaatcataaaatacaattatgttattatttcgtatatcgggttattatgttatttttaacttttatttagttatgcgatatttccttatttctaactcttaaggttggcgaaaaaggaaaaaaaaactcttaatatggtgagaaaatatgaaatatatgacgtggattttccttaggtctctttaactattttgtctgataacaataattggtttatagctttggcgtatagcctccttaagtgttatctcacgtctcttcatattctgcttctctcagaaatttccttaattattatagcaaaatttgatctgcatttaaaccctaatatttacgttatatcattaatttcttcttctttccgtttcttattttaggagaataatttgctcagtttagtgttcacaagcagagtcgctctaaacggtatgctcgattctgcgtcctttttttgctccttctatgttttatctttctagctttcatagttttttttttcctgcattatggtttcagcgacaacggattgatcgttttagggtttttacttccataattatttcctaattttttctatttttaatcaatttaatagagtgttgattgcgatgaagaagaaagccattgtgattgatgatggatatacaaggtttatggtgaatgaaatgtctgaaaaaatcgatgttccaattatctgtcttgacgaagatgatgatgatgatgatcttatggttgataaggagtacaacgtcttcttggatcatcttcgaagaggtgataagaaaagttcaagcactcgccttgaagttgacaatggagcatctgacattcgtagattaaagatcttttcttgtgattcaaagagatctaagcttgggaatgagaatccagtgaagaacagagttaatcaacagagcaagaggaaaactgttggagttgaggttgaaagagttaaaatccgagaaatcattcaaagagacaacagagttgctgaacgaagaaagcggaggatcgcagagttagaagctgcaaagacttcaagagacgttccttcactcgaaacccaacaagaagacattcaacaacgagacaacaaagttaggaaactttccgagtcaaaggctgagactttaagaagagatgatgttccattggttaaaactcaagaagacattcaaagagacaacagagttgctgaacgaagaaagaggaaatgtgacgatgctttaataaaagatgttccattggttagaactgaagaagacaagagggttgctgtggagattgatcacgtagagcgagtacatagagttacagaggttaatgatgtagatgagacttcttcaaggagcaaagaagtttttgtagggagaaggaagaagaatgaggggagtgaagcggttgtggataaggattacatgaggtacctcacatggcttgtagattctcttagcgattcgacaactgagccaatggaaaatcttcagaaagatgatatggatactctaaaagaatcgacaatggtacctgaattggatccactagtagaagtgaaggttgaaccacatgatgattggtctgattatataattgcgatgggtgattccccttttttggatggagaggagtgtacaccgtttgtggcgtccaagaaagtggttgatcttgatgaaggaagcaaagagaatgaaagtagtagcagttggtttagaaaggagctaatggatgttttgaaaaatccatatgatgaaggagagatgaagcagctccatcgttacgtatcaatccataaaaaaatgactcgatgcagagaactacgaaagggaagaggatctgattatgagactgacgaactgggacaatcttatctagaaagtttccctgatttcgaaaaagaatacaagcttgtggttggtgttgataaggcaagagctttgaagttgctgcgtggctttttcttttacttgaaatatgtttctcatgatggtgttttcaagccttgggagaagactcaaagttggcaaccttagaaatggtaaagcttttggcttcatgtagattaagtttttggatttctgtctgtttttttttttttctttgttgttggatggcaatctgatccagtgtagtttcttgtaaccaaagaatctggttttatttaggtttttcctgaaaactgatgcaatgtctcaagactttctgatctcatataacaaaaattgaaggaatcagatgagtgaaggcattacaatattcagtttaaacgttgtatcaaaaaatctgaaacagcctttgaaggtcataacaatcagacattgtcaagttgtcgaaactaacagagaacaagatgtgtaaccaaaatcagcatcaccttcctttatatttacatggctaatatatgttcgagaagtacatgttaggaccatgaagctatgagtcatgttgagtcacctattcccttatgaaccagcatatcatatactctgtctactttactcggctctactttgaagaagctataagcatcagactttttctttatctgccccttctttatttctcttgttaagatatccaacatcttcaaatagtgtacaggcagtattctggtctcattgcacatcttcttttcctgcacaaaaaacagcttcaatctctcaaaccataggaataatgtcaacaaatcaacaaaatcacaaataagatgacaaacatcaagtttgaaaattattgttcttacggtctctgagagtaagtcagctccaaggagaccatcaacatcccaagtgtccaaaccgctgtatattcttggaggtgtgacctttggcagtgagtcagaaccaaagggatgcaaatttctgggtaaccctcttggactttttagtgttttaccggctatactgcctggtgcaccgtggttaagccgcagcagcatactttcttcagcttccttctttctcttctcttctataaatctatttgcgtctgaagttgtcctgcaaccagcagttctagcttcctgcaacatttattaaaagctcaacttaatgttcccacctaattgagtttgtaatccagtactcaagcttggtaaaattttaagcatcaaacctgaagatcctcgattcttctgagaatttggtgctcttcaatgactttcttaatcagttccttgtgctcttctttggattggaaccgcgcaaacactttacagcttttatatatttttctctcctctgctgaaaggctcatctcatattgatcagggtacaacaagtttctttccagaacaaattccttcctccgcttcctctcatcaagcctgccaacaaaggcacaatcttggcttgtagcattggcttatgaaaaaattctccggtttaaaaatggttgttcctgtgataagtgtaccttttcgagtaaatacgaagaacctgcagtttctgctcacgctcagcatctgtgtcagaatccttaaattccatgtcagcaagcagttgctcagcatcgttgtcatgttcgatctcaaattcttccctctttagattgtaaccatataactctgttactaatggaactttctctccaggaagtctgagtttcttctccccgacactcctgtcagattgttgttttgcagctaagacacaagggccgttaactacctttagtttttgttcgcgtaaatatcactttgcataaaaacttgttccagtatataacaaaccttccaacttgatgatgtccttagcctgcggtacattgcctttcttcttgactgtacaataaaaagtattactttacatatggaatcatggaagagataatatttggggtcgtagtacgaaatgcggatgatttgcgtccttagccataaatctaagtgcaaataatgtctacaattttatatagataaaagcattttcacatacctccagctaaggcagacaaaggtggatctatttcattgaccttccctgaagcttcgtgtctgcccatggaaacataatagtacttttaaaaaggtgcattcaacattgtaaacgtaggtaaactattgttacaagcataagtatatacttgatttcagctgacacaggtaactcttcttttggagatagcctcacaaatgcaggtatttctgtgacaaatagtaaacagagctcagcatcctccttttttcagtcaaggttaatatacgagtcccaaatcaacaagaaaccccgctaatagattttaaagctgacctgttttgactgcactatctttactcatagcaagcagctcatctttgctctttccaatagtatgggacaagtcctacagagcggggagctagagtaaataaacaagctaggttcaactatctgacgatcatgtgttttcatcagtccttaccggaagtggaaagcatggtgactgcatgtaagcagaattgaagtgtttaatacattctgtcgttgtcttactaccaacatggtctgcaacttctttccaattgccaaacccgtatgtcgcaatggcctaacacagtcaatttacttcccaatagtcagatggaatctctatatagacatgggagtgtacaatcagaaacgattaatgattacctcaagaaggagtatctcttcatcggcattccaatcagaagtaacaagcgaaaaagacaaattgtcctgtcaaacaaaagggtagattcaatacaaacaaaaatacaaccatagaacattttctttgttttaaacacaatcactaatctaattacttttcagctgacaaagcgttgaattgaattcaaatatactgctcggcgttggaaactaaccataacacgatatgggtgactgttcttgtgacgattaagttcaacgccgacagaaaagcattccacacaaagatcaaagtccatacaaacagcacatttgaaacgaaccaaaccagacagatctttatcgcaatagttacaacagtaaaggccaggtttcctctcattcccagcttcaattcctacaatgtattggtacatgtaagaacttttggaaaacgcagcttggtacatgatacatcaatgcatatctatccacagcagaaactttagtcctatcagtatcacacctaattgcacaagtaaacggaaacctaccggtggaaattgatgccgcagcattctcaggacccaatgatatctttttcctttttgattttctgaaacagccaaaatcatcaaaattaggataaagacaagagacgacagcagtatgaaatcaagagccacccacaagtaccaaaagaactccgattcagataatcaaacacagctaagtggattaccagatattgaaatgttttcgcaaagacaagtaagtaattgaacagagaaaaccctagaagacttcgagctaagatggacaaagaacgaaactttaaacgaaccctggattcaggtcttcctcagcaggacgagaagctagtttcgaacgacccatcggcaccaagctcgcacttcttcccggcagattgaagaaaaaaccagaagagcgagaaaacgctaaaaagcagtgaaaaaatggtaagtcggtaaatgactaaattacccttaacaagtgtcaataattatgttcacgccatctttaaaccctacggcagttgtcagtggtcacgtctctctcttaacctaaccaatccaaagttgccgctagggtcaccggaaaacttcagagttgtgtcttctattgaattctccgggaaggtaaagaagattagtgggttttgattgtgctgtataaagatgtgtactttgtttgagctgtctcttaaaccctagcaccaatccgtgaaccttgaagtttgtcattccggtagaaattcctcagcagttgatctaattcgttctctgtgtagtattagtgatggggctttctcttggggaacaacatttcattaaaggtgggattgctcaagatcttcgaactgatggtcggaaaagattgacttaccgtcctatctacgtcgaaaccggtgttattccgcaggtagtgtaatctcctagagctcgtccgcttctcattgttgcttcccagttgtttaacagatatgttctttctcttgtttttgttggctctaggctaatggttcagcgagagttagaattggtggaaccgatgtgattgctagtgtaaaggtacttcctttgttctctctgctactgttctattgttgaatgggaagtgctattgtagatgttacccagtaatcttgtgtaattgcaggctgaaattgggaggccaagttcacttcaacccgataaaggaaaggttgcagttttcattgattgcagtccaacagctgaaccgacatttggggtgagcttttcttttatttcgtttggttttggttctatctagcacttgtcacacccgttctatcgttctattggtgtttctcttactagtggaattgttcaacatgagattttggttatcattacttttcttcagaatctcctaaattctactgtgttaagtctttaggcggctaattctttgtgatatgttgttacttaggggagaggaggtgaggaattgtcttctgagcttgctttggctcttcaaagatgtcttctgggtggcaaaagtggagcaggtctgcaatcatgtttatgcaatgcttttttttacctgcacactgttacgctttctgtttgtaacgtttatagcaattcatgttttggtaccaggagctggaataaatttatcttcgcttttaatcaaagaaggaaaagtttgctgggacctttatattgatggtcttgtcattagttcggatgggaatctattggatgccctgggtgctgccattaaggtaattcttgtgatgtgtgtttggttttctctcttaacccttagtctcaggttttagttacgaatgttagtgagtaaatcatacccatcaatcagaatcatgagaaaggaaaggccagagaatataggaaacgaaagggaatgggtctttagttaagtgtatatagattagctcaatgtagttgtcttgttattggttttagtagctttacgatatgtttccaattgatagtttaagcaacccaaaagtcatctttcctcaaggctgatcacatgctttaatgcacttgttgactatactcctgcaggctgctttaaccaacacggccatcccaaaagtcaatgtttcagctgaagtagcagatgatgagcaaccagagattgacatcagcgacgaggaatatcttcaatttgacacttccagtgtcccggtcatagtcacgttaacaaaagtaatcgaatctcacttttcttgattcacatcgacatcttcttatgtacatttcgctaatcttttaccatgctgtccttggtttttgcaggtgggaacgcattacatagttgatgcaacagcagaagaggagtctcagatgagctcagctgtatctatatctgtgaatcggacaggccatatatgtgggttaaccaaacgaagcgggtctggcttagacccaagcgtcatccttgacatgatctctgttgccaagcatgtgacagagactctgatgagcaaacttgattcagagatttcagccgcagaggcctgcgaagacgaatcttgactcttgagtctcagagaatcaaagtttcaagatgaaacatgttagcaagggatcaacaatatttgtatctgtggaaaatcttatacgaagtcagaacagattaagctaatcaaaatcctttttcctatgttctaatgttccatgctttgtgatagtaaaggtgatatttttgccattatagtattagtaacattatatctcatctagggattattaaaagaggcgttccttggatctctgtgtttaaagtgaaagacataacaagttacaaaaggatttgtgatattttgggaggaggaaatgagaatggagatgaggtcagcaaatgaaattaagtggacttggaaaaaagagaagattggtggtccatgattaagctcaaaggtcaaaagagtgtgtgagcagtgttggtcacgtgtatctcagcttcgggtttggtaaaaatggctttgaaacattcaattgttttctgtaaaactcccaaatccgatactattcacatttgtttcctccttcatttcataacaagcaagctggcagagaaaatttggtagtcatctattatgtcatagaattatgatatggtacatactacaaaacaacaaaaggagggagcaaatagaaagcgttaaatggcaaaactcaacgaatttacgtatattccgatgaactaactaacaatgatattgataactgtttttgcgaatcaactaacatcgtttccacatttaaattgtgactagcataaacaattaaaaagtaagatttgaaaatcagtcggttaactaattggaaaagaaaatgaaactaaattgattgactaaagtgattttttcttttcttattggccactaactcttattttgttttcattatggaaaaagagtcaaacctaatcaaatatatttagtctatgatttaccctaataaaatatacacaaaaaaattgataactacagtacttaaaggtttttaactgtaaaagttaattttgacagtaaaaatatttatttctaaaaataaaataaaaaaaaaaagagaaaaagatttaatagcaaaaatggtcgtggtacggagagacggtggcgcgtggaggcgggagaggagcgtggaggaaaagaaaaagagccaaaagagaggaaaaaagcaaacactttcacttggtggacccatttgtccctcccccagactctctcttctcatctctctctctctctctctcttcaaaccctaaaaattcacgcattttggcacagttaagttcgctgaatcccgttcctcttcctctgtctctctccccaagaaaatcactcagatcaaagctcaaatttcggatctcacagctgtcgcttcggtaggtatttcctcttcttttccccccctttctcttctcctgtttcgttttcgatttggattacacgaaattcatgtgatatgttgcttctttgggttttgtaaaatgattgctggtgaattgtattgggaattttgtgcagaggaaaggatgaccagagaacatcctcccgagcctcttgatttcttcatctggactgttgaggtatattcaatcaatcattccttctttataagcctttcatgatgatcacttcttcaattcgcatgtttcttggaattgagctcttcattattagacttgttggttgcagaatcatgtttattaaattattcagcctatttttgatctgaattcagcctatttaaccagttacagggttgatttgatatttcttcaggtatgaccctagtttgccttaggcttgttcttgttgtttgatccaattacactgattgatttagtttactatgttacttattttttttgctcttttggtactctgcttgttattacaagaataaatctcaccttaatgattgcaattacatcaggcaagctcgaatttgacgcacctctagctattgaagttccattagtggtcatttagtttactatgttacttgtcgctctagtccaaggaatctgtgtttgttgatgtacatatactccggaagtggttttacctcagggtgtgtagactgcagagtgatgttcgcatatgtcacttgttgatttgctcttcagaaaaggttgaatattggatgaagattagttgatgaaaactcgataacctgtgcctgataccaaaaatagttaagagttagtccactcatatggagaagctggaggttgtgtgttgctgaatggttttgttctatcagatgctattatggattttcttagttatgctcgtgtgtaatggcgagcatcttgtagatgagaagctttgttctttttttcttcaggatgttgggtcttggctcgaggagataaaccttgggggctaccgccagattttcaaagaaaatggtgtcaatggagaatatctagaaagcatgtctgtgtttactaccgagcagatccttcacttcataaggaggcatcacatgaagtggggagacttcatcaccctctgtaaagaactcagaaggattaaaggtactctatcgttctctctataactctcagcttaagttgttgcaggaatttaactatggaaagaaatgtctttttttttacagtggcttgcttgaaaggtgagcagagagttagacggccatggtgggcaccgtcttgtctatccgtagtctttgttaaggcagccaaacgcaaccgacagtctcgtgttgtatctctcaagcttgaatcttgacattacactttggctgtttatgtacgtacttgtctctcttctcttctcttgttttcttttcctttttttttttttttggtttgggtttgtttgtggcacatgcactaggaagaaacaaactcaagtcaaaaaagctgtttggcttggtgaaatcttgcaagcgggaaaaaaattatgcgttttgtactttggtggtgtatacaaagcttgctctcagatgtttaatatatggcttgtgcaatctttatgtgacagataatagtgtgacgaatccaaagtagtaatttgattatatgtaatgtggaaaccgattgaaacccaggcgatattgagaacgtagtaatttgattatatatgttatatgttccaatgattttggacactaataaaattatttaggtcacaaatttaaaaactctatcggtggttaaacattttcagagatagcgtccattcaaacattttcgtggtgcaaattttcggagaaatatggtagagatttggcgtatagctcatctcatgttcctctttggagattagtacgtttagtaccctatcctcttggacgaaatctcttatcgagtatcgagtccactttatcttcacagaagtgagtaagtgacaaacaatgggaagcgaccacaacttctaagagaaaatagatattttatacattctttcttacaatttttttgcagttgaatttatcatctacaaagtgtaaaattatggattgagcaatgcaatttttagaagaaacaattaatggacagagatataaagttttgtaaaaatctttaaaattaataattatctttgaggtttttacaagtttattatatgtccctttccattatttatttttttcgttattgacattgcttacatacagtccattattttaagtttctcttaattttattttatttattagatacacacttatgtgatacatattgatatcatctttaccaaaaatcttgagcttagccaccaacataaagttttgacaataactcgtcatcggatttttcctcagtctatcaaaccttatcaagtctagtcgtctagaaggggaagacatgttcaaacggggaatcagatttatcgtcgttatgtgagtttattttattccatatatggtttctcgctcgatacgtttgatggtacaattcatcatgcgtattctcacttcaactttaatcgaagccttgttcatattgtataatcaaccgttgatacgtgtcaccgcatctggacatatcacattttttgttggatttcttatactcacccctttcgtgatccgatcaaataataaaactgtgtttttggtacatgttcttgttgggatagcgtttgtatgttggtttattttcgtgttagttatcttcttcattgcatacattctaaagcaatatgatttcttatacaagccaataaggttttaatcaggattatccttaattaatgtattcatacttaccgttcacaaaataattatgagaaaaccaaataccggaattacccttcaaatccagaagcttcggctttggcctaaaaaccctactaaaccccaatcgtctctcttcttagctcagagtgctaccgaaatcaaaatccaccattcttttctcttccgagattttagaagtttgcgacgatgatcaggctctctaagcgctccgtctctaccctcctacgctccggtaaccaaagcttccgtatcgccgccgcagcttccacctcccgttcttccccatctgccacggtattcatttcaatttccttcatctatccctcgctttgggttttggtttctcggttcagtggccaattggctttcgtatgataggcgaagagaattgattggattacttacagtgtcactattttccccccttttaggatgtcaagagaagtgacactgaatcgagatggtactcatctttaaccaatggacaatctaagaatagtgggtcatttgctcaattgaacatgaaaaccaattggtttatgggataccggaacgaatccagtgcagcagcatcagattcttcctcacaagctcctccaccggctgagaaattcgagtatcaagctgaagtacgtacgatctgtgtgtttagatgatttcttgttttgtgatcaattttgtgtgtgtcctcgtcactaatgtttgaaacaaatggcaggttagtcgcctcatggaccttattgtcaacagcttatacagcaataaggaggtgtttcttcgggagcttattaggtatcgtattattctctatctttttttgtttcgtaatggtttttgtgtaacggactcatatttagtaatctatattttacttgatttgttgttcaacagtaatgcaagtgatgcattggataagcttcgttatttgagcgttaccaaccctgagctctcaaaagatgctcctgatcttgatatacgtatctatgcagacaaggagaatggaatcataactctcacgtatgacttattagtttctgatttaaatgtataaatttcgttttgagcaaatggttagtagataataatatgctgtcaatgcttttttcccactttgtcagtgattctggtattggtatgacacggcaagaattagttgactgtcttgggactattgctcaaagtggaaccgccaagttcatgaaagctctaaaggtcttactggtttctctgatactattgcttctctttcatggaatcacttgatcaactaagcattgttgtaacattttcaggatagcaaggatgcaggtggtgacaacaatttaattggtcaatttggtgtagggttctattcagcatttttggttgcagatcgggtaagttcttatgttgtgatgtctgcagattcctttattgatatactcacctctccaccaattcaataccataattcacatctatctatcttttgaaggtaattgtgtcaaccaagagccctaagtctgataaacaatatgtatgggaaggagaagcaaattcaagcagttttaccattcaggaagatactgacccacaatctctcattcctagaggaactcgtattactttgcatcttaaggttcgttatgctttgatatttaatttgtagatcaattctgagtatttgttccttcagaagacatgacatactaaattatctctattatttctttccccaatacagcaagaagccaaaaactttgcagatcctgagcggattcagaagctcgtgaaaaactattcccagtttgtttctttccctatttacacttggcaggaaaaaggatacacaaaagaggtatgatcaccagagttagcagatttgtgaacttaaacatatgtacttttgtgtcagatgcaactaatattcttaccttattaactggctttgtatatttggctctctctcttgcaggttgaggttgaagatgatccaactgaaacaaaaaaagatgaccaagatgaccaaactgaggtatatatacctgcgtctctttacctgttctaagaaataccttgatcagcttctggaaatatcttaatcagcatcagaagatagctagatgtgtaagaaaagttggcttagggttggggactatttttcttgtaacagaaaaagaagaagaccaagaaggttgttgagagatactgggattgggagcttacaaatgagacacaaccgatttgggtaaggacttgtcaatgtatcttgagtgcactctgaatcaatttaacagtgtattttatttattgcagctgcgtaaccctaaggaggtgacaacagcagaatacaatgagttttacagaaaagctttcaatgagtatttggacccattggcttcatcccatttcacgacagaggtattttcaaaggaacacatttattgaattggatatttccattaaacagccgaattagatcgtctttgttagacgatccactgaaatataatgctctttgattctcttgttggcaatgctcagggcgaagtcgagtttaggtctatcctatatgtgccacctgtttcaccatcggggaaggatgacatagtcaatcaaaagacaaagaacataaggctctatgttaaacgagttttcatttcagatgactttgatggggagctggtgagaaaagtttcttttggtgtggttcaaatttctttcaagaaacctctgtctttctaattatattgatatcatttttgtggtgtttgtggccagtttcctcggtacttgagctttgttaaaggtgttgtggactcgcatgatctcccacttaatgtatcacgtgagattcttcaagaaagtcgcatagtaagcgctcatatccaattcgtatgcaaagcctttatgatatatgttttgttttaagtgcaatgctatgttaagcttacgattttgtattgtgtctccaaggtgcggatcatgaagaaacgtctagtgaggaaggcttttgatatgattttgggtatatccttgagtgaaaacagagaagtatgtttcataactcttgttcccctaagcttacagtttaaccttttttaattccctttagaaatcactgctacgttctggtgatgattttcctgacgaatgagaatggcattgttaacctatacaggactatgagaagttttgggataattttggcaaacacttgaaattagggtgcatcgaagaccgtgaaaaccacaagcgtatagctccactgcttcgatttttctcctcccagagtgagaatgacatgatcagcttggatgagtatgttgagaacatgaaacctgaacagaaagccatatacttcattgcttctgacagcattacaagtgctaagaatgcacctttcctcgaaaagatgctggagaaaggacttgaagtatgtgttgttcttctgaatggggcctcgttttgttcttccttgcaaatattcctattaactcagaggtgattgacatgtatttctttgtattgtgaacgtaggtactatatttggtagagcctattgatgaagttgccgtacagagtttaaaagcttataaggagaaggattttgtagatatcagcaaggaagacttggatctaggcaagtgcctgatgtaattccttgatttagcatgtcaggtaatcacttatgtataataacaaattctggctttgatctttgtattgacaggagacaagaacgaggagaaagaggcagcagtgaaaaaagagtttggacagacttgtgactggataaagaaacgattgggtgacaaggttgccagtgttcaaatttccaaccgtcttagttcttccccctgtgttcttgtatctggtaaatttggttggtcagccaatatggagaggtaagatctgacctttttcttaagcaaggatttccgttctccttttttgcccctggtgaactaacacagaatatgttatctggacaggctaatgaaggcacaatcaactggtgacacaataagcctcgactacatgaaagggagaagagtgtttgagatcaatcccgaccactcaattatcaagaacataaatgtgaagtcaccattcatcataacttgtacctggctattataattaaatctaggagccgctttttgagcttggcttgtttttttcttgcaccctgcaggctgcttacaatagtaacccaaatgacgaagatgcaatgagagccatagatcttatgtatgacgcagcactagtttctagtgggttcacggtgagtcctattctacattaacattcttaactttttgttgtctctagaattgaaataaagtaaatactggtaaaacttaattgttgtttctcaaaactacagcccgataatccagcagagctgggtgggaagatatatgagatgatggatgtagctctttccgggaaatggtcaagccctgaggtgcagccgcagcaacagcagatggcacattctcacgatgcagagacgtttgaagctgaagtggttgaaccagtcgaagtggatgggaagaaatgaacacaagcctaatgttttatgtccctgctacgattctcatcatattcttcttcttttattagtagtagcagtaaaagtagaaccccaaaactcagaacaataggcaatgagcgaatgataatctctatttatgttggagagattaataattgattgagcttgtttttgttccagtttgtgttgatcctcctcggtataattttaataaccgttaagaaaaattcagttggggtgtttttggaaagatttttcgagttttatctaacaaaactaaaattttgggacatatggtaatttttaattaaatagagggatgttgttatcgtacgaattgggttggtttaaaactttgtttggacagattcgactcaaacgttgaacgcgtttaaaaaagtcaacaaaagtcgaaggttaccggctggtcaggttaaccgttagagattaatgaactggcagctgtatgtcttttttatagttctgtcttaacaggcaaaaaagtgtttaatttatctttcctttgggtttctcacggagtcacggttcctcgttcgtcctctcccgtcgtctctccggtgagtccttaattttccggcggtctttttccctttctcgtctgtttggtgctttctttatgtctgaggcgaatacagcaaaacgtatctgttttggttgttgagttcgaggctggtcctgaaaattcggtgacaaaaagagtcaataactctcgtgatcgagttggatgcgttgttttgagggttgattcagtttatgactatgtattttggtacttgcaagattttctgattttatgaagattcgtgtttgacttttatagcgtataatctacggggcaaacagattcgagcaacttgtttttttctagcgcttgttttgtgtttactctgtcatgtgtttgtattttttgagcttccactagtgattaatcatctcagctcaatttgaacataggagatgtagtttttatctgtcggtggatttctagggattttgcaaaatgttttgggctttcctgaattagtatgtgatttggtcgtaaagtattttagggatttatgtgttccttggggtgaatctgacattgacattatcttggtgtctgcagcactaaattgatgggcacatcatctgggtccaatcttcctcaccagatgctacctccacgtcagcaactacaaacatctctttcgcttgtatcttcagatccccacttgtcacggtctaattctggcattgtgcgtgaatcaccagctgaaagtgctagctctcaagaaacttggccaacctcaaaatctattatgggaaggaagacagatagcggaaagacagggcctgactctcatgatcaacatgtgatccgccatgtttccattgctgataaggtatcgctacgggacatagctagagagagacttgacatagtcgctgagagaatgcatcgattaccagaagaatatctcgaggagttaaagaatggtcttaaggctatccttgaaggaaatggtgcgcagcctatagatgagtttatgtttctgcagaagtttgtccagacgagatctgatttaacttcaaagacacttgtcagggctcaccgagtgcagcttgaagttcttgtggttataaacactggtatccaagcattcttgcacccaaacatcaatctctctcagtcatcactcatcgagatctttgtgtacaagagatgcagaaacatagcttgccaaaacgaactcccggctgatggttgtccctgtgagatatgcgctaataggaaaggcttctgcaacctgtgcatgtgtgtgatatgtaacaagtttgactttgcagtcaacacatgccgctggattggctgcgacgtgtgttctcattggactcatacggattgtgctattagggatggggagatttcgatgggagtttctcccaagagcgtatctgggatgggagaaatgctgttcaagtgtcgagcgtgcaaccatacttctgaattgctggggtgggtgaaagatgtgtttcagcactgtgcaccaaactgggatagggaatctttaatgaaggaacttgacttcgttagtaggattttccgtggaagcgaagatacaagaggccggaaactcttctggaagtgtgaggagcttatggagaagattaaaggtggactggctgaagcaacagcggccaagttgatactcatgtttttccaaggtaagcccactcgctattgttatatgataagggtttactctttatagacctaaccatgttttgtgtatgaagaaattgaattggactctccaaagagccttgaaagcggagaaggtgggggtacgatagcacctcaagatgcatgcaaccgaattgctgaagttgtaaaggaaacactgaggaaaatggagatagtgggtgaggaaaagacgaggatgtacaagaaagcgcgaatggggcttgaggaatgcgagagagaggtagaagagaaagcaaagcaagtggcggaactgcagatggagaggcagaagaagaaacaacagatagaagaggtggagaggatagtgaggctgaagcaagcagaggcagagatgtttcagttaaaagcaaacgaggcaaaagtggaagcagagagattggaaaggattgtgaaagcgaaaaaggagaaaacagaagaggaatacgcaagtaactatttgaaactgaggctgagcgaggcggaggcagagaaagagtatctgtttgaaaagataaaagagcaggaaagtggtgggaatggtggtgaagcgtcacaagcagtgatgtactcaaagatcagagaaatgctgcatggatacaatgcatcgtcgccaagggtagatccaagatcaaaccagcgaaatcctttcagatccaatccttagatgtttgtattgtctctctttgtttgtattaaaaaaaaaatccgaatcaattaaggttggatttgtgtgtgaagtattgtggtctttgtattcaaattttgcacatgatcgtctatgttgggccataatgttatgcaagctttgacacagagtgttgccaaaatctcgatacttattcactcggatttagagaattgtggatttcgctaatggagggagatccatgttaccttaaatagtttatatttgagccaacatgagagccaaagaacatcgccaccgactttaaaaagaaaatattttgcccaaatggatattacagagtagttatttgcaataacgtcctcatgtttgggttataataacgatttgatttcttacggggtataaagcaaaaggaatcaaaacgtttggggaaataatgtaatattctggaaacaaaacgcgtataatcggattgataaggaatattatatcatcgccgatgcaatcatcgaccatcgttttgttttcctgtctacccaaaaacaaaccctagtgtccgaattctcgacaaaattcatcggctccaaattccattcgtgctttttgaattcgcgttcttctgattcaagatgtttctttcacctggtcattctcctcgtcagatttcttctccatcgccgtcttcttattccgatgataccctccgatcaacgcctcgcagttcttcctcggagatcattcctcgaaaccctagaaaacggatgagagttctcgatgaggacgcttatgttgaagcaatcgagaagatcatcgagcgtgattactttccagatataactaagcttagggatcggctcgattggatccaagcggtgaaaacccgtgacccgattcaaatccgagatgcccagttgaagattatcgagaggcgtggaaagaaggcgaatcatcatgttggagataccgagggtaaaactcaaactcctggatctacttttctgagaaatttcactcctttagatgaatttgatggtaaaacccctagaactcctggagtatctggtagagaatttcatggtgttgaagtagatgctggtgatggagatgaagatatagatcttaatttgtccctagatgagttctttaggagatatactagtgaggataacgagagcttttcgaagattcttgagaaggtaaataggaagaagaaggagaagtatggctttctccttgaaggtgaaaaggaggatggtaaatctattgaggatgtgaagagagataggattacagatgggtatggtacatctgatcagccaccgagtactttagaaggatggaaatatacggcgaagaatcttctgatgtaccatccagctgatcggggtgaggcgcctttaactgaggcggaaagggcagtgagattacttggattgactaaggagatagttaaagggaacactcgttttcatggtaagactatggattctaggccaagagaagatggttctgttgagattctctacactccaatcgcaggttcttccccgatgcatatctcaggtagggacagagacaagtctaaaaggtatgatcttgatgatctaaggaaaacaccgaatcctttctatgtggaatcagataagagggcagacaatgggtatagttttgttagaacgccttctcctgctccaggtcttgatgaatcaccctttataacatggggtgagattgatgggacaccaatgcgattagatcttgaggatacacctattgatattggtggtagtgctgatggaccgcactataacattccatctgcacctcctagagatgtaagggcacattcattatcaagggatgcatcgcgaaaacttagagagagatcgaatagtatgtttaagaaacctccgttgccatctcctcatcgaagtggaagtgcaagtccgaatgttaggactctttcacccgctgctcagaagtttttcagaaaggcaatagctaaatcatcttctactgttgatgagagccttcgtgcaagttatcgtggagcaagtcctcgtggagcaagtcctggtgctgtgactcctaagagtgtgagaagtatttcaagatttggcaaagatgggaccagctcagagacaaggtcgccttgatggtgccaatgttatggttatctgttgttgaatgctttggtgctcacataggcaacaaagttacttcttcttgtaccaattactgatatgacagattttaaatggaatgctatctatcttcgcatttgtaattttgacttccacatcttctcttttctcttagctcccaggctacgcacttcaatattacaacatcagcacaatatcctcaagtgtaaaatttggtgtttaagctttatctgtagattctctatattttagttccttttgtgtgattcatgctttttaagaggtgtcatcctcgagattgttctctcttcaatctcaggtttccctcagagtttggaattgcttggatgttaattaatcattaatgtttatgtatccttacattaagatctggagacagaaccgactgcaacaagagtttcaatattcacagcagcatgaagtagacgtagatgtcaagatctatggtctcggtccaaagagtgattcgagattcacaacagtggagacacctctagcatcaatagtttgctccctagagatacctttcagtgatgaaggtggatcaagaaaacagtgcttcttaaaccagagcaatgcaacaatggaagaatgcgaatccacaagtatcaaatccaggatctgatgaaagaaatgcttctgtcacaaaacaacctctcatacgcaacattgtaagtccaactcgaaaaactaagtggtcttggaaaatgaagagtatgaaacatggaccagaggctgtagagaaagcatcaaacttatatttatatacaatgaacatcacaagtgtatttcaaagacaacattaaggataaaccagaccagtaaagaaaccaaacaaccaaaaaagaaagaaaacttcaccataacatatgttgcttgttccatatcatttatagttagattgtagcagcaacacaggattcagctctagccttgtcagaatcttccaagactttcttagaggctttaataacaatatgattagtgatgtaatgcttgcgacaaacaggcatatagacatcagctccaccaataagctcagttctggtgtcacaattctttcttaaagtgaagaaagctttatgtccacagacctcacaccttgcagttagcttagtcacagaatcagctattggtataatgtcaagtacagccccaaaactcctcctgcacatagagagatcaattccacattttacagtcaacaaaattgttaaacattgaagtaaaatatcaaaatcacagctttggtactaggatgaagcaccttaaatagtcaccatctaggccagcaacgatcacaattttaccatcatcatcagcgactttgcagcaaaactcataaagatctccaaagaactgagcctcatcaataccaatcacatcaagctgccaatcattttaagagaaaaacacaaattcaatacagatccttcacaattaagacccgaaacaccaaatagagcatcgaatttattaccttgttataagcatctagtccgaatttctcaggaaatgacatgagatctggaagagcccagcaagggaatccaattccatcatgtgtcaccaccgaatcttttgcgtatctcgtatccttactcgatttcagcatcgcaacacttctgcttaaccaaaacacgaaattaagaaatttacggagatagatctaacaattaaaatctacggagatagaaaataaactgtaccttccgtcgctgatctctgacttgattcggcgaaggagagaggtcgatttcccagaaaacataggacccatgataacatgaacagcacctgacccacgacgttccagatcggagagaaaatctccggtgacgtcactgtcgagggttttgatcaaaaaggaagctttgagagtcgccatggcagagacttgagaagaaaagatggtttgtagatgaaaaaagggagaagggttcaatttgcttgtggttttaggtagcgatggtgaatagcttgttgaagatatatatacgcggacatccagaagttgaacaaggaagaaaattgctggagaagatttgtcaaagataagggtttgaaattttgaatgggaggttttttcaaaaaaattacatctttggagggaaacagttttttagagcgaatctttttattttacctctctcttttcataaagcggaacactataaacggaatttaaaaaaaaaaaaactgattttctattggcttattttttttaattaatttccttaatgtatagatcatatgaaatttttaaacatgtgtgtttaggctttgcaaacacattatttaagagaatgataaatatttttaaaaaatatatccacataaaatggtactggtttttggtcatatattccactaatgttttttagaattattgtttaaattagaaagtcgtaaattcgtaatattcgagaaaacaactttctcacttgggtttttatcctacaaacccatcattttgtgtgtgtgcttttgaatgtgggcttaaacccaaaaccctgaggctttttttggccctgagatgaacatgttcacaaccttcttcaagtgttccaatacatacacgttcattgctttttcgtagttgcaatttttatttaatttttcgtatgtagttgcacaccttcatgtctaaagctacaaattgttgaaatgttttttccgatcacctcaattaatgtacaatcgtagctcgttgtattcctaaaaccgaactagaatacattttcatcgccaggttattacaagttaaatcaatttgatcaaaattcaaacatagataaaatgtacaccagtaggttaaaactaaaccaaacgtacacaacaagcctaaattatccaaacaacaacaactctcagttttgctttaaaaattctgtgaataagacatccttaattgcaaatttatttttaattacttctttttaaaaaacttttagtggcaccatcctaattagtaattactttctatataattcttctttaagatacaaactaaaaattccgcaaaaagaaacatctaaacattccaatatattaatatttttttgttatgacaaaagtaaaatttccgtgtaataaatggaagggaaaacgtataaaaagtttagtattgaaaaagagaaaaaaaagaaacaaaccaattatgtaataatgagtataaatatataaatacagacatatcttcttcttcttgcacacccaaaaagcctttgtctttctatctctctaccaaaacttctttctttctctctttttctatatctctagagcgcgttactgcgcgtcgtgagtatgtttttattgacgccattgaaattgggttaaatcggtttgaatcggattgaacaaaaactgtattaataataattcttcctctacttttctctctgattgattccaatcttctttcattttcttcttcttcttcttctggggaaggggcaggttaaaattatgccatctattcaaatcgtgcctatcctcagatcttaactcttttctctacgagattcggcatctgggttttattcttcttggtgggtttttttttattcttcttcttctgatctcagatttcccctgattggtttttttttttgctaaatccgttttatgttttcccgatcaaactctcctggcagattctcggatctgttgttttctagattcaatctgaatttgattttacgtttttgtctttgtaaagatgtttccttttgatcagattttgataatccattgacatctctgattcaagcaaaagctaattaactttgatccgattcctttgtgtgtgtgtgcagagcaaaatgcaatcggataatggaaagcttttcatcggtgggatatcttgggacaccaatgaggaacgtctcaaggagtatttcagcagttttggagaagtgatcgaagctgtcatcttgaaagatcgtaccactggtcgtgctcgtggtttcggttttgttgtttttgctgatcctgctgttgctgagattgttatcaccgaaaaacataatattgatggcagattggtatgttcactgttctctgcctttcgtttttgtacaatgtaacttgttttcgaagcttccttatgcaatcaagccttcaagagttacagtttgttctcatttggttccgattaatcatttttgtgctttgattggatttttgagaagaaatgagtgatctttagttatatgagcttagtttttcatttttcaagttgtttgatc

SEQ ID NO: 1030 - DNA, 38810 bp, Arabidopsis thaliana
gatcatgtcaaatttataggcaaaggacgagggcaaacctgtcaatatcgagatttgaatattatatttgataataaagtttttaatttttttttggcattaatgtgaaataatgaatgttatactgctataagtgaagaaaaaataatactgacataagtcagactcagacatctataaaagttgtttccacaatattcgtaaattttcactaaaaattagaaatattatactgtattttgttgtttctattggtgatcaactgaaggagtttgtgctggtttttcaatgtcatatgactatatgtataaaactgaaggaacaaaagttaatataagaattcgtattgaaaagttgtacaccttttctttctaacggctaaaaagttgtacatttttagaagtatctaaattttttgtcatgtcaaatttacaaagtacagatgaaatatttacaattaatagcgtttttttttgtttacatgataaagataagagtgttgttatacatgtaacttgtaagttatttgtaagaatatgttttacttgctcgagtctgaatgtgtttttatcccattaagtcaagtattttatgctttcattggcaaaaaagtcaggttcaatatatgcttatgcgagtctaaatctcgagtataacttgtttttttgataatactatatactataaaactaataaaactacgaatttgatatttttacacgtcaagatttcaaccagagttaataaagaacgtgtctggactctccaccatccggacatacacgaggcgtggagattaaacaatgcattgcgaaatgaaaaagagcaattgaatatatatttgaatattatagtggaaaagtcaaaatttggactctacctttgtcccttttgtagtagtatcctgctttacttttttatacgactgtcttatcttttgacataacaaaaacagaccttacccgttacagcgttgtaagctccaaaccagtatcattgaccttgtatgatatactttcttcaccaatccgcttctcctttcttttctttttttataaccaagaatactttatttagtcatgtgcatgttctaaacacatggttgatatcgaagctatacaattgaaatgacataatatgcgacaagtttaagacctattacaatttttttattttgttttatcaacagaaaaattatatcggaattattgaatttcagaccaccatgtgttaattaatccgatgataaatgatttttaaagaaaatagttggcaactctcgatcgtatccaattcatatcctaattttttaagcttaactataaatctcaccataacgagaacaatataacgattttaaaattggcgtgttgtattaatatacaggtatcaccatgtggaagtctagataattgtttaatattgacggaaaaatcgcaagctattttgcgtcttttgtgatacatatttaaaatatttgttgggacttggggtcaaatatttgaaacagaaagaaggaaagaatcgaactggatagtgaagaagacccacaccatgtttatggtctttattatataaaaattcgcatacaggaaaatcaattcacacaaagaagaatgacattttgttatcaagctctttcacacttaacaactaacaagctcgtatacttgtacttgttacatatagattacccaagtatcagggcatcaaagttgactacatttccgttcgtttcaataaaattctacacaagtaagctataaagtgtaaaaggtgtttcaaatagtaattagtaaaataactttattagatgtgggagaattttattttttcgtaaatggataataacaaaggagacattccattttcagcgacaaccctcacgagataagattgtgagaaaaaatttaggtcttcgaatgaaaactcttgaattttccacatcattcatatgttttctttactgttattgccaataggtccttactctgataactaatatggaaagtttttggctgacttcataatattattctttctaaaaaattcatttttctaacctttttccgtcaacaatttcctaacatctttttcaacaattaatggacctttttttgtatcattgtgtgtacatattcccataactagacatcaacacaaacatacacatgaggacaataaatgacaaaaaaaagtcagatcgaccaattttatcatccggattttgataccataatggataatcttgatacaatattgagtcgatataaaaagaaatcatactcatttataatttattattataaaatgacgtctcatatcggatttatgtgatatgatgatgatacaagtatattatatgaacggacctgttgagattttgtttgactttttttttatatcaaaaatagtcaaacatttaacacatttgtaaaaacgtcatcgtttctttcctgcgtacataatcttttaatgggcctttccaaatttgcggggcaggtatctttgtatcaaattggaagttcttaccaaacaaaaaaaaagaaaaggaaattacacataattggcccactggccccactctaatgtaacgacgccgttctatatctcatagtcattggggagagacgacgccgtacaagcaaaagacgaagccagcaccgacgcagagaagaaaaaggaaaccctaattttcattttgtctgatctttttcttcttcaaagggttttcgcttttccatcacgtcactggtaaattcctctgttcttatcatccctacaggttagagaagaagcaacgcctccttttataggtaacaaaaaagggattgtttttgccataagtgcaaaatatttagccaatcaaaagcctcaaaatttttacacttttaattaaaacggtgccgtttctctcaggaacctctttcggtcggacgagaaagccaaaaacgtagcaaaacatcgatcctccgagtccgagattcaggaattggtaatggcggctatgtcagcggttctgtctctgggtttaggaacactccgcccttcgcatcgttccttgtcctgtttcgattccctccggcaccaccagacatcttttctccgttgccaccaaagtctcatctctagaaatacgacgaggtctccgctcaacaagattcttcaggcttgccttcaatccagtgggtatatctattcttctccgcctcaattccttctaattgcaaatacctctgattcatttgatgtgatttacttcctcggtgtgcactagatttgactttataaatcataatctcgaattcaggctttatatgcttctttgtgtagcattcaatcttgtaatagattgtgttttgacactcactaattggtagttacttaaatgatgtgatcaaatgtttgactatgtctgttgtgttttattagattctgcaaatggtgatgctttggtgtcatcatccgatgaaagttctgagattgtatttatgggtaccggaaccagtgaagggattcctcgtgtcagctgcctcactaatcctttgaaaacatgttcggtacattttcgcctttgtttgttcttttattatgattcatcttcggtttcaatacaatcatcccattgagaaaaatatccattttgattctctaaggtatgcacaaaagcaacagaaccaggaaacagaaataggagacttaacaccagcattcttgttcggtacattagaccatccggaacaagtaacatcctcattgattgtggcaagtaagtgctatgagattagtaatgtagatgtcattctatttatcacctttttttttgtatgacatttaccatggagcatctcacattcatgttggttattgtatgctgactttttaactcctttggcttggcaggttcttctaccatagtgcccttcgatggtttcccaccttcgggttagttttttttccatcaaccactaaggagttgtcaaaaattgattttcataagattttttggaataccctattagattttgatgcttcttacatgacttgttattttttgttatactgtgaattctctctttatcactggttgcttctaaaaatgctgtcacactttgattgttttattgttgattctacggtcatctccataattcctagttgtgttttttcttgtcaggctaagaacacttgatgcagttgtaattactcattctcatgctgacgcaattggaggtctctgaaactgacaagttaaatcttgcccatccatcattttcttgtttcatgtttctctgtcctgtaaagtcatgtgttgactccttaattgaagtcttcttctccgttgttttgtattttgcgctccaggtcttgatgatcttcgtgattggacaaacaatgtccaacctcacattccaatttacactgctatacgtgatctcgaggtttacctgttttccaacactccaaaatatttcccaatgctatttcagtagctaaaggctctccaccatgacatgtgaatctcaggtgatgaagaagacccattattacttggttgatacaagtgtcatcatacccggagctgcagtctcagagttggagtttaaagtcatacacgaggaccagccatttgtggtaaacgatctgaaggtaacatctatctctagcttataatcatcaaaactactatgctcagtaataatcttggcgttgtcttatgcatgaattggatgtttttaactgtttcagatcaccccattacctgtatggcatggaagtaactaccgttcccttggtttccgctttggtaatgtctgctacataaggtaaacaaacacacacttccctctaccatttctgtaccagactttgttcatgaatatctgagtctttagttatcgtattgtaaaatatgcagcgatgtcagtgacataccggaagaaacctacccgctccttaaagactgtgatctcctaattatggtaatcttctcaactatctcacctatcgcgcctattgttctttcttggacaaagatagcttcttacccaagacacatatcttcttctctctaggatgctttgaggcctgaccggtcttcagcaacacactttggcctcccaagggtatgaggcttgctttcattatcctccttatattttatttcctctctcgcagtttattcccagtgatcaaagtaacgttctttcttccttccttcaggcgttagaggaagttcggaaaatcaaaccaaaaagaacccttttcaccggtacaatctgctaaactttcatattgaatatttttatctaagattgtgataaaacataaaagtgtatatatatccttttctcgctctaaatgaaggaatgatgcatttgatggaccacgagaaggtgagcgaagaactggagaaacttaggaacacagaaggcctcgatgtccaactgagctacgatggtcttcgtgtaccaatctcaatttaactcggtttattccttttttccctggtataaccggtttataattatatacataaaataaatttccttttttgtaatgacctgttatatgtgcacaaagccacctagaaaattttcaatgtaagcgttttggttataagctttggtttttcgcaaaccgggttaaataaatggctgaaatcagtctggttcgattggggaccacagaaacggtgacgtttttaatagagacagtggcaagaggaagcacagaaacagaaaacacgggaacggatgtgttcataagggcgtctgccaagtcggcgaccagattgcatggctttgttctggttacaattcaattatctcatgacacgtgtctctgtcggtccggtatggtcccctcgaccggtcgctttcacgcgtgtctattaccgaagttgacattagagtagaggattccctcgaaattgcattatcccttctcattaacaaaaataataattgagttttatgtctttcttttgaaagttcaagatttgtagctattagagtttggctgtagaactatttaacgtgtaatgaaaaactagttaaaaaataataattgaggctatgcatgttactaatgtaagagatagaaaacgacgtcggcgagagaaaaaaaaaactatatgaaaagttaggtgcgactgttaaagaaattaaactttactattatggggttaatcattaagtattgtatttaatttaattgttgaattgaaaaactagatggggtccatgtgttagctcaatcattttcataaacaaagtggccctactatttttcctcatatatgttgtataatttatgctccgctcgtgaactcgctgtgacttattgactctcctacactgttttactcacgaacctttcagactttaaattatgaaaaaatgaataattttttgttcaagaccttcatttcgtaaacgaacaatggttcttacttcttagttgaatcagatatgttctatatcataatccagtcctcattagaatcattcaaacttgttaacacattctagatttcttaatgatctagaaaatgttgtttatgtggtgtcagaatatgatatttgttactccatgcatagctgacatggagacagagacgtgtaatctttttatagacccataatttcaggacagttgaataaaaatattatacacattgccttcccagctccctagtttcatctaaattcatattttattttcatgtcagccttactgttttgcttctatttttcgacttaaaatttagaaaattctccgtatatgtgattctgaagatttaagctaaaccatatgacctagagtttgtgtgatctatacgaggcacattagttcttactatcacctaattaggttatattcaaatttcaaataaacattactacttttgataacacatttaattagattaatgggtttcttataaagttagttttaatgtgtggggtgagctggtgtttcatattgggtagaggatcggacaaatcacattaagaaaaagctaaaataattgtgggataaaacaagaacaagacaaaaggcgaaacattttatattgttctattttctttatgagaaaaaaatatcttttcagacaatccaattaactgttgatgaaaacatgctgtttatgattcagattacctttaaatgtaagaattactctaaagtacttttgtttagaaaataacttaattaggtaaatggtcttggcagtttgtatctaaatgcaaacgcaattaattagatatgacggcgggaaacgtgtagagaattttctagcagtagcaccttactaggatctgtaaatttacttgatagttgatcagtgatcacaaagctggaagtgcaatatcttaagacaagttaaatagagttttaggtaaagaagcacatagtgtgttgacaaaagagtcaactatttatatgtttatagataatattatgtttttggtcttcatcattcactatcttctcatgtcatatcaaataagaatacaaataatattaattaaattatttatgacaaaaaagtattaattaaattattctttgatatattgcctgggttttattggctcgacggcctttagaacgtcgaaaattttccacttctctatcaatcattttccgaagtaatttactttcaacttttgtagcatacaaacatcttttggtcatttcatatccatttaccattatgtgtataatcttctagtattctgtctttgggtcataaagtaagttagggcatgcagcactgacaaatgattaatccatttaaattcttttctttttttttgttaaaaaattaaattcttttcatcaatccatttaatgcaaagtctctcattttttattttaacatgaaaagcatcaaaatcgaaaagaaaaaaacaaagatacaagagaaaagttaccttttttgcgcaaaacctcaaatataatcaatgactcaatcatagcttagttctgtaaatgacagtgtaaagctgtaaaaatactaatctcaacctaaaagctagttcaatttaaatgagaaatcatataattaattaagttcactaagtttggtcggcaattattatagtggaccataaataagtatttatgtcacatatgtttttgtgtgtcacataaagtagtagttctgattcatgaagagtaagaaaaatagtgaaataatatatctactgcttatcgagaaacgtaagaaaaataaaaactatagttttaattcattgcaaagacgacctctttctgcaagctttccacagagcttgtgagaaagttatatttatctttttgccaccgttttttacgaaaactaaaatattatggatttttgtttttaatacggaaaacaaagtgtgcaggtaatgataaagaaaggacagattgctaagaagaaaatacttttttttttttttaaagagcagaaaatgccagtttttcttagcggtagggttcttttttttttgtcaattattttatttcatttttgaattttcggtttcaaatactcagagagataggaagataatataatttctcttgtccacaatctctctctttctcccctctctctctacttctaggtatattggagatttcttccatcttttgttttcttttgtagtttaatttctcaacttcttgttcatgttctgtgtagtaatttgttgctaccttttattttgttttctgtgagattatttcgtgttgatttcaaacttgaacaagaaaagtggatagatattgtctcttgggttgaagccaaagaaggaaatgataatatatacatacacacacacacacacaaaaatcaaagaaggaagttttataggattatatatatagctagagagtctcatttcttgtatgtttctgtttaatcttctcttttgtctcctttttttatcagtatatgtctgtatgtatttatatatatagatctgaatatagtttgtcgatttctaacttatttcgcctcttcttattcttttgttttttgctttaagtttttttttttgtgtgatgatgaacaaagacatgttacttcaccagcatcagcaaccacaacaagacgagaatatgtcgaatctaacatcagcttccggggatcaagcaagtgtctcttcaggaaatataactgaagcaagtggttctaattacttccctcatcatcagcaacagcaagaacaacaacaacaacagttagttgttccagattcgcagactcaaaagaagaggagaaaccaaccagggaatccaggtttgtgtgaaaagaatacaaaaactttcatgctcttggactgattcattattccaattatttgatacagtcaccttcttggaaattctgtgtcttctcccgaaaagaatattctttttaccctttttgttctctttatcatcctctattccaaaacaaagaaaaataaaaccaagactcagactaaaaagaaaaattaataacttgttaaagtatattttgggctgtggttagtatagttttggttactattaagcattaatcattaaaatgtaactttatttagtgtttcttgatttttctaacaatggttcaataattttctttttaaaatttcagacccagaatcagaagtgatagctctatcaccaaaaacactaatggcaacaaacagattcgtgtgtgaaatctgcaacaaaggttttcaaagagaccagaatctacagcttcatagaagaggtcacaatctgccatggaagctgaaacaaagatccaacaaagaagtgataaggaagaaagtgtatgtatgtccagaagcaagctgtgtccaccatgatccatctagagctctcggtgacttaaccggaatcaagaagcatttctgtagaaaacatggtgagaagaagtggaaatgtgataagtgttcaaagaaatatgctgttcaatcagattgcaaggctcattctaagacttgtggcaccaaagaatacagatgtgactgtggcactctcttttctaggtaactctattctcccaaaatcaaactctttttcgtttctctctgtttattaattgattttaagaacaaatatagtaattacattaatcgatattggtgatgaatatgagatatatgctgtggtgttgtaagaattgaagggacacatggtacaaacttttctttgttgtgttatgagtaatttcatttaatttgaaagaggacaaaaatggtagctcaaaagaatcttcatttataatatggaactagttcagggtactttcttcatttcttttcatttctcataaaaaaaaagttattatgggttatttttccttgcattaatcattcgtcttataatacacatgtgattgcaacatgctttagatggaccacatgacttttagctcctcttaatttgtaaaaagagagacttttattcttttattgattaacatgttattgatcacttcatggttttttttttctgtgtggtacaggagggatagtttcataactcatagagcattttgtgaagcattggctgaagagactgcaagagaagtagtaataccacaaaaccagaataataatcaaccaaaccctcttttgattcatcaatctgcttctcatcctcatcaccatcatcaaacacaaccaaccataaacgtctcttcttcttcatcttcctcccacaaccacaacatcatcaatagccttcacttcgacaccaacaatggtaatactaataatagtaacaacagcaacaaccatctccatacatttcccatgaagaaagagcaacaaagcaatgaccatatcatgaattaccaccatagtatcatccctccttggcttgctcctcagcctcacgcactcacatcttcaaaccctaaccctagtaatggtggaggaggaggaggaagtttgttctctcttgcttctccggctatgtcagccaccgcattgctccagaaagcagcccaaatgggctctacaaagacacctcctttaccaccaaccacggcctacgagaggtcaactcataataacaacctcacaacgacaatggcggcgatgatgacgtcaccatctggattcatcagctccaacaacaacaatcatgttttgtttcaagactacaacgcatccgggtttgataatcacggcagagaagaagcattcgacgatacatttggcgggttcttgagaacaaacgaagttacagccgccgcaggatcagagaagagtactaaaagcggtggaggagaaggtttgacgagagatttcttggggctaagaccgttaatgtctcataacgagattctaagttttgctggtcttggaagttgcataaatagctctgcttctgatcagcttcatccaaagccttggcagggttagttaggttttttgctcataatatataatatgtgtatatatatttatatatctagttttgcatctttctcttgttttgttcttcgttttataaatttatatgttgaatgctcatcaaaggagaatcacagaaattgttacgagtcgtcttattcatatttcttttttttggggggttatttgaagaaaaaacaaaaacaaaagcaaggtcatgattaatggtcaactgatcatgattattggtcaactcaaaattaatattcttcgttatatgatatcacgggaaagattggcacactagctaggtaggtcaggaggtattttaatcgactgtcaagtggcttgatgagttcataattttcatttattaggttcttttgatgaaataagtatctcgaccttaaatttttatccaagtcaaaatctttttacttttttcgaaaagccaagatttttactcaaacgtccgaagaaataatgaaatataagaaaatgactatgaaatgtggcacatgaaaagcagaggaggatatgcattggattcgatctaagggtggtgactcatcttttgcttataaacctatttcgaatattggtttttcttattggatctcatctcacgcaggcacgtaaatgggacccatcagaagatagggacacatcacgttttgcttggtggcatatatttatcagtcatggacataactttaaagatgttatattgttgatacacaggtttgcagcacttcatcaattaatattttagacattgtaagatatatatatgtcccgggattattctaaaatgaattccattaacataattatatatatatatatattatgctccagttgatcatatgtaaagtttatctggctacaacaagttataattctattatttgtaaggttttattgttttgtgtggtattcgatctctaaagaattgtaattttcacatgcaataaagtgtggaaaatgattgaaataaatgaaggtgccttcctgtttttggacgaggcggatgtgacatcaatttctgtttatttatagctaaagtaatatttatgcatttgtcatatagtgtataaataataattaaaatggaagaatttacaacaataatgaaaagaccataaaatattcattgggacacatgatcagaaaaagatggtttatgatctaaaaaagagagaggaattcaacttatagtttataatcagcatatgatcacaaatggtaggttttgttaaaactttacaaaatctggtctacttgagaaacttgcaaaaagaaggacagaagaaattgaattgcaaagaataaaagagtatcttgattctaaagatgtgtaatgtcaattcatataaccacgtctgcgaaaaaggaataatgacatctgcagttacatacatttttaggaattatagcagaataatcatataccatcatttttacgtctaaaatttacggatgtaaaaggtgtcaactacagaggacccatgaatttgtcaatatcatgatggttttggcatttgtaaggttttgctttttgtctgattttaatgaagtgatcccacaatcactattaagtatttacttgcctttttttttgcttgcttgtcaaagacaatgacatttacaaaaccttttttttttcggttcaaatacaaaaccttatgctacacaataatgcttgtaaaagttatcaaactttgtaaccattcaatgttacacatacgaaaaactggaactttattacattctacgacaaattacgtagcaaagtgatgaagatggtgacagcactaacgtaagaagaaaaaggaacaagcgaatgcactcaattaatttgtattgctcactttactccattttctacaaaatgggttgtctatcaatgggttgacctagttattccaaagttggatttcaattggttagtcctccttctaatgggttcgacatggccatttaattagaccaaatcatataagccagtttttgtcaattcaacggcccatttttgtaaacatggaaagtctgatttacaagattttgttacagttgtacttaacatacaatctaagatacggaattgaccaagtaatatatcctactatatcaatcatttcctttaattttgctttagatatttgacatgaaatttgaaaaggtttggtggagaatattcttaaatcgcaaccaacattatctgcctatttaaaatcttacaaccctattgcgacctttcacattacacctaaaagaaagaaaaaaactccatttgcagttttggttttctgaaatttagaagaatgacgacgatgtctaatctccctgcagaggttttggaagagattctctcaaggactccggttacatctctgaggacaatgcgatctacttgcaaaaagtggaacaatctctcaaaaaagaagattattcctgaagctgcaaggaagcagcaaggtttaatgttgattaaaaagaaaatctgttccttgagtttcagtctccatgaaattcacaaggatgactacgtcgttccgtgcattaatcaggtcgatattcctcgcaacatagaagtagagaaaatctttcactgtgacggcatattgttatgcgtcatagaggacaactgtagtcttttggtatggaatccatatctagggcaaacgaggaggatcgaagtaagttccgatgccgacatgaatgataggtatgctcttggttacgacaacaacaacagtagccacaaaatcttgaggattaagaaagattttaagaacagcgacggtttaggatacgaaatctacagattcgcgtcgaattcatggagtttgcttgatgaggaagtgatgaaaccagagtgggatgtatggtctgttcaacgaagctccgtgtctttgaagggaaatacgtatttcttacttcaagggaatgattatgatgaccaagaggacgaagaggaggaagatgacgaagagtacgaagatgacgacgacgtcctgccgaaagataattttttgctctgttttgattatacaacagagagatttggtccgcgtctgcttctaccgtttaaccctcatgttgaagagactgtggctttatcttgtataggagaagagcggctcgtaatgctatatcaaagcttcaagacatataagggaatagagatttgggttacagacaagattgatccgaaagcggtgtcgtggagcaagtttctgaaagtggatatcacaccactcactggttttccggttgacttttacgctgatagtttcgtcattgacgaggagaagaaagttgctgcggttttcgatatacattgtagctaccaaaaagctcacatcattggagaagatggatacctgaaatgtgtgaatatgggaagagcttcggatgttggaaatggtcagccacttgtgttctcttcttatgttccaagtttagtgaaagttcctgtcaagcaaccaaagggtaaaagaaaaggtagatcttctgaaaccaaaagcaacaagaacaaaaaaggaagaaagattaagattattggttaagtgcatttgcagtgctttattttgtttcttgcatcgtctcctctttttattcattggctttcatgtccttttgaacaagactatcttcattcggttattcattttcattcaatatatagcagaataatcatatttaaatacagttcgtcaaatgttgttgtctttctttttctaagatcgatcctaaatgtattgacatgaacaagtcttttgcaaaaacgtggcattctatcttcaaactttccgaacaagagggactaaactcctacatttacaatgagtaagtctatttttcaactcggaagaacaaaatgttggattacagtgatgtaggtatcttcaggacaaggaatcgctaagccacccattggatgatcaaaccttgactcgttctcgaagttactaattaaagcttgaaaccaaggttggttcaagtatgagattggaacctaatatatcttcttcgggctctctttgacgtacaccgcaagcaatctgtgagactgatatttttgttcgtagatcttttttttgtttgaagttttaatttcttttgttagctaattttgaagatgtatatagtaggaaaagttcaagtttttggattggtcctttttgtttgctttataaagagttgttagttttgtgaattatttacagatcaatgaatgagttaagatctctaatctatatatacatttttgcagtcattttgtgaaataaatcctgcaattggaacttatttacaatggctgtcactggcttattaaatgcaaaaattaactaccaaatcaaagcaaatcttattcaaaagaatatgcttttatttcatggcctaattatttttgccaaaatggttaaaatatttaaaaattaaataaccatttgaaagaaaactttaaattgatttaaattataaatcttttaataaaaatattattaaaaaaatagaaaaataatttcaccgaacatgattagatagtaggactagatggtaggacgtgtttataatattataatatataaactttataataattaaataaccatttgaaaaaaaacttttaaattgatttgaattaaatattttttaaactaaagtattattaaaacaaaaataacaaaataatgtctaattttactgaacggggttagtggtaggacgggtttggtcgatagtattatgagacggtataccacaagtgaaatctattagatatgtttaatttcaatgtgcaggattagatggtatgacgagttttgatcgataataatacgaaacgatatactacggatgaaatcctagatataacaactaaaatctatatatacattatcttaaacactaaacaaagcaaacaatattaataaaacaaatatttacatatacattttatataacaaattttattaaaaacctagccccgcggtataccgcgggtcaaaatctagttaatactttatggtctacagtcagactaacacaaagaccagcaagttctgttcttcattaagttgtaattagttcttaatgttgtaaataccagaacaataagtatctatcactggtcaagttgttctttgatcacaaatgacagttcttagcaaagaatatacaagtgtcgtctctcacttcatcatttaaggagacgaacaaataatgacgactttgtccaatctttcagtagatttggtgggagagatattctctagagttccattgatatctctgagtgaagtgcgatgtacttgtacaacgtggaacactttatcctggaacattttgtcggaaaattatgtttttggtaaagcagatacaagtaagcaatttctaggtttcgtagtaatgaattctaaggtttgttccctgagacttgatctccaaggaatccacaacaacgatttcgttgatccatctttaaaggaaataaatatagttgatcaatacgatatatctaatatatttcactgtgacggcttattgttatgcgtcaggtggatccaaccaagaagcaaataccataagttccacagattagacatgtatgctttcggttacgacaaacaacaacaagaaccgtaaccacaaattcttgaggaagtttttggatgatgatgaatacaacaaaagcagtaaaataaattttccttccaagttcgagatatattattttaactctgattcatggagagttcttgatgtcaatcccgactgtgatttagaaagagatgtgtctttgaagggacatacttattattatgctcgacaaaaagaggtcggagagccagtttcaaatcgtattggttttttactctgttttgattttagtgatgaagagactgtgactctatcttgtatcagagacgagcagctcgctgtgttatatcaaccctacgacttatgtttggacttgttcatggagatttagataacgactaaaattgagtccaatgcagtatcatgcatggaccaagttcttcacaatggaaaggacatcgctctctggtttttcgagtaaagagcttctttatcgacgaggagaagaaagttgctgtggtttccaaatctcgtaagtatagaccgaacgaaaactgtggatacgaaagagttaacatcattggacaaatcatttgtgaaaatcggaacagatcatatctggaaacctaaaaagtttagatattattttgatccacttgtgttctcttcttatgttccaagtttagtgcatctacgacaaatctatcaactgggcaaaaggaaagagctagagagattattaattagttccactgattacaataatttatttgtttcttcttgcatcatctccttttgaacaagattactgttagtcattttaaccaatcacctttgtagataagggatacaaagatggaataaaatccaaataaaaataattaaatcattttcagatttccttctgtattaagcatttattgccaattttgaaaagatttcttacctataaatcgtaaactaacacatttgtctagctacattgaacccaaaacaaaaaacacctaatcacagtccttggtttttctgaagtttagagaaatgacgacgacgacgacgacgacgatgtcaactcttccaatggttttggtagacgagattctctctagggttcccattacatctcttagatcactaagatcaacgtgcaaaagatgggaggctcaatcgaaaaccaatcttgtaggtggtaaagcaaccgcaaggaaaagcagttacttagggtttatcctcattggtaacaagatctgttcaatgaagctcgacctaaatggcggcgatgactttgttgacacatcagtgaatcaaataagtgcattcgatgacttcgagatatctcaactctttcactgcgacggcttattgctttgcgtctccaataaacactactacagcaacacggtcatggtatgtaacatgtacttgggggaaactaggttgattgaacactgttgcttgttggagggattcgacaacttcggctcgtatgctttcggatatgatagcagcaaaaaccgtaaccacaaaatctttagaaagaaacttgtttctggtggttatgaaatctacagtttcaaatccgattcatggaaagatcttaatgttgatctcggggaatctacagaactttgtgaactaggaagcgtgtctttgaagggaaatgcttacttttcggttataacgaaacatgaagaagaagaactttgggaaaataatttactctgttttgacttcacgacggagagttttggaaagtttctgtctctgccgtttgacaatgtgactgctgaagaagaattcggcattatggttttatcttgtgttagagatgagcatcttgctgtgttatatcaacttgacactttaggtatttggatttcgactgagatcgagcccaataaggtgtcgtggagagagtttttgcaagtagacttgtatacgctggatggttttccggatgcatttacagctgggagattcattgttgacgaggagaagcaagtcgttgtagttttcaatgaagctacagagatcgatctcaaccacggaaacgctttcatctttggaagagatggatacttcacctcttttaacgttggagatactccgccccaagacttcacttcttatgttccaagcttagcctcattgcaaatcgagaagacgggtggctaaaaggaaagcaagagatgactagattgtttcatctgcacttctttatatctctcttttgtttcagtcatttactttcatctccttttgaacaattctgctttttcatgttttttttagcctatttgggatatttgctgctgtgataacatcttgatgcgttttctgttattactttatttcttttaaatttggaagcttacaacaaaaactaaagacaaacataaagagctacttccacaatgaacaaaaggaaactgcctctcctttccacattaatccagcaaaggtatctccatcttccattcttatttcccaattgttgtcatactttcttagtaaggatttggctccatcaactgcatcttcttcaaatgcttctacaaaaaaaccagcttctctcatcctctcataccatttctcttttccttcattcatatctcctgcattcatcaacacctttgttgcctctccttccattagttttctctcttcgctattctcttctttaaatcccgagcttgttgaatccagaaacttccatacatactccagtttcttcgagaatcctgctgcaaagtccgcactactactgcattctccattgttctcacaaagaaccactccttttggccttaaacttctcactgctttcaaagtctcgcctctctcatcattgatgctatgcttcaggtgatgcagcctaaactgagcacacacgattaagttctcgtgaggtgaggtatcaatgagttgtaacttgtcaagtacactaatctgaaggttgatcttgagagaccgagcaaagcctaggagttgagaaccataattgtaacctggtggaccaacagagaaaggtatgtctgcggttagatctgatataacggttattcgaacacgaggaggaggtccttctagtctgcagctcagagcctccaacaaagtgggccattgcataccgtgagaaacaccaatatcaataatatgaagatcctttttatctttgggatcctgtgctaaaatctgcaggatagctgagtttgccatgttgttaggcaaagcaaaccaagggcttacctcgtagaacttaagcagagtcttttgaaacatcttcacttccgctgaagcaaaagtaaaaacaggccaaaaggatgatgacacagaggatgaggaaagatgatgttgcaaagcccgaagaccaaaagctgcaagccgacgattagcatcaccagaagaagaggccagttcagagagaacacaaaggtaatgttgaacccttgatgagttacttgccgtaatggccaaggcacaagggttaagcaacttctctgcccatctcccttccttgttaccatctttggagctcttctcactagacttgattgcttttctcttgctccttgccgattttttcacctgttgtgcctcgagaaacccgtcgtggctccttttcctggactgatcgtttggttgctgaatttcaggtggaagatccaaatcaatggatggagcttctgttaccacttccaggttagttgcttcacaaccaacatatgctgcactaagatcttgactatagctttgaataaaaccatgctccggatcttgagtctgatcccattcccacgtttgagacccatcaaactcgtggagcaaataagaatcatcaaatcctggtaatggggataaggacacagaatcctcaagccagcttaggacatgatctagagtctggtttggtggttctgtttcttccaacaacattgaatagatgatgaaaaaggtataatttgtgagtaggtgatatagtttttaaggtataagataaacaacagtaacaggaattgaaaacaaatggatggagaattctagatgagattcgtatatatattgaaatggcgtgtgatctgcatatataggagtgtgtcaaggactatattaattagtaactacctatggaaaatagttataagacttgagaaaataccatttgaatattacaatttgatttgaatgttgcaagtcaattactctcttcacttattgcagtttgggaccattgtactacactgaatatgttgcatatcaaacattatataatgttatatatgaatagttttatagaagatttgagagattaaattatcaacctgtactatgatgatgttgtcattagtattaaacaaaaacaaggcttagattgtggggacataatatgatgcatgcatagaatctggtgttatcttctattccttggtcaaatctcaacgataactcgtttattgtatagagaagttattacaaaagaaaactacagatttaacactttcaacaacattacattttaactccatagaacctttgaaaaactagaatggtctttgatgaagtttttttttgtctctctcttgttattggattcagtaaggaagaattacatgaacaatacttcttatttagaaggtggtggtgccttggaagcatcttgcttttgatcttgcttagaacctccactaacagcagcggttgcagccacggtcatagctgtagcagctgcaccaagcttaacacctccagctgctttcattgcagccgcaacttttgcaaatatcgccactccacctactaagatacctctcaaagcaactgtgggtttcaccgacatttttttgtctaatcctgcacattttcatatcaaaactttggtcataaagatgttacaatacatagtggaaaaaaactttctcttctgctccaaagaaactttgctaacagacaactaatttcactggtagtagtgtactaaaatctaaatcataagaaccaagaaagctctgcaacacagagagataacatctagatagcagcatatttacttcacaatacatgtcattgagatagcttggatggtttcaaatggcttttaagaacaccaagaactctcaaagcaatgtcaaagagttccgaatagctttaagtgcattcgaacattaacattgttaaactacaagttttcaaataaaaaccacaatttttttccctccacccaattgcaacaccagagctattagcctgattttgaatctaaaatcgatcctaaattaaattgcattgaaaaaattggatctttttaaccacaatcaacgaaatccattcattgaccaaagaatctagaacatgggctataactttgtagtaccaagagcgaaatacaatcaaaaatccacctacgaaactaacaatgctaggaagaagaaagcaattaagatcgtttcagaacctgagcaaaaaaaagtctttttaatctgaggaaaacaaagaggcgacagtatattcgattcaataagagtattcctttgagattcaaccaaaatcaattttcagtctaataaagtttgaaactttcgattcaggttatgtcggaaaaactcaccgtcaatgcgcttgttcctctcttggtatcggcgacaacttctctccttctcagaaaatgctaccgagtttgtaacaatcttaaacgacgccgttgacaaaatactttgctttacggcgtcgtttcaaacactaatgacactttctttcttacggcgtcgctttcgcttctccgttataaatacttgccgtttatgcgtcgtattaagcacttgaatttccaacaacattatactgtatgtaacataatttatgttactcatgaacacaagtttttgttactgatttgagataaacgaactagtgttgtgtgatgtgagctttgcatacaacaacttagttttggtttgcatctctattagttttagttttcttgttttaaaagctatttgctgatgggaatttattgatcttgtgtgttagactgtggataaacagaaacgaaagctggaagaatccgacaaggcactcgaacaaagaaggtgacatcttgttcctaagtttgtttcttcaatgttctcatggaatttgatctccttataggaacatctacgttagtcagtgttacatttttcttcttgagttacacatatagtgttacatcaaccttagtcagtgtttcgagtttattcttatatatcatgagctattgatgcatctagaaacgataccaaaatgttgcatttgtttaccaacttgtgttgttcttgggttttctggtttcagactcttgtacgatatgaagattgtctcacatcataagtcaaaggaagccagaagaaggaaagaattaacaatggtagtagtttttggtcagtttccatatctccaccaattccagagctgaaagtccacatatgtcttccccaaaacctatggaaggttccgtgtacgagaaaatcattgtgaatccctcatatcttctagtttgttttggaatttaggctgtaagtggaatctcaatcctaaacaaataaattttgttaaacttctagttattgcttttgaatctcagaaaagaattggttgcacatgaagaacaaaaagcaggtttaaaaactggtaacgcaagctcatctaaccatatacttttttatctgttcacatccatacacataatattcataagctatacatagccaattattagtaaaattccagtcgtccattctatttttcaccattagtaaagacgagaccatattcactttctatcactttctaaatataggacactagcccatgacttgaattggtcaaaatctctttctctctctcttggtctcattttctctgtcttatatcagcttgtctctcctccctcatttctctccattcccctgcatttccttcccaccaggagaaaactaaggaaccgaactcgccaaacccgtcaaacaagaaatgccctcaggcaaaccttcttctgtcttccctttacatcccaaacctacaccattaaaaccttctagcagcaccagcagcagcaacaacaacagcacaaaccaagcctgcgccgcctgcaaataccaacgcaggaaatgcgctcccgattgtcttcttgctccttatttccctcacgaccgtcaccgccaattccttaacgcgcataagctctttggagtcagcaacatcaccaagatcattaaatcccttacccctccagagaaagacgcagctatgcatacaatcatgtttcagtccgatgctcgtgccaatgatcccgttgatggatgctatggcatcataaaaaagcttcaataccagatcgaatacacaagaaacgaattggagattgttcttcagcaattggctatgttccgtgaccgtgctcatcaacatcatcatcaagaaccgcatatccagatgcaagaacaagaggatctctcgagtttttcgagttcttgtgatctaaacaacaacaattcgattccttacaattaccctctgaatcacattcaagaaccaaatcaacaacaatattgttcttccggtaataacttcagtgggttacaagaagacatgtggtgtcttcaacttcaagattcatcaacgatagtgaatatgaaggctggtttcattgatgaatgtgaagacgtaaagcctgtagaagaggtttctagcgaacgacacgagtttgagcctcatgaagctttcgttgaacaacggaaactcgacttgccttccgcacaatacatcatttcttcttagctttttttcttcttcttcgttcatacagtttttttttgtttatcagcttacattttcttgaaccgtagctttcgttttcttctttttaactttccattcggagtttttgtatcttgtttcatagtttgtcccaggattagaatgattaggcatcgaaccttcaagaatttgattgaataaaacatcttcattcttaagatatgaagataatcttcaaaaggcccctgggaatctgaaagaagagaagcaggcccatttatatgggaaagaacaatagtatttcttatataggcccatttaagttgaaaacaatcttcaaaagtcccacatcgcttagataagaaaacgaagctgagtttatatacagctagagtcgaagtagtgattgtcccttaggggacatccgataaaattggaacgatacagagaagattagcatggcccctgcgcaaggatgacacgcataaatcgagaaatggtccaaattttttttgcaaaattttccagatcgatttcttcttcctctgttcttcggcgttcaatttctggggttttctcttcgttttctgtaactgaaacctaaaatttgacctaaaaaaaatctcaaataatatgattcagtggttttgtacttttcagttagttgagttttgcagttccgatgagataaaccaataactttgcttagatctaattcattccgttacacctctgatggagatggaaggttcttaataatgatgccattttttgggtaataattttgaattagaatcaagggtataagattcataattaacatcacttaagcaaagttcgtaatatacgaccacaggatataatttttgaattcaacaaaattcattaaaaattcactgtaacaatatatatagaaccagacaaccaaatttaaatcgagaaaagtttctaactttagtagagaaaaataaaaatttgaatgtttctttttttgtagaggtcacaagatcacatgcccatgctggccatatcagggacatggtttggagtgttctcgtctgccttcacaagcactgaggcctctgttgttgtcaaaagcaaagaaacgctgcattttgtacacacacacacatgataaggagttagtttattattccacagaagcaaccaaaggttttgagtttgttaggacactctttacctagcagcatcggttaaggcggttctgatcaccttgactgggtctatgattccagctttcaccatatccacatatttacctatggcaacacgaaacaaaaacggcagacactttcagagatcgatgagatttgcgattgataatgttctcaaagacactaagtttctaacctttggctgcatcgaaaccaaaattgcaatcgtcttgctctaataacttgccaaccactaaagaaccatcgtaaccggcatttgcagctattgtaaatgcaggagcctacacaagattcacaacatcatgtcaggttttacagtttgggacatggacggaaatctttcatcaagaggaagttagagattattaaccttgagagcattctgaacaatctgaacacctcttctttgatcctcgttttcagtttgaaggttgtctaaagcctttgtcgcatataatagagccacaccaccacctatttgaaatttcctccgttaaaggcacatcatgtgagctatatcagagtaaatagagagaagatgcgaataatttctattacccggtatgatgccttcttctacagctgctcttgtggcgtttaaagcatcagtgactctgtcttttctctctccaacttcagattcacttgcccctcccacctatataggaacaaggcacatatcagctacttttcgtatgcaagagtttagaaagaccgattgatgggtgattgactaaccttgaagactgcaacaccacctgatagctttgagagtctttcttgcgttttctcttgatcaaaagtggatgtactcttttcattggctgatcttaactgtagagcatgagagtaaaaaggattgcttctactgtataaagaatattctagtgagcaagattcatgtcagagatattgtaagaaaataatcatatacctcttcacatctttcttcaattagctttttatcaccaccaccatgtaggataatagtgtcatcacgggtaacggtaacctagtttaaagaatttgtgttagatttgaatcacacaaaagcaaaaacagaaaccagttatgatttctcctgttaccttcttcgcagttccaagcaattcagggcgaattttttctagagatagcccacgctcctcagagataacctgtgcataaacaagtgagttagaaaatgaaaacgtgacacaaacataactattatgttgtttctgagaaatttctacctctgcaccagtaagaactgcaagatcatccaagcttgctttcctgttgtcaccaaaccccggagccttgatagcacataccttaagcccaccatgatgcttattgagaataagcatagctaatgcatcactctcaacatcttctgctacaataagaagtggtctactactctgcacaaccgcaaacaataagagaaagaagtgagtagttttcttgtagccaactatagaaaccgccaaaccggacttcagaacatagtattctagataatcaagggaatgctttactttcacagccgcttctaaaactttcaacaaagagttaatgtctgaaatcttcttctcatgaatgaggatgatgggattttcaagctcctgaaaaacaagcacaggtagttcaataccctttctttccttttcacacaatactaaacacgatagatttcactcacgcatttctgggtcttctcatccgtgataaaataaggagaaatgtaacctctggctagcttcattccttccactacttccagctcgttatctaaagtgttaccatcctgggtatttgaagaataacacagcgatcagacaaccatcaagtgatctattataaggcatgaaaagaaaagtaagcttacagcaacagtgataaccccttcctttccaactttctccatggctcttgcaattagttcccctatttcacgctccccatttgcagatatagtggcaacctatcaaaggaacatatgcagtagcagtaatagatcaacctttggtatagcattcacaattcctgacttatgaatatgtttctaaattcacctgtgtgatctcttctggggtgctaatcataacagctctgcttttcaaatcagagacaactgcagcaattgccatattaattccaacacgcaaatccatcacatttacacctgcagccaccgacttgcagccttcgatgagtatcgcctgagtcaaaacagtggcacaagtggtacctatataacgaaaggaaggcaagcagaaattaagactttactattatctcttcaccgtatgttttcaataaaaacttatccatgattatgaactcaaaagagaaaatattaccatctccagcaaccttgttagtggcacttgcaacctgtttgacgagttcggcaccaatgttcttagctttagcttgaaatgatatgctttttgccacggtgacaccatcctttgtgatctttggtccgccataactgctctcaattatcacatttcttccctacaccacagaattaaaaaaaaaagatattgaatttgaagactgtttcaaaaacaatccactctacattgatctaaaccttgtgagaacgaaatatatatacctttggtcccatagtgactttcacagcttctgcaacctcggatacaccctgcaacatagctgcccgagctccgatcccgaaactgatatccttggccgcatagtttctgctacttataatccgcccagaaaccttcatggtaagagagaacaccaaaagaaaatcaaaatcggaattaattagtttgatacagggtacggccaattcaagctaatcattccggaactagaagatcttctattgcatctgaaaccaataaaagcagagcaattttgcaaattaagtagcttaaggtggagattttgatgtaaaccctatttttttcattgcataaactatcaggactagtaatttgacacatttctagcaatttctctgttaccaacaagaatgcccataaacgaaatgcaatcaaactcgcaaaaagacagagagagttcacgaaactcaccagtttcctggaagtagacgagctgcaagacaatcaaacccagaaagaggaagaagaaaattaagctctgctcatcaaaaaatattgatcgagaaaaatacaagttttgaataagttcgttgaatgaaagaacgaaacgtacccaattgaagaagataactttgatagcactcgatacatttccgcttgcaaagaactagagaaggagacgcttcaagggtttagggtttttctggggtttcttaatcaaggaattaagttccaacctccaaagagtgaaacttttttcttttagaaaagctaatagtctggaactttctttgtgctctgtttctgcatctcccataattaggtttacagtttcatccgttatcttaggcccattatgaattttccaatggcccaaaaactctatgctaacatgattacactataaacttgcaatgagaacctgaaattctcttcaatcaacaaaaaccaaactgaatttcacttaatcaaaaaccggtttttcttcaagtaacattctttttatcagatacaataaccacatcactacagaactcgcaaacaaatcatgagtttttttgtttttgtctgcatcagaatcttagtctaggaacatacaagatcactttgacacctgcaagagggaaccaatgccatcggagacataaaacatatggctctcggtgaatctctctgatcaacaccaaaactgagagctacctttttgaaagggtaacgaattttaagtttctagcttcgtgggctagcacaacagcttaagcttgtatacttctttgttctatgcacttgtatcaatgggtacgttttttgctggagatgaaccagagctactgctgctgctgctttctccattggttgtaacctcggattgagctgtagagttcattgattggttgctatttgtgggtggtgcttgtccttcttccgcaagctttttgaggaggttcatgaccgttggaatgaatttggttgacaaagagagaagtccaggtagctgttgttgatcatagatgaaacattggcatttcggtgagattataattgagatcaaatgaagaacaggggcaaaagtaaaaatatggatgttggatatcgtgctcataccacgccgttttggaattctcctgaaatatttaattgcacccacaaggctttggatacaaggtatccgacaaatagaactaagagccatagaggatttctgccatgagagatgcaggcacgaagagccaaagtgagtacggaatcttgattgtatgaaaaagccgccgagtcaattcaaaagaatggacaaggagggtaccttaagagagtcataaattcattaaatccaagaacaaccagggcaaggattgcccatggaggtggcagccagttgttattccgtcggttagcttcctgaaatccaaggagactttattcagattgaaacctcaattatttttccgggtgttagctgattaaagaacagatgagaaaggagacaagaagctagaaacgacatgaccaaaaaaagatattcaaaaacgttttgtagcattgccaaattttaacatcagctcatgtgaatgagcaaacggaagatatgcttgaaagtgtggattgcaaagattacctgtgcagaaatggcctgtgtaacggtatattctgtctcgttcttaaattgcctccacagtgatttacactgcacaggtgtgatcaacgtcttttctggtgcaacctgataataacaaggtaacagtaaggatcttttatatctcaaaggtgtgagtactaaatatgagaccttttgtgttttcattatatacagtgagtaaggttttagtcaccttctcccaagtgcttgaggcaagtgaatcaattgtgctgatgctcttgctagtagcattgttgcccgtagaattaaacagagctagcgtcaatgtcttctcaatattgtcgagttcatcatccaagcgtataacagccataacagacagcagcttcaaggactgaaaaagagaacaagggtcatatcaaaatctcgagaaatttgcgattgattcaaagaataggtgctgagatattgctatatcaggtaggtctcataccgcagaacgagccatttttgtaattgctctgatgtcctcctttccagtccaaacacgtggcattgaatcagaatcatggctgaagattgtagcaaatctggatagaagtttgtttaatcagaaagctctgtaagagatggaagttatcggacaaggaaatgatgaaagacaagtaaaatggtgacacctatccttcatgcgcatcatcgctcttccagcctcttcctttgccttggtttcaacaatacctcgtgcatagttctcgagatcagcaagcattttactccgtgtttcttcgtccatttcgaaaccagataatgcgttggagagaccatagacagccaattctccttcccgtctaagtagctttcttattgctggccatgtttcatcattagccccatccagaagagcttccaccggtccagataaggctacatttagttttgactgcaatgaaaattatctattagaaatgtccagatatgagtttacacctgtttgatggtagataattcagaccaatatgtatggctttcagctgcttgagaattctattttacctcatacagagtagtcagttcagccaactttgcagtacggacagaagagatatgagcttcaatatcacgctcaagcttttcccgagttttagatgtatcccattttgcttgttcaataacagcctctgcaacataacatttcctttgagattcccattgagttcagatatcgctttcaacatgctatctatatcagaatattttcagcagtaatagtaacaatacatgataccttcacatcctttatcaaacttagatatgcatgactgagcgcaggatttcgcagatgatgaaaacccttctccagcatccaaggccttctcaaaagcattcttgaagttttcaagtgctccagccctcaaatgtccaagcacgtcttggaaagttggttgaacaagctggatagacaataagaaaatgagtgcctaatagtaggtatctggttttttacaacgttggaagtctctgaatgtttccaggcaacgcatgattgcaacaaaaacaaagtataacagtcacaagttgagtatatgcattacttgcaataacttttcttgcagctgttgcctcttggatgatctaacactttcttcaaagtatgtcgcttctgtgtcatacctattgtaatcatcagaaacacgtgaaaaaaactcctaccctcctagaatcaatatatgcataaaaaccaatagttcaataaagccagcacacaggtaaatcctgtgcagaaaaattcagcacgatatgcttactctgataagcttgcttggagaattgagctcagctttcttccaaatccggaaacaggaccagactgtacagcctcttccaactcgcgccaattctatacaataatttagacatgaatattaacgaaagggccattgaaaaggctaaaccatgaagcacagaagcagtattaaggaaattcacctcattcgcgataaaactagagaatttttcattggcaatttcctcacatcgcacagttgctaccatgacctgcatatatggagcgcataaataacaagaccagaacgaatgatgatgtacgagtgacaggagagagccttaagcaagcaaaattaccttgtgtgctggaagatccaagtctttgttgtctttgatgacttgccacatctgttttgcactaaaagcaaaagcattggcagggacaactcctcgtcgatcaccagcaagcccgccaggtgcgacagattggaagaaccgttgtctcaaattgtagacctttcatttacagaaaacattatagaaaaaacattaatatcacctacaagccatctattgagcaataaatcacataaggtgaccctggatcttctccaaaatggcaaaatgtaaagctaattgtaaacagacctgctctttgaattgctcttctttttcttcataactcgagagagcaactacttcaacctgtcacacaagaaacaactccatatcttgatcctagcaaaagaagaatgatacgaagtttttctccaaatcaagcagacttacattgaagaaatcgctaagtggagtttctttgtgggcctgaggcttgggaactgaatcccatatctgcattttaaggacaaacattaagggattgctctattagtcaaagtacataaaggctaagactgtcttctaccttttgaatgtcttccctcagcactggttctaaattttccagtggcgtctgcaattaccctggaattagaaacaaccacaataatccagagattcagaatgataaaggacagaaaacccaaatgcatacccgtgttttatctcttataacaaacatcaaagttgtcttccgcggactaaacaaccgcatcataacctgattgcatgtagaaaagcaaacagtcttgagacttcggaacagagataactcatcctgataagaacatacaggcacatacctggaacacagtctttaaaagaggtttatttgctgcttgttcccgaccaatatcatgacaccacctgcattacaaatccgagaagatataagataaagacggcaaaagaagtcctgttatctattaatatcaaagaaaacaaagtaaagaacaccacttacatgtttataagaactatgtctgagactgcaagtgcaaaaagagcactctgtttctcgaaagcagtatcatcctatccatatacaagaaaactgtgtaagtaaagctattctgcactgacacattctcttttagacaacaatttctttgtgtgagctccttaagatttatacagtgcatgaaaccatgttatgactctaatcagtacaattcaaatttcatcaaagtcattcacaattagtgcaaaagctaaataaatactaactgggcgtgagatgctaaatattaaaagaaccgaatatgaaaagggccaaggttacacacctcaccacgctctctcccatcggtaccctctaaatccatcacaacggtgcaaggctcaataccagcgcatctagcaatccaaattcccttagtcgtctgagacctgaaaacaaagaattgcagcggaaaaataaatataaattagaagctaagtattcttctgatgaagtgtatacaaaaattagaacatgccttcctctaaatgcatccatttctctaaagttggttccaaacaaatgattcaagagcgtactcttccctgcaaattcaaccagaatgacataaaatcagccaatatacaaaaaatagattccaaagaagccactttttacattcaaggatttgatacataccactactttgtggacccataatcgagacaaccgcgtatgaaagaccacattcgtccaatttaacctccttgatgaaatgatcaaccccagaaacattaaagacaccatccccatcgataagctgggtagagcaagcggcatctgcaacgtccaagcaataaagaaagtaataaaattagcactatgtacaagtaagcccaaagtgtctctgaacaaagcaagatctgaaattcagtcttcctattcaataacatcttcaaaatctaggctttaaatcttccccacaagttgcatcgagtgtctcctttaaacccagaatccttaatttttgattgattcctcgcattttcgaatcactaagataactgttaatccactagaaacctagccaaaaaatttcattgaaaccccaaatttcaacaacaattaagcaaatcgaaactcggaatcatctaatacactgatctgctactaaatagaagaaagaagaatcaatcacctaccatctaatgagcaaaagagactatcaaaattttacatcagacagatcacaatccaaatcacagagcttagaaagaaactgaaatcgaaaacgagtaacgcttggtcaaaacgaaaactgatcagatcaaagcgaaaaaacggatccacgagatcaggaacatttatgagcagagaagagatggatatataaattacccattatcgctcaacgaaacgcagatagagtgatgaatgacgaagagaatgggacagagatctctaggctcgagctcgttattgatgcaccggtgctttgacgactgcttctcctaaggtcataagagcttctctctaatttgacaaaagaaatatgccaaaaagtgttttttattccaacgaatttttacttttaaaatttatcatatttttacccaacatatatagttctttagggattattattaacaataatattttttacctaatatacatactcttactaatagaaatattgaccaaagatatgaatacattgatttaaataaaagaagaaaaaatactaatttgatggaaaaataattttcaggtaataacattcagataattttcagatatgaatacacattgatttaaataaaagaagaaaaaatactaatgttcagtaatattattatctttaacgaaggaaattatgatatactcattgcattggtagacgataaagtcattatgggtcccatgtaggaaaaatttccatggagggcaattggctggacaatactatagtgggccctacagaaaagcccaatttttagttgggatccacctcgccgtcctcttctcctttactaaagtttggacggtgtgatcggctccgatttactaacacgtggactttccaccgtccgattcaattcccgttgaccacaatttaaagatctttggtttgcttgcttatatgagctttgatttaaattaacacgaaattcatgttataataccaagattttcctaagacaaattagactcaataaacaaatcttttgtgaagaattttcttaaatcaaaagatggtcaactatgcatatatatataggtggtttcaacgtcaaatgtatataccaacacatcgcaaatacgatacaaaatatacacggggcccaaaactattaactaaaggctatatagaggcccagtttggaaaaagaacggagcaaagcgtttatgatctccagagagaccgttgtgttacagacaaaagccgttagtttcgttatgtgatgggagaacatgttgttacagttccgagcaaagacttttttcaacaacattgctcaagattctctggttactcttatcaccaaacgagttggattgggttacaggtttttgtcttcgttatgccaaccaaagaacacggctttagattccgaaggttacaagatactttttcagacagctgcaaaatcaggctccgtggtactgggaaagctcgctcatggacacatgatcaagtcctccttgaacccgtgtctgtacttgctcaacaatcttctgaacatgtattgcaagtgccgggaattgggttttgcacgccagttgttcgacagaatgcctgaacgaaacattatttcttttaattctttgatttctgggtacactcagatgggattttatgaacaggccatggaattgtttcttgaagctagagaagctaatttgaagctcgataagttcacgtatgccggtgcattgggcttttgtggagaaaggtgtgatcttgatttaggggaattgttgcacgggttggttgttgtgaatggtctatctcagcaagtgtttttgatcaatgtgttgattgacatgtatagtaagtgtggaaagcttgaccaagctatgtctttatttgatagatgcgatgaaagggatcaagtttcatggaattctttgatttccggttatgttcgggttggcgcagcggaagaaccgctaaatctgttggctaaaatgcatagagacggcctaaatctgactacgtatgctctggggagtgtgctaaaggcttgttgtattaacctgaacgaaggatttatagaaaaaggtatggcaattcactgttatacagcaaaactaggaatggagtttgatatagttgtccgtactgcattgcttgacatgtatgccaaaaacggaagtttgaaagaggcgataaagcttttcagtttgatgccttcgaagaatgtggttacgtataacgcaatgatatctgggtttctccaaatggatgaaataaccgatgaagcttctagtgaagcctttaagctcttcatggatatgcaaagacggggtttggaaccctcgccatcgacattttcagttgtgctcaaagcttgtagtgcagcgaaaaccttggaatatggaaggcagattcacgctctcatctgtaagaacaattttcagtctgatgagtttattgggagcgctctaatcgagctgtatgcgttaatgggttcaactgaagatggaatgcaatgctttgcttcaacatcaaagcaagatatcgcctcatggacatcgatgatagattgccatgtccaaaacgagcagcttgaaagcgcatttgatctgttccgacaacttttttcatcccatataagaccagaagagtatacagtttcccttatgatgagtgcttgtgctgattttgctgcattaagctcaggagagcagattcagggttatgccataaagagtggaattgatgctttcaccagtgttaagacgtcaagcatttctatgtatgcaaagtcaggtaacatgccgcttgctaatcaagtatttatcgaggtccaaaacccagacgttgcaacatactcggctatgatctcaagccttgctcaacacggttctgctaacgaagccttaaacatctttgaatcgatgaaaacccacggaattaaaccgaaccagcaagcctttctcggtgttctaatagcttgttgccacggaggattagtcacacaaggactaaagtatttccaatgcatgaagaacgattacaggattaacccaaacgagaaacatttcacttgcctcgtcgatcttttaggtcgcacgggaagattatcagatgctgagaatctgattttgagctctggttttcaagaccatccagtgacgtggagagcattactgagttcttgtagagtttacaaagacagcgtaattgggaaacgcgttgcggagagactgatggaacttgaacccgaggcctctggctcatacgtattgctccacaacatttacaacgattctggagtcaattcttcagcagaggaggtgagagaactgatgagagatcgaggggttaagaaagaaccagccttgagctggatcgtaatcggtaaccaaactcattccttcgccgtcgctgatttgtctcacccttcgagccagatgatctacacaatgttagagaccatggacaatgtagattttgtagattacactcttgttcatttttgttctgttacatgaaaatttaatgccaattttctcttgctaagattctgataaattacgaaaaatgccactgttaatttattaaaattgggcctgtggcccaaagcccatgtatcctcgtctttctcgtacattttcgaagagagaactgtgcgacgcttttcgcaatctcggagaagggaggaaaaatggcggccaaaaccctaatcaggtcaggagcttcgttgatgaatcggtttctaacgaagccgacaacgaatatcgtgcagaacaatctca

SEQ ID NO: 1031 - DNA, 52232 bp, Arabidopsis thaliana
cacttaaaaactagctttaaagcatacggtttgtttcctgattatgttcctaaacttgttatgtttccacctgcaggccaatgactctggcttggcttcgtatgttgctggtcaaattgaccgtaccttgagctggaaggtaagagaatacaacaaattttcagataccacagcaaaaccaaaaacttgattcagattgctctaactttcatctacaaaaacaggatatccagtggctccaaacaatcaccaacatgccaattcttgtcaagggtgttcttacaggagaggatggtgagtttccatttgccaaacaaataatttcaacactctagtgtcatagaaatacctgacaaggtcaactattattgtccccatgcagcaaggatagcgattcaagctggagcagcagggatcattgtgtcaaatcatggagctcgccagcttgattatgtcccagcaacaatctcagcccttgaagaggtagatcattctcgactacaaacataaatctgtgttctcgataagtatttatgtacaagcacattagctttgttctcttgtgttcaggttgtcaaagcaacacaaggacgagttcctgtcttcttggatggtggtgttcgacgtggcactgatgtcttcaaggcacttgcacttggagcctctggaatatttgtaagcatcacatcatatatccattcaccagaaagttgcttaaaaacagtaaatatttaaaatgccttctcaatctcagattggaagaccagtggtttttgcactagctgctgaaggagaagccggagtcaaaaaggtgcttcaaatgttgcgtgatgagttcgagctaaccatggcactaagtgggtgccggtcactcagtgaaatcacccgtaaccacattgtcacggaatgggacactccacgccatttgcccaggttatagagaagaaaaaaaaaacagagaacagaaacaacacggcaccaaaacgtattcatattctgattgatcactttgcttctactctgctatatttatatctcgaaaaacttgtttctccctatatcggatcacaaaaacgtgcgtagagattctctgtaatgctatttggctacattttacctttccgtttattcttattgcttgtacaatagatgttgattcctacaataccaatgaatactaaaatctgttcccggaaaactagtatagtcagaaaatcttacattgcacccaacttccacaatccaaacacagttcaaatcttatattaacagcagccaaaacctcacagaaactagctaccaaaagagcacaaaagaatactataggagaactcagattaaggaaagacaggtttgtgagatttacaataccttattgaagaagaatgtaagcgaattcatccttcactttgtgctgggctaagtattgcatcgaaaagcccaaaataatttggctcacgaattcgaaactcttggatttatgcacttttctgaaaaaaaaagaaaaacgattggtttacgaattactactatttttctacgagattaagaacgataatatgtaagaaaaatctaagacacacaccatccatcagatttttgtccgtatctcctcatcaattcttcacctccagcttctcatccatatttctttctttccaatgcaaacaagttttcaactgttaaaagataaaccaaaaactcacaagccaattaatctatcagaaatatttaacttttaaccaaataaaaacgttgagatatatataatataagcgttccttaccactcacacacttcatctctccccagagctctattcccatcaaggtgtgtgagattctctgctaagacaaaccaaaaaccagattgttttgcgttcatggacatgttcctctctggagattagaatcgtagctatgactatgtctgaatttcacaagaggtagctaactcaggcctttttgctcttttgacagaaacacacttcggaagatggagatcactaacgttaccgagtatgatgcaatcgcaaagcagaagctgcctaagatggtgtacgactactatgcatctggtgcagaagaccaatggactcttcaagagaacagaaacgcttttgcaaggatcctgtgagtttttcttttcttttcgtaagacaagaaatactgtttgttattggtttttacaataggtgtgatgcataccttgggctgtttaatagctttcggcctcggattctgattgatgtgagcaagattgacatgacaaccaccgtcttggggttcaagatctcgatgcccatcatggttgctccaactgccatgcaaaagatggctcaccctgatggtaaatactgagttatgtagagactagagagtgaaaacttgttttagtatcgctagagacaaagactaaggcttgttctaacgactctgtttgaaactaatgtaggggaatatgctactgctagagctgcatctgcagctggaactatcatggtatgttcttatatcattacgaaatatatcatatagagcaagatttcttctaaccttcttggtttccggtgtttggagcttttaaatccgtggcccatgcatacccatgtctctggtttaagttattttcatccatgatgtttcagacactatcttcatgggctacttccagcgttgaagaagttgcgtctacagggccagggatccgattcttccagctctatgtaagttatctcaagagcttgttgtacatcctgaaaaccccggtcacacttgatggttcttatgttataatctttgagtaggtatacaagaacaggaatgtggttgagcagctcgtgagaagagctgagagggctgggttcaaagccattgctctcactgtagacaccccaaggctaggccgcagagagtctgatatcaagaacaggtaaagccaagtcatttgaaatatgacaagagtttaatggattttaatacgtaaacacagctagaaagtgtaacgttcttctactacagattcactttgcctccaaacctgacattgaagaactttgaaggacttgacctcggaaagatggacgaggcaagcatctatcagatactatccagtcctataatctaaatatgattctcacaaagcaagtcttaaagcacacttgctatgtttacctttcctgagtgttcctgagcttgttctgttttcacctttaggccaatgactctggcttggcttcatatgttgctggtcaaattgaccgtaccttaagctggaaggtaaacagagtagtttaacagataaacaacaaaccgagaagttagtagaaacttgattgttgactcgttgtcacttcattttcacgaacaggatgtccagtggctccagacaatcaccaagttgcccattcttgtcaaaggtgttcttacaggagaggatggtgagttaccatctgacaaacaaatggctacttcccttaagtttaatagaaaacacctaaccaggtcaactataattatcctcgtgcagcaaggatagcgattcaagctggtgcagccggaatcattgtatcaaaccatggagctcgccagcttgactatgtcccagcaaccatctcggcccttgaagaggtagatcattcaagagtacaaatgataatttgtgttgtcaacaattgtcttttgtccgacaaattcagctctgttctcctgtgttcaggttgtcaaagcgacacaaggacgaattcctgtcttcttggatggtggtgttcgacgtggcactgatgtcttcaaagcacttgcacttggagcctccgggatatttgtaagcatcatattctcgttaaccagaaagctgcttgaaaccattgaaattaacacattgttattataccatctcaatctcagattggaagaccagtggtattctcattggcagctgaaggagaggctggagttagaaaggtgcttcaaatgctacgtgatgagttcgagctgaccatggcactgagtgggtgtcggtccctaaaggaaatctcccgtaaccacattaccaccgaatgggacactccacgtccttcagccaggttatagagaggaaaataaccaacaagcagagaacagcagcaacacagaaccaaaatattggctaaacttattcatactctgattgtacttggcttctactctgctaaatatctcaagacttgtttctccctctatcagatcacaaaccaagcctagtgattctgtaatactatttggctacttctttcttaaggccattcttatttctaaattccatgtacttacattcccacagatcaatttcttgtgattcccagataatacgatgaacatatgcatagctataaaccaagtgagagtagtagatgaaaccaaacttttattattaatcaaaacacaaacgaaggagaattacattgacctattgaacaaactgaaatgtacaagagaagaaagataagcgttcattgacgtatacaagcacacaagtcctacagaaacatgagtagtactcaaatcagaaaccaagaactaaccattcaacacaaaatcttcttcttatcatttaaaacggccagatgtcagatccaccgggtttctccacaagaatccgattatactccggcctcgacgtctgccaaaaaaaaagaagcagatcaacatgagaaaaaatgcgatccggagtcgaaatcgagctgattcaaaagaacatagccacgataatcagatgaatttaccagatctttgaaaataacgtaggtaataagcatgaagagcacaaacaggatctcaaactcagctaatcggaagaaatagaacactgagtcaacaaaccgagtcagaagagagtcgtctctcctcataccgactcgattagttccagcacgtcgcccgatcatcgtcggtaaaattctccctccggctttaataacagaccaccgtcgcttctcgttagttctctcccaaatcttaccggcgagttagtttttccgttaacgaataataagttgcaagtctttttgcttttatcaataaagcattttacaaacttacgaaaatatgggccgttatttttaaaaggttaatatatatcatcagagcccaataagagaggatcaaagaaacgacaagttgttcaccgtgatatagtaaaaacagttccgtttttaataacgtcgcttccacagctgaagaaacgtttcctatctttcgaagttgcatctgaagtttgcaacttggtagcttaaaagcttagtagttgttcattgaaaggatggtgcgttagttgatttctctgtgttggattagatgattacagcattcttcacttgacttggcaaccatagttttgtttgtgaagtgatcattatggatatatggtccacactcaaatttcaaattagcgttttcaaggaccgggcctggatatttgagccgaaggtgtacattgtgtgtgggctcgctttcttcaagggctttatcactggccgggttgagtacgaattccaacaccaacaatcctgatcagaagttgtagtcccaatatgtcggccgatcgattttgtttctctctttgtttctattgaccttatcagattttccattttggtttcaaactccaagtgggtccaaaataagaagcatcgttttcatgtcgttaagtagatgagaagagaatgttaaagagagaagatatgttcttcttcttcttcttcttcttaatcagtgagtgccctatgagactgggtgtgtggtacgttgacggtcacgtggacgtgtccttctctgcccttcaaaacctctaatacgtccagaggctaatgcgcgtggctgattatgacattttatccctttcgggaatatgtcgatgatgaaagcaaattgaagttaaagttaaatcccaaaagaaaaataaagataacaaaaaatgaagattggtatgctttatccattttgtggctttcactcatcatgtgcttagttttcatatcatcatcttaagcggtccatggtgacttgcctccagacagatttttctttgtcgcgatattgtaagatatggaacctgattaatactttattgtaataacttgcgaaactatatttcaaatgtcctggataaagttttgaaacatgtcatgcttaaatatcgttcatacaaaagttttgtaacattgttttaagccaattatagatcagcatatccgcttctagatctatggattcaatgaagattacgtgcttacatttttcatttttattttgaataaccaagagattcccaatttttggtttgcaatcccctcgaagcagggcttagagtatgtcaattagtcacttcccaaacagcaaggttcgaacctgatatttcgagacgtattatctatctttggaaagtcttctaatacatcaatatagctactgaagatgagttttgtgttgtaaacgtgttcagccgaaaattcgtcacaatatctttttttttctttccttggcattctcggtcaatgaacatctaacatagattctattttctatcaattatttggtacatatttgattcacaagcagattagatcaaacgtatttttaatccaaataaatttagtttatataattaaactgctttttctctttctgcatggttcgattcgaattaggatttggtttttcgaatatagaaataatgaatccagttaaactatagttatttaggtttggttcatatcgggtttgatcggatgaacaccaagtagactcctatgaaactaaacccaaacaaacaaaattttagtatgcagcagcaacaacaacaacaaaaaaacgtacaaaaaaaataatgtactattttcctttaaaaaaaaaaaaaaaagattgtactatagaataagtatagaacaattaaatactagtacacaaatgttattaaatatcatcatatatcaaagacatgattggcctatcttaacgctgaaaggtcgacctccacacaacacaaatctcccagctgtttaatgctgttggtttctttctggggagctttacattatatatctataaagaatgtatatattcagcatcaaatattcattcacaagaatcgattattctatgaagaagatcgatatccaagtaaaattcgaatctatattattggatcgatgagactaatatatatggtagttactagttagttaggatattatatgctaaagttatggaagtataagtaatgtggcttgcattattggcattttatcattttataatatatgaggcacgattatagtggtatacatcatcttgttcgtcactctcctccaattcttcacattttaaaaccaacaatgaattttaaacttattttctatttgttgcaataatcatttatcgctttgacgcctttatccaaaacaacgatcttatgccaatgtatgaactacgaacacgtgccccagtcaagatagagtaatactttctctctttttcaataatttatcatatactttctcttattttgatcagtgacgacgattggagcagaaataaatacataaaataattcgggtttgaattaccatatacactcatttgacgagtttaaggagtcccaatttagaaataacgacgtcttactagagatattggttatgaatgaccaaaatagtttctatatatttgagaataagaggacacgaccggtttgttttgaataaaatcgaaaaatttagttatgaactctatgtatatataccgacttaatttcttatatctataccgatcccaaatatatatacacacatattttctatctcttataaacgtaaacagacacacaaaacacacatataggtaaatccaaaaacaaaaaatgcacatagtatatgtctgtgtgtgtatcctttcaatgaaccatccatttgtgtcgagttcccgatatagtaacacttgtaaatttcaataaatattagcccactagaatgctgtacaaactttaatcatttaatttcaaacagttgaaagcataagggtcccctttaatatacttgtattaaattatttttttgtatctttggacatttcaatatactttagctagcattcgatagtttgggttcgatggctgatcgtaactatcatttgctgcgtttgccacctggccatactcaattataaaaatcatattattattttatagacatataaactatacgacatgtattgtcaaagagagtatccttggacatttcgttgagctaatcatttgatgcttttttgcttatctgactataatcttaaaccaatctcgaagcaaaagagcaatgactttatagaaatccgaatttcaccctcaaaaaaaaaaaatatacgttaatagttttcaagttaaaaaagtacgttaattcgtattcattattaccgtttttcagtaaaatttcatatatagataaaaaaaaaaagtaactgtttacgggaaaaaacctcttaacgttttgagctttgtaatttctgcatgaaaaaaatctcgtaaatttttggtgtgtcgtctttttcatttttcaataacacttgtttgcataattttcattccgttgttccaaatgttttccatcatatattactaattagaggaacatacattttaaaacctggtgagcacctaacattatttggtgtggtctcttctgtttaacgaagagccaaataaagcgccgcaaaactactcaatggctagttaacacaaggatgaacaaattatgcagaaaacaaaagagagagagatcagcttttttatatatgtctataagctagtaagctacgtaacactattttaagctggctaaatgatttatttctgattttttaaaaaaaacataaatacttataagttttaatgaaaatcgtattatatattgtagtttttttgtggctctttgcagggttttttttttcaatctatctgtataatcttagtttgtgtttggcaattccgctattccattgatcacgcaatagtacttcccacatccataaagtttgcaaccaagttatttttttcacgttaattctcttaacaattgcaatttgattttcttattctttttatttagattggaccatcactatttttacactttggcatgcatgttaccaaagtctacaattctagaaaaaggtattaaagcacacaattgctacatgtgaaccttacattaccaaccacatattttcttgttagctaagaacttttaaaataaattcataaaaatatctatttttataagagaaaccaagatatcgcatttggacgtatagttctccgaatcacaacgccggattttgcggtctatattgggtaagagtaagtagtaactgctaatataaaaatggaaataatcaagtgccaaccttccactaaaggaaagtagttatgcatggattagttgggaaaaaagtcaccttctaaattgggtaaatattgaatatattccttcacagtcgcatatctcttcagtttattaacattaaaaatactgaaacgtggacggcagtcattaattgctaagattatgtataaataattcccatgcaacccaccgtatcatttcgtcagtcgtaaccaatgaagtttttttcgattaaagttttgcacccaatgaacgtccacaaccgttattagtcttttttggccaaaaaaaagtctttaataatatttcaaacgcgtttttattaaactgttattacgtaatactttcaaatacataagggatctcgatattggaagagctagtgtacgtgtattactatttgaatataataacaaaattgaaaaacaaatttaaaaaatcacaaacgacatttgaaatttccacgatacctataaaaaatatagatcatatatctaaatcgtaattaaaatatatctattaaatctttattttatttttcttataaccagaaatctcggaccaaaaattagactattcactgaaatgttaaaataaagtcagagattttacttattagtgggtttcaataatgttagaagagaacgtgaacaaacaaacaaattaataatccaccacatgaagatagatatctccaactttgccaaatatttatgtttctttttgacattttttcaaaatcatgcatgacctatgtcttaacactttttggtgtttgagatagtttcgttacatgtggaagtggaagtgaactaatgtgcttttgatccatgtatatcattaagccattaactaatgcaatattcagtttatgcttctttagctcaccattactcgatcaactaatttcctcttatcctaatcctatatttactatatacatatacacacatatatgatatatgtccaaatacgcatgcaacaaaatttattgtttgtagttaactcatttttgctccccataatcgttcgatctaaaaatagagtaagagtaatttaaaggatgttctgtatatataactgtcgtgcttaaattagtgtaatcgttaacattttggcaacccgcaagactaaagttacaaatttagatatggatcaacacaaataaaatcaagaaattgaacttgaagtctatgcaaactgttgtgtacagagaacctaaggttactcttccctaatagcttccctgattagagttgatctttgataaccaaatgtaaatcattggaaaccaattagtttggaaatgtcttaatctcaaaacaccgaaacacgctttcggacagttgactttgctttctgtgcttatatacttataatcttccaacgataaaagattaccctatcagattaagtgttgcattttaaaaataaaatgcgaaatatattttataaaaagtaacaaatgcgtgattacttatattataagaataatgccgttaatttcgtcacaattccactatttttgattggtctctccactgcgttaccacccaccactcacatatccaatgtatacggttctgcttaccaacataacaaaatgttctttaatatcggtttatgacaacgaccggttactaaatgccatttaatatctaacaggttaatttcgataggtcatattcaaattacatatttacttttttcgacgtgggttaacttaactcgttggtttctatttcgaaattgactgaaattgactttgatgattctcttccatgcaaataccaaaaattgactaactaagcttatacggcgtgtgatttggttaattattaacttttgttttcaagtccaaaagtttacttgatccttgtcttactctcattggtctattatttaaaattctataatcattgattttttaccaataaaatctcttggtgatggcgcaaaccagaaaacgtttcgaaattttattatgtattttattttttacgtcaaaacgtttggatatagaattaaaaccagggagtttaaattggaaaaaaaatgttccttaattcatgcacatatacaaacatatctttgttgtttaatattttatatacttctcattacgatgaacaataagtgaaagaataacagaaaccagctgagctcgaacggctaggctaccctacagcccaaaagctacaagctggtccctcaaaatctttcagatttctagattgaccccaaaaaaaagggaactagcaaaccgcaccccaaaagaaacaacaaacaagaaacagagcaaaaaaaaaaaaacagaggagcagattccggggacgtatatgcagagcatcccactggtaaatctcgctctctcttttccttctagaagcttcttcatcacgtatatgtattttgtgcgtatttacacataagaactcacacgacctgcttcgccaaatcatcggctccgatgaatgtaccgtgaaatccgtacggaacccttgacggaagtttaaccgttgcttcaacctctaagctaacggcgttaactatctgtaactccgatttccatgtcttctcgtcgtgaacgaaacagaggatgtatccttcgtcttcctctcctccttctccggggagaaacagaggctctcctccgtaacggttatcgccgtaaagatgtttcttaacttctccagtagtgagatcaactttagcgaatcctgagactttaggccacggctcggctaaagccaagtaagcgaatttggttttacggccgagcatgtttctgttgaccatccctgcttcgaggttgacttgttgatcttcgttggagatgatcggacggcgagttgattcaccggttttgagattcaggcggatttcagacaggacactcttgagattctcgtcagactcgttgaaaattgagtctggtggagtcatacaggaccctatcacgacgacttcatctgtttctggctcttcccaagcgttccagagatggaagcagaagcaatctggagcatcaatccacttaatgttcgatgaatcttcggcgtatttgtctaaaatcccgaatcttgcgaccttgttcttgtcgtaaaccaccggagacccaccgcggatcatctccggcagcttgaaaacgacttgctggtcaggtacgacgacgaagttctctgtaatcgcgaaatcgtgcatcatcgttggctgatcaagctgaatctcgacgtccggtgatttagttccgtccggtgagaatcggaagtattttaggtaaggctttgaaacgacgtcgtagcttaaagcgaagagttcaccggattccgggtcgactttcgggtgggcaatcattgtggattctaattgtccatcaaaatcgaaccgaccaacggtttttaaatctccattgggagtgatctgaacttggtaaggtaaatcatcctccgacatagccaataaccggccattgaaatagaccaaaccggcgttagctacaccggttccgtgtgccgggtcgactataccggctgcagctctggcgtagaatagcatgagtcgggcaataccggtgtggccgtgaagctcaccgatggctttggggaaaaccggtcgacccaattgacgttcctgaacaaaccggttagtctgagtaaaccggcaagcgtagctagctgaaccgtgttcgaatttgacggcgtgaaccataccgtctccgtcgaagaagtggtgacctgtcaccggctcgtgaagtgggttagctccgttgcgcacatacactcctttgatggaatcgggaagttttccgaccaccggaagattacgccggacgggctgttcattcaccggagcaaaatttccggcgatctgaacactaggatcagccgttttaggaagcgggtgtagcttctcgtggctgacaaggaaaccctccgccgcgtccaacgctgccgccgccgctctctggaacaaattcatctgtttagtgttggattctttggctttgggcttaacaacaatggcgggagagtttgatgattgcttagggaaatgaagagctggaggagtgtgaagcgcagatgaaacattgagcttacgtgtgacacgactggccataggtaaggagctacaataactcaagtcggagctttgagaagacgataatggcggctgagtatgattgccaccaagccatctcccagaaaccgcagccgttgccgtgaaagaagccatttttcaagtgtgttcaatcagtatttggtggttaaagtaagttcgattttgagatgtgtaaaggctctgttttttttcttcttgtagaagagaggagagaagagagaagagagagttggtttgagagcgatgaagtgttgtgaagggtttatataaaccgggaggtgggtaagaggaaaggtggatcccatcagtgtggccacgtgttgaatcagtgacagaaagagggaatggagtgagtgggttatagagggaattaaaaagggtactttgggaaaaaaaaagaaaaaaaaagggagtgtgagtaatgttattatggttcaaagttgagacttgagacctttcacacttagacaaatgcatcacttcaatctttaactccctttgtctttttttgtggcttcttctgtttctaagtttggtaacaaaagcttccaattctttggcaacttgaggatatcaaattctctaatctagtaaaatgtatactcttgagtttgagggttcgagacattatgaggcattgtttgtctagtggtgatttcttttaccgttgtaagatgaagttaagtgtattgaaattttctaaaacagttcagaattcttcgatcaatcaaatatagataaacatatgtagtttggtacgtagtttatattagtgtcaatattcgaactcaaatccagtaaatatgttagtttttttagaaatatatataaacgcatgctatcgacagaaacaaaaattgtgtatatggccatgggtccctaatatataaccacacacatttagtttcattaattacggtcatcaacttggcttatgtcgtggctcaagagcttcttgtttgcagactccaacttggcctattcatctcccacatgaaaatatcttaagacttcacattatatactcatatgtcatagtctattagtgttcaaatttagaagaatagagtaacacaataattggaattttttttggcttgtcctattgcttgagtcatgagtttatgtccgtacaattagatttatgttatacttataatttagagggtgatctccgaccttttttttagggtatagaatctatcaattattcggacgcaagaactctaatacttcgcgatctcatctaatcattatgtaatttaataagtctgaaatagctaacgcaattaaccatacgaaatacttgtgcctgtgtcaatatatacctgaattaaacaaaacattgaacactaaatagtagtacctctttcagttgtctattatcctagaaaccagtttcccaaaaatattcataacttgaagaagtgaacaaaatccttaattgaacactaataccctacgcacgcaatttatctacaaaagtcggtgtgttacatcattaacgtgcgctctctactctaagatattaactttgaattgtctggtgataatgttttttcacttggattttagttgacgagatctatagagatgttcgaccactcctttttctatttggacaacactctcaacagggattcttacatttatgttttatacttttgttatcggattattcttacatttacgtttatattaacttactcaaatacttgttggcaacaaatactcaattaccgacataatttttaaatcatcgtcacttttggatatgtatttgttttcaaaatatgttgtttatgtcaccatgcaaagctttgaatttatgatttacgtggaatatgataattgtaaaagtataagcacaataggttaatttttctattgatcatcatatatagtctatgagctcgagtacgaatccggagtttcttttcttactatattatatataatgaaattactagaatgagaagagtcttgcgactattgtacacatatttaattaacgtaacaaacttcgcgtattatatagtgaagaaatacacatcacgtattattttctagaaactccgtctaataatttaatacaaaagaaacatataaaaatcggattggaagaatccctacaccaaaccaactttgtatgagcatatgatatggcctcgtgtaatgtaaacaaaatcttgcacattataggtgtttttgtacatttataaaattaaatggataaaatattagaaaattgataaaataataagaaactaacacgtaaaaagataagtaaaaggacattagggtcgatattgtctcactattctccgattggaccattgtgtcgtctaacttttttcttttcttttcttgtttgggttagagaagtgaaatcaaattggtttggtaagtcgttagtgaagaggacacgttttggagatagcccgcgtctttgcctcataacagagttctcaaatataacacgtggcattcttctctttttcactattcttccctccatcacgattgctttaattttttttctctttttatcttcgccttttttcttatcgttctttttcatcttttttttttcatttttttctcaacaaatgaaaatcttatttactgtttttttaaaaaaaatgaatgctaaaatgtattcaactcaaaacaccatcatgtttacatcatttgcaaacttgggtggaaaattgtaaatggaattcaaatctaaaaagagagtagaaagagtttgaagggaaatagggaaccccgttatattatttcacaaaaaatactggataactataatttcgtataggtaacttaaataaataataaaaattctgatttacagtcaaatctaacctttcggttgtgcatgtatccatattttcagagttttccttttatctcgtaattaatgcaaataaataaatcacatacatttggtttattggactcaaaaatgatatgagcaataatattagaaagcctttcacacaaaaaattagaaggtaacgaatcatattcaaatcttacagtaatgccaccactttatattcttcaataggttagttattatcttaaaccgtcaaagttaggtataaacttttaattcttcttcaattatatatatatatatatatatatatatatatatgtattctttttctggcaaccactaattatatataattatgtcctaagaatcgatctaaatggtaacacacgtttcttcgataactcggtttagcgataagctcttttggacttcacacgatcttttatattctaacaacaattgtctacgcatcctaatatgaagacattcctacctaattttaaaaaaactattcacacgctcacactcttaaatttgaatatgagttctaacatcaaagacactagtataaaccattaacatattacaagatccagttaaatctaaacattataattacaatatttatgatttaacagataatagatatacttatttcagtttaaataaaaataaaatatttttaataaaaaattaagatgtaagaaaaacatataaacacgcgtgtaggattattcaccggccaaataaaaacatgaatttcaaagtagagaacagtattagttaaagagtaaaaagtaacaaaagtttaaatgtcaaattatcatctgagatctcatgcagatacgtgacattttttttactataattagaaagaaaaaacggaatgataattgttaacagagtggaaatggggcaccgggcaataagaaattaaccataagattaacctttaaaaaaaaaaggaccataagataactttttgttaaattaaattatgcattcttcgactaaggaacgtataggcaaaatgatcagtaattttctgctattaaattttaattaatatttctcttcaattttcatccaaaaaagagtaaatatagttatacaaaaatgatcttaacatataatgttgcttgaagaaaagtaactaaaaactaatttatatagtctcaactaaaaagttgtctaagtgggatttgttttgtctcgtttgattagagtcatcaatgactcaataaagcccccatgaaaagtggatggggaaattaaaaattaggaataataacatataaataaaaataacggttgattcgatcatccttacgatttttaatttatagataaaaattccaatcatgcttgtgatcttaaccatcctttctttctttatagttttataaagatacgaaaaaatttatatcataagttatcgccacgtcagttttatcgacacctcattcataatggaaggtgtatatatctctcaaatatttattagtgtgtatacgcatactatgtatttatgtatcatgtatgcaatatataacatgatctcgaaaaaggtaactaccgaagttgtgtttaacggacgaactcgtggctcacgggacaccctcgtcaataattgtatattaggaagaatctacgagtttttttttcctttgacggcaagatctacgagtttatttcttaaataatacagtatataataagaagttatgttgttgtctttaatccctttctgttgactcgtttgttgcaactttttacctatgatggtatgcagaggttcttaaccatgatcgaatcatatgtatatatatcagcatgtttaaccctgttacccaaagtactagtaaagggaactacatacaatacatttcaagatcgttttcactacaaattaagaagaatacgaacattattaggtgctctattaagataaatagggacattatattatgaaactttttgatagtatacgtcttgaggttggatcaataatgcaacacttggaacatcttatcctccttagaatggaatattgtcagaaccctaatcgattagacgtggttccatggtttctattttttggtgggtcaaaggtctactcgttcacgtcacatgtcacattaataattgtttcctccaattatatatccgatataacaattctgcgtataattgagctattgttcttgtaaaatttaacccgacgctatgtgcctatgtggcactatacgactcaatatttaattgctaatgtattgatttgctatattactattctatatattcatttacacaaaacatttgttgtaagaatatcaaacatgtcttaattaataacggtttctaatatttaacgatgtatgtttggaagcatcattttctttcattaaaagtgtcgttttgacacactaattttaaatagatactaaatgctagtagttttaaatttaaagtttttttgaagttcacctttttttttgttcaactttttacgtttacctaaaagtaaaatatagttttcgttgtaaaagtcacgtttaagtataaaatttattttttgaaaaaataataatctaaaaacagtaattttgtgaaacaagaaaaaacaacacatacatttaacggtaaattatttgccgaacggattttgggtccataagatttataatttgattagttgttctttgaacatattgactcgcgaacctccacaaaatacagttgccggtcaaagagtcaaacttccatgttattgatacgtggacacttaagattggaggacaccaacccgacaaaagatttcgtctccatgtgttacgcacgctcatgtcagaccatataacactaagatgtccaaacgcagccaatttcagttcaagtttattttgtatccattttttaaatagcttgtatttctctttatagtgttacgaacgtataatcattcacatagcattacagaatcatatatattgatcagatttgaaaatagttgatttttgaatggaatttggtttttgcaattcattcaaaaagatattataatttcggaaaagtatttacatctgaaataagagaaactctaaaataataaagaaataagactaagattgattttgaattgaataattaaaaaatttatatacttaaagatgtattttgcttgatatttgtttttcgtaatcaagaaattttggattgaaattcataatcttttaaaatcaaagacccgacgagattaatattataatttatgttgcaatattctatttgaaatctaaaaataaataaattgttggataatggtgattcgacgggtgctctcggatacatatacatttgatctcttatgtagtctatgaaaattaaagataataaagtcataactaatatttaactaatattacatgttgtgatttcgagtattaagaaattacggacttttggtattcaaaaaaataaaatatatatttaattgtttcatatgcaaaattcatgtctcgctgctcgtgtatatattttttttctttttgttaaatgctcgtgtatatcttgtttatacattttttctttgtcacgaggataacaaatcttttaatagttgaaactgaaaggtgttgactcctattttgcctaaattcttcctttctattttaatgtttcagatgtgcgctgatgcaaaaggaattaacgcgtatacacatataagtgtgcgtgtattcaaattagtataaatcttgttcttgtttttttctgtcatatatagtttgtcacagaatttgttttcctttgcaaactatggtcctaaataaatgcaaattatgtgataaacgtaatacgaagtgaaatacgtaaaataactacgcataactaattatggatatccgctgaccatgagttgggtatattctaagtggctaagaatattttatatagttactttaatatatttttgtttggctggggttattattcccatgttattggacaaaatgatgataaaaaaaaaggctgcacctgatatatatatatatatatatattaaaaagtagctccaatctaaaattaaccaaaaataaaaacaaccgtgagtttatgataatgggcccacattattgtgctgtgtgtgggaccatccaagtgctcctgagtcacttgactttttgttagccttgcgccgaccggccaatcagcgttcagatataccattcacatacatgtgcgtaagaccatatctctctctctatatataatctatatatataatacaattagttacatgtgtgtttatcatatgtttaattagatgaatgctcgagtgttttaaaaaagttttatgaatggttgagaattaaaaatggtgaagataaagagggatttatttataacagttagtttagtacccacaaaatgctattaaattttcgaaacgtaaagtaaagatacataaaatgcatatcataaattaaaaataatgtaaaactgaatgtataagctttcaatattataaaaattgtagaaatattatttctaactatccaaaacgttttacgtcaccaaaaaaattgtttgcatcgatcacaatttttaagcgtcagtctttctctataatgattgataattcacaaaactttcattcaatttttatctgaacaagtgttatctagacaactctaactatatctatctaaatttggtcacaatcggtgtcgcatattttttgttttggaagttcttaatcaaaatagatcgaaaactagctatatatgccttacgattttttttccatatgtttatatatgtgaatataaataattggagccaatatgtgtgggtatgagtatgacgacattggaagtttgaccatgacctacttggaggagagacaagcacgagaaaaaggggagcagagttaaggacatgtttggcaggtgtcaatatcaagcttctgttactactaagagttgcagagaaaacgccacaatttggcccccactccaaacgctgccttattttatcgtgcgcatgttttttttcttcgaaatgcattctcaagtgtgaagaacaaactcaaattgaacgctgacattactatcgtcaacataatttctttgatttctcgttataatgcgtacaagtgatcattaaagatgtgtgtgccgttgaaatggtaaagatagctttaatccgcacaatgcttgttcttgacaaaaaaaatgttttaacttttaagttttcttttgtaaattatatgttaagaaaaggaaaaaaaatgttaggggaataatagaaaattattattttctttattaaaaatgtatacagataaataaatatgatgtaagaaaagataaatgtatatgtgcccgaatagtgcctagagtaggtatgcgaatatgcttattatcccatatgttcattatgcttctgtttattcatatgcattgattttgtcgttgattaacttccacgtaatagaatttctagaaagacctttttagaaaaagtaaatggcttaatcagtcaaaaggaaagtaaaaaagggcttttcaatgaaattaccaaaagaaggcttttctaatcctcatttaatttgtttagtctttacatttaactaactttgctatatgaggagacgatatttattttcctccatcagccagtaaagttggtcaaagttcaacgtatttatatacatcactaattctaagatcaaaatcaaagtattacgtctcactaatatcttaattagtttttttttaattcgtaggtatcgataataatcgtcgtcattatcttctccggatgagatatactagtcaaacaaaaaaaagttatcaaaaaaagattctagtcaaacaatttccttttttcgtttgttcgaaatgatttccaaaattaatgagctcgactatatcatatcatatggatgtctcgttctctataataatcgacacacatcacaacattctaaattagttttatcaaaaaaataaaattctaaaaatagtaagctcgacgtaccagaatttgtttgttacaagaaaatacaagtgtaaatttataaatgacaagcacaattgcacaaatcaccttatcaacaacattgtgacacgtctcatattttataacactaatggtcttattaataatattgcaactcatgtaaataaacaaatgtttttttctgtgtgtcaaatcaggccaaacagtttgctccatccgatgtggctatctatatgatttaaatcaagtattttgatacatcttaatttaattattttttatatattagtcttttcttctctttttgccaacatattaaatattagtcataacaaggaattagtggaaaaatacaacaattttttaaaattaattcaataaaatccatagaataacggttgacagtaataaatttggaggaatatacattaaaagttactggttcaaaaattaagtatgcattgtataactacagtttcttaccgttgcatgcaattattaaatacgaccaacgaactaaacgactgcaagcactggaaacaaaaaaacacactgaatttttgttttctttctaaaagcaaacttctgatgtcggcaaacgatcactaaaatgctattatatataatcactgaatatcatttgcctgattggctaatttgatgtcagttaaaatcactaaatcaactctaattaaaaaaaaaaatcccaccgtcgaatagttgtcgttccaaagatatgtgtttgcgtggtgagctatcgcacccgaaaccgcgttcacgttcatgagacacacagtttctggagtgggatttattaatattagttcctttttattattatttaacttaagcgaacacaaatacctaactattatttgtttgaattacattcttaacactacctgtaggcaaaaagggcagtgttttgtaccacacggaatttgtgcagtactagtagatgtcactaataacaataatttataataatagcaacattaacgttaagatacatacttccactgctaactcgttttttctttttatttttaatttcttaaagttattcttaacgctctagatgagagtaatggaggtgatgacaattcccagatgagtatataaaattataagagatgtgacaaaaataagatctttcttcttgaagagcttagttgtcgttcgtttattcgtacctaaccaagagtgacttatatagttagtatgtaatattctctttgttgacctaatattgtatttagcaaagccttatctttgtaagctttttcatttttctattttgatttttgtaatctatggttcggtgtacttgatcacacttttcgggataatcaaagactgcttttgatatgatacggatttaatcacattttgaaataaattaattaaaaaggttcaattgataaagcttagcctactatgtataaacaattgggagggccgggtttatgtttctgatataaacttttaaagttaatccacttttaacacaatattatgtatcccgtactgtttgacatgaaaaggacaaaaattcatacatttatctaaaactaaaataaatttggtaattgtagccatatgtagctaaatcttaattcttcttcaatagcaccaaagaagttaaacaatgttttttttttttttggaactttcttctctttttatattcttcgttttatggggtgggctttaatttaggtcctaattgcactgatgagttgcatcttcagtgcccctacatctttcaatgtagcttcaaacaagcgaataaatatctagaccattgtttatcactttattcacatcaaaagacatgtgtgttgtttctatttgaatcacaacaaaactttctgtgttagatattttggcataactattatattatatatctcctgatacttttatagtcctacggttaagatcttgaaatcgctcagacgtcgaccattttccagtgcagttgtctgtttatatatgttttagtttgttgtgaaataacacttctcttatatttaaatcctaataatcaaccaattattgtagaaggaaattcatatcttagactcgtttatttgtatttatatcagaaacattgtggtggtggaagcataagtatttttgactggatcaatattaatataattatatatcatgacaatttaaaccctttaattaggcttagttttgtttttaaaataaaatgaaaaaaaaaaatttggttcgataaacattttgcatttttgaatatatgagttgccttatcatccattcctaaatattggtgataaatatggtaagacatgcttttcttgacaaaatagttatgtgtataaaagcataattttattttcaacattagtttattgttgtgtctactgaaagattcttttaggtgaaagatatatcaaacaattttcatcattatagacattaaaacatttaataagaacaaaaaaaaatcaaaagcagttgtgatttgtgagaactttatatttttaggaagagaaagctaaggaagaatgaagactcctttaaagattctgcatagccatatcaaaagcaaacgaaacaaaaaaacaaacgattaaagggaaaaaaatatcataaaaggtgaaagcatatgaaatatctttaaagatggggtcaaagtcaaacttactaaataagcatgcaaacaaaattttatagaggtcaattgatcctcgtctgagagtttcgacaaacaagagtaattagaattctaattaacttaacgaagccgtatgtggttttactatagtctcgaatgcaaatgcacgttcagctaacgaaccattacagttttttttatttttttttattttaagaaagggttataaccattatagttttaattgatattgaaaactgaaatttgtactggatacttgattaattgtttcaatatagatgattgactttattctatatatgttttatataattgtgataaacgaacataacctccacattgtttcgacttttctcatggagagagaggacaaaataaggtatgattaaagaaggtgtgtaaaataaaagatagagacactcactacctcactttttcattgattcatgcactcctttcattttaatagctctcttccaatcaaatttctttttctgtcccactctctccatatctcttcttcttattttagttattttcatattttcgttttattcgaccgtcttgtccaatcagtgcatgtcgttgaatatctatttactttaagattccatattaaatgaaaaaagagaagaataaaggtctctatcaaattctataatctatctacttaattaatcatggattggcggagagaataattcttttctctttttttttttcttttttttttgttacatgtgggtttatacaccaaatagcgaattacttccgataaacagcttcaatcgtaagcttaaccgaaaaaaataaaataaattaaaatctataatatactattttggtatatatagacaatattaagtaaaatgaaagtgtattatcgtagatcttttttttggtcaaagtattatcgttgatgtaccaaaaaagagagtgtataatcgtagatttcagacaagtaaacgtcactaaagcatggaaaaaccgaaagtagacaaaagaagaaaaaaggcattttatgtatttgtgatacttattgatgtatatatcattactgttctttgaagaaaagaaaataacaattatcatcgaacagtaaataaaaaacagagtaaagatggggttctccaacggctcaaaactgccgccaaaatgtacgataccgttattaaaaagacacgtcacttccgacagaaaaagacacgtaggagaaaacgtgtccgtctcaccaagaaaattgaccaacacgtggcttggcgtgattttgtgattttgtgcttttgagtctttggaacgcgtttccataacggtcatcaaaacgctttaaccgaccgcacttaagttgaaacttctaattgctttaattattttgctaacgcaatcctacaatttacgacctctttatattccagtgttatacatgtggcactaattaaacaaaattatcaaaacttattttgtaaattggtcatttaaatttgataagaaatgtaagtgctattatcttcaaaattgcttagtgttgcattgcatacgaaaacattttctagaagtattacaaatttaaaaaaatgtgaagtattatttttttgggtagtattatttttttgggtcattttcagtttttattagttaacaggattgattttttttaataaataatggtatttcttcttctttctaacttctcgatgttaataactataatcatatatatggttatataaacattcttacgggttttacgtattaagtatgttattaatttgaagtgaattgatcgaagatacacatttaatcaaatacaatctggtagttttccatgcaattcgttaaaaacacacacatgtaatcaatgaaaaagataggtcacgttgatacatttccgtttattttcttgtgaaacgtatatagtttgtctcacctacgtaccatttgtggtcaattcttctttcactataaaaagacgttttcatagtatataaatgttcaaggaagtttcttagaatttgttttcgaagaaaaatagaaaaaggaactcaattccaattttgttagctcgaaacctcgaataaaaatttggtacgttggttgatttggtatcttcgagaagtcttccgataaatcgagaatgtgttcatatttttttttttttaaagaacggtgggaaatgattgtatacgtaacataattacacgtgaatgaaaccaatcagtgattaaaaaaaatcatttatgttagaaaccaaagaagctttttgtttggttgacttctggtatttagtgtagttaagggatgtaggcccatgaaagttaggcctaaatattagaacccaatataaatggtctcttattcgattagtgatgttgagtttttgggaaataatgatgggcctaaatggccaatgtgttgtgggacgattgtttggactttttgagtgactttgcatgtgttcataacttaaaataaaaattgcattcccatacctctttaagaattcaaacttctaaaggcctttaactcgtacaataatttaacgtgagacggtcataattcagttaagaacggattgcgaggcttggccaaaccctaaaggtgttggcctgctcatgaaatgcaacattagttggatcttacgagaccgtacgtgggaaaccaagttccatggacaatgttcacgttttgaggccaatttactagtttacagtttacactgggcaattgaataacagtaaacgaaaacaaaaacaaaaacaatcgtatcactaattactagaatttgtcgagtagggattgaatgtttatatatatgagatattaatacaacggccaacacgtgtgtatctgaaagtgtacatactaacatttatggtagaaaggaattcgtgtcatcaagtcaagtaaaaccttttttgtccgttgtgtaacctacacaacgatatattcaaacaaaacatatgacacatataatcgtatgtgtcatgtttatacatatacaatatgaaaagcaaagagaacgacacattagttgtttttagttacgtttggtcttaaaattaacaagtccctcgttaaacatcagccgtgtgataattaacaagcatccatcgttaaacacttccaatataacattttttgtcgtgaaagttgattttgttcaagtcttcttcgataggagttactcatttaaagaaaatagcatctcttgtatgtaaatttgatcactccttccaatggtccagactccagaacaaaggaaactgtattcacaacgaataaatagataaagggatccagaaaatcatgtaatgcatgatacattattagaaatatatatagaataactgagtaaaaaaatatatatatatatatatatatatatatatagaataaatgagtgacaactgacatcacattagtattctctgtatatataagataatttatatttagatgaaaatgtactcaatcgagaaaaatgtaataaacgaaactaattagttgacaaaaagggaaaatcatcaaagataaaagtttaactacataaacattataaattcactttctaccaaaaaataataattataaatttactttattccagtttcgacgaggagtgtggattctgttgttgaataagcagatatttgattcgccgagattttagattacaatattcaaataatttcgaaaatactggagaggaacgagattaacgataattagaggaaaaaagaagacaaaatcctaacaaacgcaaaactttatgcagcagtagcagcaggcagcggacttattagttatttaacgagtctatgactcaaaagacaaatacgaaacaataaattgaaaacaaactataagaaaaataagaagaagagtttaacaaaaatgaaaagaaaagcaaaagagaagaatataaccacaacgtggaataaaataatagcatggtcgatattgtcactttatatgattccttatacgataacatatgaagtagattttttacttagacacagattgcatcgaaatttgaaaatcgtatcaatataaaatcatcaagtgtgcagtattttcgatatctctgctaaaaatatcatatttactagtagaataaatttgctatagaaccaatagatacacaataagttaagtaggaaaatcgtaaataagtgacaaatcattttgttttcacggtttaatgaaaaagtcatccgcaatcatacatgtattaattaaacaatgtgtcattggataaaatgagataaaaccaaataaaatctaaaaaatgttattttatccaaagattattttgcaaggaaaacttgatagggagtagtatttttagtgagtgtaagctatttattaattccattatttagggtctacgtaaactatgaggcattcgtgcaaacaataaaaagatagcgggactcaaatgtaaattaattatgacactcacaacaagaataattctcattttttttttttttcagtcttatgaatgaaagttagcgtcttagcgaagtagaaaaggccaaaatagagagcggccaaaacggaagcaaaaaaaacctcatcattcttcatctcctctcttctcttctcttattcatgctcaccgccataaccacaccaccacacataagctttcttctgtaatctcaaactcttttatgggctaattattacattttcactatatacgtctacgagaacgagatcaagcacttgctaattattttgttgaagttcttgaatggttttccttcagtgtgtcacatttttggatttagctgaattgttttgatcataaggagaaaactttctcttccttgtttttttttttggtctaaattttctctgttttttttttatccaatggctacggtcactgagatgcccactgatgttgttgttgtcgacgatgttaaggaagttagtaccaaaagcgaaaagatcatcgatgagggaattgagaagagctcgatcacggattctaaaaccgaaactgaatctcggcttgatatgcacaagcttgtggctatgttcaagaaactgaatcctttggccaaggagtttttcccttcttactacgatccgaagaagaacaatcaggtagctaaggctaaccaatttctgccggctgacgattttgagaccaccaagaagcaatctggtgaagaatttgatcttgatgccaagaaggatgacaatacccgcaaggtaaaaatggatttgatgattccaatgtgagttttgttgtaaatctttaaactttgactaaggggttgttgtgtttattggtgtttgtgattatagagaagaaactatagccaagggagaaggaggttaactggaagaatttctaaggctcaaagagaggatagtattagaagaacagtttatgtttctgacattgaccagagtgttagttttgtttttagtcttttaaggttttgggaagaattcgagttaatattcattaatgtaacataattctgctttgcgatttaggtgactgaggagggtcttgctggcttgtttagtaactgtggacaagtaagatgatccttaaaatctttaaatgttggttatatctttctatttcatgtgttttggacaatgtgttaaatttagactagtttttgagtccgtgccaaaggttctgttgaaaaaatgttactttggtggtatagttgtgtgtgtgaagtaacgttaagttcttcttcttttgtgaaggttgttgactgtagaatttgtggcgatccacattcggttcttcgatttgcgtttgttgagtttgctgatgaccgtaagtttggctgctggaatctttaaatgctttaacaaaaatgtgcatgtcacttttttaacccctatagtatactattcattcacatagtaagtttgtttctacagagggcgcacatgaagctttaagccttggtggaacaatgctcgggttctacccggtgagggtcttaccctcaaaaactgccatcctaccagtgaatcccacatttcttccaagggtaaatgctcaaatgttcctctgaagttccactaatcaattttggttttaagttttgagttttttcaatcttactttgacatcttctatgttgtggttaattcagtcagaagatgaaagggagatgtgcacaaggacaatctattgcaccaacatcgacaagaaagtaaatgctgaacaatctaatctatatatattaatttctaaatatctcctggtttaagattttttctacaattgcaggtttctcaagctgatgtgagaaacttctttgaatctgcatgtggtgaggtaactcgtctgaggcttcttggcgatcaattgcattcaactcgcatagcttttgttgaatttgctctggtgagctcttttctccatggatgtgacacaatgtcttggcattgttttcacctaaaaactcaaaaacatatattttgtttttctcttcgaaacaggcagatagtgcacttagcgcgctcaattgcagcggaatggtcgttggatcacaaccgataaggtaaacttccatcaatacaatgtcttaaaatctttctctgaatatgtccaattgttaaacacttggctctgtttccttttcagggtaagtccatcaaagacaccagtgaggccaagaatcactcgaccaccatcgacaaactagaaagaggcccaactagctcagaagagagatttcattttcttcagcaatttttttcccccattatctctacgttttagaacagttatctccagttatgttagttagctggaaacactatgatcctgcttctgaatttggagttcttgttaggctttgtctttcgagtttcgattgcgatacttccatctctttcatcatctttctctcttaagggatttttgaagcatttgcttttgaaagttctttgccttacatcttttatattgttcaaggttagatcaacagtggagatctctgagagaagagctctgtgaaatttacaatgtcgtgtacatcaagtaaggtctctaatgtgtacatattacaaataaataaacaatctttttcatcaagagaagatctcgccatcgatttccacgtatggaatgttcaaaaccttgaagaactctgtttccacttcagcaaaagtctcagtcaacaaagaacatgagcttattctcagacaagacaaaggaggaagatcttcatctatcgatatctgtagcttatcacagccgctgatctccatcgtctcaatagcttttgtatcatgaaacccttttcgattcagagtcttgaggttctcgaaacgactaatccgcagagaaaaaacactttttggcaataacccttcctcaggaaacgattcaatgtcttcgtttcctccatcaatctcgagatttcgaagattctccaaatctctcaatccccattcgattctcggtgtaagcttgtcgcaaaggctgatgcaaagtgttcgaagattacttgggaaccctccaccaggaatcgtctcgatttctgggcatttgattataaacagtgacaagagagaagtgagtccaaacaatttctcaggtaaagcttgaagctttttgcagtttgagagtaacattgaagaaagtttcggtgttggaaggcctccttgtgggaaagtttccagatttgggcaatccctaatctcaagagactcgagtgcgatacgatcgtctccgagtcctgcgtgaatcgagaaagttttgaagctttcacaatccctaattgagaggcttctcagcttcggaaacaatgatagagggaaattgacgagattgctgcagctacttccgatgaaaaggtactcgagctgtgagtaacttcgtgttggttgcaaactctctgtgaaatttagtttcttgcagtctcttatgtataaggttttcaatgtggttggagggtggcttccagggaaagattctagagaatgacaagcaatgatgagtagttcatggaggtttggatagctttctgttaagttctccggtaaggaagtgagtccgtcgcagctgtcgatgtggagtgactgcagattctgaggaagctccatgaggtgagatatgtctgtcacttttaaatattccatgtctgtttcatcatcatcatattgtgacggctttattgcttcacttgaccgtggactcggaacagatgacttaatcccatattgatggtactggtagctactacttccaggaagaatagaaccttcatttttgggatctggaacaagtgatgttcttgacatatacggacttaacgtgctaggtatatccgagatatatcctgagtatcttgccgagatcacagcaggttcttcaaattgttgtggtaagcttccaagttgagtttcatattggtcgaaatcttctgtttgacggtcctttggtaaagatgacaagcttgatgttgaagttacttcattgtcatcattactttgactacttgaagcaaaacctggctgagcactggtacttgcatctgattttggattccctgtaggggaagacagttcccttctgctcatagagggaatgctggctggactttctggaatatttgtcagactccttctgaaggaattttctcctccagaaactgctcttaggggacaatcagagatggtgacttcagtggatgaagggagtccttctggaaacttttttcttaagctggggcatctttgtattatgagtttttggaggcaaggaaagatcccatcttctagttccggacaaatccattcgtcccatcttggcatgccatagaactttagaatttgcaaggattgaaacggtacacctctagagttgttctcaccgaagaagaagtctagaccaaccttctgcagaatattaaatttttcaatgctgagatacttgagtgaaggcaactgccccactggaggcagtgatatgcagaggttgcagctactgagagtgacggacgtaataccgaagaatgaagaatcacccaaccacttaggaaatgctccaccctgataagattcaatgcagaacgttttcaagtgtggatggggttctagcatccttaggacctctttctggtcacatgccaatgcattaaaactaccagggacgaagccagaacctttgacagtccacttcaggattaacccgtcaaggaatggctttcttttcaaaccagcatcttttgcttctgaggcaaacgccacattttgtagctcagagatgcgaagtgtccctcggagatgagaaagttctttgagctcatgcagcccggcaccactcagccttcctataacaaaatttgataacttctgcaagcttcgcagcttttttattccgggtggcatctctactaaaggagtgccaacgaggtcaaggaggcgcaaattgataagttcggcaatgctttttggcaggcttgtgaggtcacgacaatttgacaacaatagtgtctgcagattacagagagtacacacaaactctgggagctcttttattttggtgcttgacagatctagataccgtaaaagcttcaaaccttttaacgatttaggcaagttggttatctgataatgagacaagctaagaattcgtaggccactcaatgcattgagcaaaggattcaaaactttttctgttagttggagagattcaagacttgttggcgagttgaaaggaagaatggttctcagaaactcagctccacagatggacctaaaagccacagaagcatcacattggcttctagaaaatgaaaaatgtcgagttgtgcttggtatctccggaatgttgtcatcttccagtctgaaacaaaaatctcctgaaacagcttttgccaaatcattcataagatcatgcatcacaaagctcgtcatggtgatatccaatctctgaaaaaaagattgagcaactaaatcaccaaggtaatcatttccaatatcttccaatcttctgctgctccttggttggtataagaggtctattgccatccataggagtactaattcctccctatcgaaaacatgacccttggggaatatcgagcagagggcaaagcatcgcttaagttgaggaggaagagagtcatagcttagtttaagaactggaaggatactgttggtgtagcttgaaaaattctttgatacagcataccagtcgtcaggatttggctttgaacggagatgagatgcaatggctcgtgcagctaatggcaagcccttgcactgttctgcaatccttttgccaattccttctagttcttggttgatagaaccgactgatatatttccaaaagcgaatctagagatcagctcccaacattcttcattagtcatcaacttcatttggtagattttttcagcctttgctactgtggagacaatttcacttcgtgtggttagaacaatcttgcttccttcctctgcatcagtaaaggcgacctggaaactctcccattctgaatcactttcagaccaaaaatcatccagaacaagtaaaaatctcttccccgagagtgttttcttcagctgaatttgaagtgaaggtagatcctcagtattaactgcacttgaagtgatatcctgcagaactgcttttgtaaccgtaaagacattaaagtttatcccagcagagatccacattttaacctcaaaatgttcggtcaccctgtagtcattaaaaactatctctgtcaaggtagtctttccaacccctggcataccaactacggagataacagctggtttcccaatgcttatttcatcatcagaaagcagcaaattgactaacgctagcttatcttccactcgcccgaccaatctgccttgtggaagatcatcaggtcttgaccgtgatgcttgcctccattgtggttctcgagtctcgctatattctttcaatccaataacttcaatgtgtttcacatgatgttccagtagtctaactactttttccatctttggttctatctttttctgaatggcttctcgaccagccatgagattctggaatagtcctcctaagcctcctgcttcagctactactcttcttctcaaagcttctgtttgcaactcatcaaggatatcctctgcctggaagaaagcatctttgattcctgtaagccaatgtttaacttcccgaacatgttctgctctctgatcagcatccgcaagcaccgggtttgcagtcaccaaagcaaccttcaatctcttcagcaatgcactggaggactttcctttacatagttcgaccaattcttgagaagtattaatccgttcaaccatcacgtttgcacaacttgataaataggagttcgccatgttttccctcgtaacttgttggagccaaggagatgcaacaagtcacacaggaaaaacccaatccaattattggaataagcaagcagaaaatggttttttgacttgctgttctttatgcaatttgtcagctggcctgcagcaaatgatgataatgtcaagtttcttgagattctcttcttccatttgattatgatattcataagtttgcagacatttttcctaaaactactatttacattttctaaaagtgtaattacattgttttttgcagtgaccatggagcattcaacgagtcacatttaagaaaaagtagacaaactaagggggaagtaaggtgaatctgacctgtttttattttatttttctgctctgttttatgtttactctatctcgcttgtgttgtcttcttccttacccctgtttcacacatttgttaaaagaagaatttttctttcttcttcgtcttccttgtcctcttattatgttctgcgttgtgtctaaactttagaacctttgtgcagcatttagatcagacgaggaagccaaaaagggtttggctgcataatattgcgatcttctatgttcctaagaaggtccaggggaagaaatggtcctgccaatctctcggttcgaccaataagtaccacatgacgtgagttttcttatatatcacaccatcctttttttcttttctatcttctctaaattatctatattatctgtaaaaaagatttgacagatggtgttgaattcaccacaattctgcattccaatgaaaaaagaaattttgaattagaattatgtttccctatttacaaggtttgttgatttgttccttaaatttacgtctaatctgggctccagaaagacattgtagacccttcacgccttgaccaataggagacaatttttgttttaaagatcttaactatatactaaagaagactccaaaatgtacctccgttgatttaacatatggttttgcatttttgtgttaccttgtaagattgaatttgtctccgttggtagaccaagacaatgtaagacttttcatgccagctcacgatggaatcaatctagaatttaatattttgtttgtttgttgaagatgaacctttgttaatttgaagtcgtcttttgcatattatttaatcttccatctgtacctaatcagaattttcagactatatttttttcaagtcaaattgaacattcctctggtagttttaatccaagtaaatgattatgactaattcataagtttcgtcctttacaagatatcatcaagttttctccatggaaaatgcaggcaacttccaatcattttcggagtagtttcagttggtgattgtggaatacatttcggtggcatggttcatggtgtgttttgtcaagtcaacgtagtaaaagaacttcattcccttaagtaaggttagtttctctgaacttttccgaccaaactgttttgaccacttgctttgtaatttcttagttattggaatgtttgattatacgagtgtattgctttggcgaattgagccctgtggatcaaattatttgaggatgataacactgaagaaatagatagcctgctgtgaagttgttcttgattttgtctttgtctcttgcttgttttgtttttccagaaggctttgtgtgtggaaagacagacgacatgaccggcataggagagatgttccttgcagcttttttacaagctctcttccagacgctggtgtctgaacctttcaggagcttcttcaagaggcgagaactgaatgagaatttactcgagaggctcagcactgcgttgttgacaataactgctgttctgatagatgcagaggagaagcagattacaaatccggtggtggaaaaatgggttaacgagctgagagatgttgtttaccatgctgaagatgctcttgatgatattgctacagaagctctgcgtctcaacataggagctgaatcttcttcctccaacaggctgagacagcttcgtggcagaatgtccctgggagattttcttgatgggaacagtgaacatttggagacccggcttgagaaggtcacaattaggctcgagcgtttagcctcacaaagaaatatcctgggtttgaaagagcttactgcaatgatacccaaacaaaggttgccaacaacatctcttgtggatgaatctgaagtgtttggtagagacgatgataaagatgagataatgagattcttgattccagagaatgggaaagacaacggtattaccgttgtagctattgttggaattggaggggttggaaaaaccacactttcacaactcctttacaatgatcaacatgttcggagttattttggaacaaaagtctgggctcatgtctcagaggagtttgacgtttttaagatcaccaaaaaggtttatgaatctgttacttcccggccttgtgaattcactgacctggatgtacttcaagtcaaattgaaggagagattaacaggaacaggcttaccgtttctgcttgttctagatgatctgtggaatgaaaattttgcggattgggatcttctacgccaaccttttatacatgctgctcaagggagccagattcttgtgacaacacgaagccaacgtgttgcatccataatgtgtgccgtccatgtacacaaccttcagccattatctgatggagattgctggtcgttgtttatgaaaactgtatttggtaatcaagaaccgtgcctaaatcgagaaattggagatcttgctgaaaggatagtgcacaaatgccgcggtctgcctttggctgtgaaaacacttggtggcgttctacggtttgaaggaaaagtcatagaatgggagagagttctaagcagccggatttgggatcttccagctgataagagcaatctacttccagttttacgtgtaagctattactaccttccagctcacttgaaacgatgttttgcctattgctcgatatttcccaaagggcatgcatttgagaaggacaaggtagttcttttgtggatggcagaaggtttcttgcaacagacgagaagcagtaagaatctagaagagctcgggaatgagtacttttctgaattagaatcaaggtcacttcttcaaaagaccaaaacaagatatataatgcatgattttatcaatgagctggctcagtttgcttcaggagagttcagctcgaagtttgaagatggatgcaaacttcaggtttcagaaaggaccagatatttatcgtacctacgagataattatgcagagcctatggagtttgaggctctacgtgaggtcaagtttctcagaacttttctaccactcagcctcacaaattcttctcggtcatgctgcttagatcaaatggtcagtgagaagttacttccaacgctcacccgcttgcgtgttttgtctttatcacattacaagatcgcgaggctgccgccagattttttcaagaacattagccatgctcggtttttggatctctctcgcactgaactcgagaaacttccgaaatccctttgttatatgtacaacctccagacacttcttctctcctactgttcaagtctgaaggagctgcctacagatattagcaacctcatcaatttgcggtatcttgatctgattgggacgaagctaagacaaatgccgcggagatttggtagattgaagagtctccagactcttacaacatttttcgtgagtgctagtgacgggtcaaggatttctgaacttggagggcttcatgaccttcatggaaaacttaaaatagttgagctacaacgagttgtggatgttgctgatgctgcagaagcaaatttaaacagcaagaaacatctgagggagatagattttgtctggagaactggatctagtagctcagagaacaacacaaatcctcacaggacgcaaaacgaagctgaagtgtttgagaagttacgcccacatcgtcatattgagaaacttgccattgagagatacaaaggaagaaggtttccagattggttgagtgatccttcgttctctagaattgtgtgtatacgcctcagagaatgtcaatactgtacctccttgccatctcttggtcaactaccatgtctcaaagaacttcacatttcaggaatggtcgggcttcaaagcataggtcgcaagttctacttcagcgatcaacaactgcgtgatcaagaccaacagccgtttagatcacttgaaacactgcgatttgataacctgccagattggcaagagtggttagacgtaagggtcacaagaggagacttgttcccttctctcaagaaacttttcatactgagatgtccagagctaaccgggactctacctacctttcttccttctctgatctcacttcacatctataaatgtggcctcttagatttccagccagatcaccacgaatacagttacaggaaccttcaaacgctaagcataaaaagcagctgtgacactctcgttaagtttcctttaaaccatttcgccaatctcgacaagcttgaagtcgatcagtgcacatccttgtactctcttgagctctcaaatgagcatttgcgtggtccgaatgccctaaggaacctgagaatcaatgactgtcagaacctgcagcttcttccgaaactaaacgctctgcctcaaaacttacaggtcacgatcacgaactgcaggtatctcagacagccaatggaacagcagcctcaatatcatcatcctcagtttcatcttccaagatcaaacgtgtcaggctcaccgaagtctcatggttcacacagatcatatgattcacgttcatcttcaagatatgactaaacctgattcggtcgcatcaatcaaatacgtttttctttgttccatttctatgtagctttttctttcccgttgtgtgatatatgtgtacaacttttctaagttttgtcagtaatcttttcctcagtaacagggattttccaactaaaatataaagctttgctcattctcatcaaatatagaaaatatcagggtgcaatttgtaataaacaaaagattgatctaaaacggcccaaatgggtgtagccttattcatagccaagcaaacatctttttctcatttttcgggctctccgattggtggactctctctaattagtaaaggcaatcaacaaaaaacaattttgataaaatgccaaaaccttaaaaacccatatttttagtatgccgataaaactaaataaagagcaatgatgtcaatgaaacaattggttgatatatcatatgcttcacttaagaagagaatatttcttataatcacaccaaaattgaaattttaaccccaaaaaaaacatacccaaattggatgagataatatttataaaattcctaaaaaaagcataaacacatattaccttataaagaaagttttagagaaaaaaaaaactcaatacaaggcagtcaatgacaaatctatgaaaatctttgattttcttttttgtttgtaaatattgataaacatatttttgctaaatccactattttttaaaaatctcaactttttaagtcagtaaatctacacatatcaataactttttttttttggttttaatgttaaaaaaaaagaaataactttgataagctttctgtattatttttgaggaaatagaacaaaggaaggaactgttctaattttgattttcatgaaactcccacatgtcatcttctaaaattaaaataatttagttttgattttaaaattacaatttaattatttctttgaaatattttaaaataataatactttcttgttaagatactcgttttggtatgtaaggatggagttggcgtcaatagtttgattcaagtaaattggtaagaaactaagaaaatgtcggatttggttattgcactcgtagccttcgccgttctttttgtggtgtttatcatcttaagctgcatcatgggcggcgaaaaagatgttcattctccaccgccgcttccacgaccagggcaactccggatgcctgtctatagaaccaaagataaagatttaggaggcgatggcaccgccatatcagtggctggaaccgatatctatggtggttcaggtgttggttctggcggtcatggaggtagaggcatcatcaccagcgatacaaagcttccttctccaccgccaccttcaccactcccaccacgaccagtgcagcggccgaaatcagtgtctagaacaaaagatcgagaattgatagacactggcaccgccatgttagtggcttcatcccttcttactagtggttccgctagtagttgtagtggtggtggcagtcatgggcatggttgtggcggtgggggaggaggtggtggtggtggtttaggtggcggcggttgcggaggcggcggttgtggagggtgataagctcttctctcgttaaaaagtgcgaataattactgaatatgtttcatgaagttaatatgttttacattttttaaccattttcattttctattgcaacttttgatttaaaataataaaatacacaaaaaaatagaattgtataaaaatacaaaacatcttaatacgtgaacaagtgaataattagagtaacggtgaattaacagagaacaaaggactactttttttttttttttaatttcacaacatccccgaatagacctagaatattggtgtgtgttccacgtcattatgaaaggggtattaattgggtggaggtacaaggatgtcataaagttttcgatttttcctttgggatcacagtatccatcaacttccgtgtagaacacgtcgaagatacgtgcaatgttgtggcatcgcagaaaaacttggcgcggcaaatgatcatgtgtgttcatgaactcctccataaccactttgtagttgtctttattcattttacgcaactcttgggatgcttcttccttggtgactccatgttgtttcatgtagaagtcgagcccattagccacctctcctctgcttatctcagtctgcaaacatcatttattcatgaggacaaacaagatgagaaaacacacacacacacacaagatgagaaaacacacacgcacacaagatgagatacctttaatttgaggtgtacctcgtaggttcctacgtcatttactagacggaacatcaaagtcagagttttgatgattaggggtttagaattgagccagtcaaaagtttccttctcattgatatcttccaaccaataaagctgtacgctgcaaaatcatccatcccgcctgacttatatccaacctccatgtcctcatcaaaagttggtacgtgacccgtccgtgcacatacaagtatttaatcttaaagtgttttcacaaatatcaaagaggaattggatggatgaacaaagaagtgatgacttctttaagcattccgaaataaggatctgtgaattcatctctctccttgtaaaaatgatggatgggtcgtgaaacgttgaggcatcgcaccagaatcggacgtggcacagcggttgtcgtcaagtactcctccattattattttgtaataattactataaatcttgttcatctctccaatcgcctcttctttggaaacaccatgttgcttcatgtaacaattcagccctttagccacttctcctctgctcatctcttgctgctcatccattacacttagttacgttaatgtgtaagacaaaaccggttgatgatgtgatcgcttattgtcatgcttttgtatgtatcaattacctcaaaggtgtttatgtcgttcttaatacgaaacacaccattcagagcttccatcattttaggtctggatttgtaccactcgcacgtttgattctcatcacaatcttccatcgcgataaagctataggctgcaaaatgatccattgacgtctgcataccaaactccatgtactcctcaaaggttggcacgtgacttgcgcgtgcccatttcgagatagccaagtatgctttccccaacttcttgatctatatgcaaagcactcagtttttcgtaaagatacaaacttgactatagttattgctaccccagtgtggaggactcacctcatctaccgctacttgcacaatgcgtgaccttccctgtggcctcatttcttgttcaatctcttctaaagtttcaaatacacctcgaaagacgatttttacataacttggtagcttttctatgtccccaagatcccacctggacaagaaaatttgcatgtcattttacctatttttaaatttaatcatggaaataggagttaggagtgaaaaacaacacctttggaaagaatcaacgaggcttgtaacttcaggaagagtaccatatgcatcacatgtatcattaaaaacagtcacaatcatggtaattttagtgactataattctccctagtgaataccgtggctcaaaatacaatgcgagtgccccaaagtagacctctacaattctgtccctgatgtaaggcagcttagatgcaagatctagctccttccaccatctgcaattaatgaacataaacattttaaataaagcaagacatacaaatataaagattgacgacatgaactaacacaacctacttggtcagatcttttagctcttggatataatgtagctggcaatagttgaagttgagttttgcaaacttgagcagcgtctcgtcatgatcttcttcttgttcgtagaaagagatatattctcttgcgactaatatctccaagttatgatatcgagctctatatagtgcgttttgtatatgtttagagagatggggactagcagttgctgtgtgattacttgtcaacgactctaagcgataccgagtgaagctcaatgcttcgtccataatatcttcagatggtgtcccgagatgtgctgcttcgtacaactgtagcattcctctaatatcctcagctagactttccttgaacctcccatcttcacctttgaatctattgaatgcatctacagtgaagtcgaaagccaaattatatatgtgtatacatatatgtgaatcaaggtcaccaatactcttacagcaaggcatatagtaaccgcgtagtctgaaaacctcaaacatggtggagattgtttccaaatcattttccttggctattatatcgtccaaattcccaaaagcttggccaagaatctcatcaatctcaatctcgaaatgatatgcgattccgaggttcattagcaaatggatgagacggatcctctcattgtcgctgtttttggaagacttgagcatgtctctcacttttggcttcatcgtcacttcaatctctcttgagaaatcatcaaattcctacaattattaaatatacaatgcaatttataaaaaaaatcgttcatgttgtctgaaccaacaattattggggtcatcttgtgcttcttatatctatctacttacagcgacatggaggggaacagaaaggaagtgatctccccaaagagtgggagaaaagtgtgccaagggacgactactttcaagattatcattactctcagtagccctaacgcagaccaagtggtgttgttttgccggtttcaaggaaagagtgtgcttgtgaagccaacgccgaggaaaaagagaggggtttgttgtggggcagagaggggcgttatgaagaccaaaactcgttcttgttgcttccatattgttgatgtaaaaaaaaagatacaggcgaaataatatttagaggtactctgttttgaatgttcgatatctgttccaaaatttgctctgttttattatgaaaccctagacgtggacgtttttaatggctgatttgaataaaaacaatataagttaactatacgaatcgtatatatatttttattttttttgaaccgggaaacattgcgagaaaaaatgttagacgatgatttaatttgataatttcatggggaatcgaagcattaaatttcttcacgaggtaaacagtgtttatcaaagtagtattgttgtattaaaaccctagaagctgccttccgctggcgtttgaaatggatgatttgtttttactttatttttgttttcttgggctgggcacatatgtgaacattaaaaatttaaaagcaatcactggaaaatcttagacaatcatttaatatgattgaattaattgagaatccaaacaatcaatgttcaatctctatctctctagcagaacttcgaggagtttattatgggttgtatcttacttgggaaaagaagattatgcgtttagaagtggaggtggattcggaggtagtagttgggtttttaacgacagggattgaggaaattgaggaaactaatccgctgtccatccttgtacgcttgtgtcatggctttcttagaaaggactcgatagtccgagtgtctcatgtgtatcggaaggctaaccggcttacagatgggttgactaaccatgcattctctttgcttttgggctttcacgcgtttgcttcagtacctgtagaagtagtttcgattttgcgggaagacgtcgatggagttttacgctcacgactagtccctttgtaatttagtttctgtatatttcaataaaccctggagtttctcccggtcactcaccaaaaaaaaaatctctctctctctctctctttctcaatggcattaaattccttccaagttacgacatagcagtgtttgtaagtacagtatcatgttctgcaacaaaaaaccatttccggtcgactgtgattttggtccgtctacatatgaaggctggtcttaataaggagaggcacactttgaacataactttttgggtccgaaattcgttcgtgctactacttcaataacaaaaacaaatatagtggcaggagtcgtaccctgttttagttgaaatcttccgcacacttgttctaaattatctgaatccttacactatgatttagttcccatgagaaacccttattgatatttgtttaaacatgacattaagattcactatgagagagatgatcacaacatatatggttcacaacttcacaagaaaaaaagatcagagatcgaactaaatgtacttgttaggagatcatatgcattgaagatctgataagtccatgaaaagtatcagtcgtttctgcaagaaatgtagctagcaagagctaccagaggcgccgccttgtcagactcaaaccctagaagctgctcctcggcttctctgctcagtttctccgcaacttccctggatctctccaaacctatcagccttggatacgtcagctttccagccattacgtcttttcctgcagtctttcccaattcctctgtagattttgttacgtcaagaatatcatcaacaacctgaaacaatagtccaatacacctagcatactttctaagcttttcgatctcttcctctgttccacctcccattatggcacctataaccgctgctgcctccaacaacgccgccgttttgtggaggtggatgaactctagacgctccaatccaacgtcgtgtggattcaatctttcgctgcttaggtcaaccacttgccctgccactaacccttttgtccctatggcccttgccagctcaaccactgcccggatcatcctctcggaagcgaccaacccactcgacacaaccgtcatgtgctcaaacgccaaagcaagaagcgcatcaccggccaaaaccgccatgtcttctccaaataccttgttagatcaaacactgatttaacactagttcaacattatctctgagcctttatatgatttaataacataccttgtgattggtgggcttgcctctacggaggtcggcattgtccatgcacggaagatcgtcatgaatgagagagcttgtgtggatcatctcgaccgcgcaagcagctgacatggcagtagcctcgtcgcctcccacaagctcgcagacagcaatgcagagcagaggcctcacacgttttccgcccgctagcaatgagtaccgcacggcttcctggaccgtgaggggttctcggagcggtacagatcgaaacgtcgagagccgcatttacagattcggctttgcggatcatatacaacttgaaatcaaaagcagagttgtgatcattgctttttccctgtggtggaatcatgtctctgccaccttgtgaggtgagggcagaagagggagacaaacctgtgcgttttttgagactcttgacggaagatatggagttgtctcttcttcctctggattggatgaagagggagaatgagctgagatgaacagtagtagccatggccgatccaagagtaattgtgtttgccaattaatagcatgtggagctcttaataggtttattggatttggaaatagtatgaattaaaaatgcattatcttccaacaaagtagtatgaattacgggatgaataaacaaggttataatatttaaatacaacatggttataagttttacgagtttacctttgtccaatcctttagtccatgactcatgagattgtgaactataaaatatgcaacatggctataactcaacatgtggcaatcaatacttgcgaatttcgatactgtctaaaatattttcctatagaatattaataaactaaatttaattggaaaagtgattacattcaacatctattagttttgattaaacgataacgataaattatgaggtgaatttgctataacaactaaattggtgaatataacttgcagaaaagacatggtggcatttttggtttcaggaagtcacaaaacaaccattctttctactttcataagaaattttgtttttttgtagaaattatctgccttggcgtagcagtgaacaaacagagaacctgcaaaaggctacacaacatcaccaaatagacctagataggaaaaacggagtcataatatttcttcttagagattattaaaaaagaaaaacaaaataagaagaagcaaggattaacttagaaaattggtgtgtgttgcacgtcattatgaaaggggtatagggtggacgaacaaggaggtcataaagtgttcagttttgcctttgggttcactgtatccatcaccctctatgtacatcacatcgacgaggcgtacaaagttgaggcatcgcagcagaacctggcgcggcacatggtcatgtgtgttcatgaattgctccataaccatttttttgttgtcgctgtacattttaagcaactcttggcttgcttcttccttggtgactccatattgtttcatgtaacaatttatcccattggccagctctcctctgctcatctcagtctgcaaacatcatttattcatgaggactacaagaagaggaaaacaaaaatcacaagaaccaaagatatcctttttagtttgaggtgtacctcgtaggatcctacgtcatttcctaaacggaatactaaatgcagtttttggatgattaggggagtggtattaagccaatctttttttttttaataaaatgtcaaattatattcaaaaagaaaaataactttttacatcagcttaatcttatgtgagttgaattatttgttttgataagaaattacaatttgagagcttaacagaaagagcagagagagtctagagccttgtcgagaaccagacttgtaatccgttctcgtagcggcggtctcctgtcgagattatgatggagagttgattgcgaatctgtttgtccatccaagtaatgagattggctgacgttctaggctcctcaccatggcgtcgatcatttctctccttccaaaccgtgtgtactgtgagttggaagatataacgtgacaaaaagctccgaattcgatcagtttgagtctctgagatgtaattcactattgtctgccaatctgttgagaatcgatgttgtaaaacattctttgcaattgcagtccaaatcgctgaggcataactacacgagaagaacaagtggtctcgtgtttcaatagatgtggagcagaatgtacacttcacatcagagccattattccaaagctgcattcgatctcccgttgataacctattacgcaaagcaagccaagtacagaactgatatttcggagtagagtgactgaaccatacccctttataccaagccacctcgtttgattttttacgaacctgattccatgtgtctttggtggaaaagcttgtcttaaaaacgtcccccttacctctccataaagctgcatcttcccgaagcaaaatgcgtgtctgatatttctggtttaaggctgcctcaatatcatttagctgttctgttcgatgtttccttctccttctattactccaagcctcggccactgttttgttccggcttattccaaggtctatttgccccctctgtcctgttacatccatcaaatggcccattcccgaccagttatcaaaccagaacgaagtccgagctccattattcacctctactctgctaaacggcttcgctgtttctctatacttcaacatttttttccacatccaagatcctaagcttgagttgggctttagagaccaaaaagactcttgtttaagcagattcatttttgaccatttgacccacaatgaatcatcattcgaggttactctccatatcaactttaaaacactcaccacattcgcctctgttaaagaccgcagaccaagtcctccttgttttggtttgcaaatgtcatcccatgatacctttgcctttcgacgatttagctctggtcctgaccacaaaaatgctgaacaaatactgtttatctcttttaggcatgcacttggtaatcgaaatgcactcatccaaaagttcattgtactccataaaacagaacttataagatttaaacgacctgcaaaagagagataacgtgaggtccacgttccaattcgattgcgtatctgctcaaaaaggggggagaggtcttctttggtgagtcgtttggttactagtgggagaccgagatatctaaccgggagctgagccaaaccaaatgggtagcgactgatcatcatgtgacgattgtgatcagagactccagctgtgtacaatgttgttttctccatattgatttttaaccctgaacgtttagcaaataggttcataacttcgacaatgccatctactgaacggactttaccatcagtaagtatcatgaggtcatcggcaaaacagagatgagtgagtccaaggtttttgcatttcgggtgaaaaccaaaccgtttcgctcccgctgcctgatctaacatctttgagagaacttccatactgatgacaaacaaatatggagatagcgcgcatccttgtcggattcctcttgcacttctgaaataacctgctaactcaccattgacctgaactgaaaaagatgctgtagtaatgcaacgagatatctagtgaataaactctccagggaaattcatagcagataaagcattgataaggaaggaccattgaagagaatcgaaagctttcgagatatcaattttcatggcacaacgtgttgaaacgttactcttatgataatccttgaccaattccgttgctagaagtacattttcaatgagaagtctatcttttacaaacgccgactgattccccgagatgaactttggtaaaatcctcttcagcctatttgcaattatcttagaaatcactttgtataggacattacaacatgagataggtcggtagtcccgcatctccttggattctttcttctttggaatgagcgctaaaatagtagagttcaccccttttggcagaaaacctttagcaaaaaaagattg

SEQ ID NO: 1032 - DNA, 22199 bp, Arabidopsis thaliana
cttatgacccttcattagtcttgagatcccttgattacaatcgtcaaacacctggttagtatagtgttactaactactactcggtccctctttttacgtattgttgcattgaaacaactttatgtataatgcagcaaggaagatgagatttggtgcaaccaaagagaatgagactccagacttaatgaaaaatccgtatcaagccattgttgctgcgagggactcactgagacaccgggaggaagcgcagaatatgagagccgagatgaagaagttggatgatgaaacgaatgatttgacaagaaagaacaatgaagatcggcttactattcaggagctagagaatgagctggttaagcgaagaagaagggctgaaaagtgcaggagattggcagaatctcaatgctcttacaggaatacactcgagaagatgatccgtgatgctatgcaccagtaagagattttctctgtaaaagaattgcattttaatatcttttaaatgtttagtgttgtttaatcttgtttgtttgtgtgtttgtaggagtgttgtgtataaagaacaagtgaggttaaaccaggctgcgagtagtgcgcttatggcaagattagaggcgcaaaaagcgatttgtgatggttcagagaaagaacttcacaagaagtttaaagaaagagaggagctggagaatctagtgaagcctgagttagagaaagcaaggaaaagatcaagacttttgctgaatgatgaagatgacttgttgctagacgatagagacaggaacttatctctgtatcttccaggaacaagtgaagagacgtcgtcacataaggagttaagggtacattttgaagaagagcataaagcagcagcttctgaggctgaaattaagaagcattgtgaaatagaggaggaggaagaggaacagaagactccagaggtatctgagaagtctcttgttgcgttggaagatgataaaccggttgaagaaaagccagatgtagaagaggggaagagaagcaacagaagcttcagagcattccatgttttcaaggcacctgagaatgaggaagatgaggaaagcaggagagagcgagggaaaggaaacgttgagaaatggcttcatattttactggagaacaacagcaaaagcgatccacacgatcttcaaacagagaaaagcaagaagattgatgaaatgatagagaaactggaccacaagttcccttttcttgaaaaggttgatgaagaagaagtggatttgaagttgcaggctaaggaggcaaacaacaacacaagcaaggttgatgaagaagaggtggacttgcagttgcaggctaaggagacaaacaacaacacaagcaaggtggaaataagaactgaaagttctcgtagaagcagaatgagttttgatttaaagaacacaccagagaagagtggcagagacaaagtggtgaagagatcagagagtgctagaaccttcacaaggattccatcatctccatcactcatctttggaatgaaaaagggaatagactgcatcaggaagaagccagtggtttcaggaaacgacgatgagaatgagtatcttgtcaagaacaacttcatcaagtcttctcttcaaacaatcaaacgagctgtcaaattctagagccccaatacactcccactcccacatctctacatatatatatatatatgcatttgtttagtgtttgtgatcaatatggttttattcattgttgtgcataaaaagacttccccattgtttgctcctccatgtgtaataacagcttgttgtgttgttttcattaattcaagattaagacatagattttctccaccttgaaggtgttgttcttcctttgacaagccttgtcttcatattaccaggagtccgtggctcaaatccttcaccattgtcaccagattcttcctcgcccttttcaacactaacacttcctctaattgacggtactaacccgagcctcttccaccggaaaaaacctttactcccaccactactcttcttctccataagcctctccagctggaaatgcatagcgccacactgactctgcagcctcaccacatcctcccgtagccttcttatctctgcttgttgaacattcatctcacgtttagacaaacaccgcgctgcagaacctccctcgaggtaatgtgaaccagaagcgtttgttggactcctcgtagtgctgcttatcgagctactattacagtcaatgtgacgacttagctttgtctgctcagtgaacaacactccaatgattgctctcaccggtaaacgatcattctgagccgcgtgaagagctgcttccggtgataactttctgctatcaataagtctacaaagttccttcctttcttgcttcaacacctgaggatgtgcctgcaatagaatccaaatcttgaattcagtcttaattttctatctcaacttcaaagtttcaagctttatttataccttgagatatgtatcaatggctcggtacaagccatcctctgtagtacgagcatggctaggaagagctgtgattaaggaaataaactccggtaaagctaaaccaccgtcaacggcagcttcagcgaggtaggagtcaacaagcttggccactttaacaagagccgcagcggttttaacaccttcactatccaatccagaaaacttgttcacgagacgcgtcacaagctcaatgtcaagcaaagtaccagacgtgtagctgaaggaaggtatcataagctccttgagagaagcttggtcgagctgccacgatactctggtttcaagctccgttaaataattcggattagctccgaccattttcgctgtcctgaggagacggaggaggaaattgcaaggaacagagtctttctccggtgggaggattccgattagtgtttcgacgaaaaaccgtttcttcattacagatgcagtgacgctctctggctgtgtgtcattgtggttgttcttggattctaaggaggtggaggaaataatggcggagacattgccggagagatcagggagccattttgaagcgtaatgagcgatgatggaaccgataaggtctggtctgattcctttggatttgatgccggtgattgttttgacgaaatagttcatgtcttggatacaagattcgtcgaagtaagtgtagtactccatatcaccgacgaaggtttcttggcgattgccgtagatggtgacgggttccggcgaaagtgttttcttcatttgtttcgagtttttttcttcacagtgagctctcgatgtgtagtgtagtagaagatgattttctatagaagagagcaaagtgaagtgatggtctttttatttaaagtttggttttatggttttttgctcgaaaagctcatcacagaacataatcatgacttccacagaatttcaaaaagttttgcgatttttagaaactaacgaacgaattagttagatttcattttcgtgaaaaattgataaacataatatttattgatacattgtagctgcctaatagtgaccgacaatcaaatcgtaacattttttctgatttaaaattgaaaaaaaaatatttcgttcagatagaattattgactattaaaaaaaaaaaaaatgactacatgaaaaagtattttattatattttcggattcaaatttatataggttccatgcaaaaaaaataaaatatatgtatgctaaaacatcgtttgattaaaaagaaattaaaaattgagggttactagaatgatatgaatatgcaaagatgtattgaagattatccattatgtagcatagattttactctgtattatgaattcagctgaataagaatatatgtataatgatctaaatatgtgctacggttttgattagagataatcctaatgtgagaggattgagaggttgtggaggaagatagggataagagaaggatgaagacaatttcccttgatttgccttgtatattaaaaacaattatagagatattttaccttatatatatgacaaagagaatgaaattaatgcatagacttgtcattgtcttactctgagatgctaaatggcatttgtattctagtgttaaccaattaattactatatacagtgaacgatttttagttacattcttagttttgattctgactgtaaactaaactccatcattatggtttaatttggttttggtcgtctaagataagaattacctaaaaaggatcatttcgtttgacacattttcaaacagtaactgttttgtatagattttttcataaatcataacacacgaagtacattcacgaacgactacaattttgaccgtggaaagagactaactagataagcttctatgcatttagctaaaaaaaaccaatatttcgaagaagacaaataaatcatagtctctctgtttcgatattttgtaatatccttctctccatgtgatttgtaaataagacgacaatgaatggtcccgttttagaatatcatgaccatatgccggttgtattatcacaattcacaaccatacgtacatgccaaaaataagattctctcttccttttcttttttattcccattgcacattcattatcacatcacatcacgagtgcgaaatcataccaaccggtttagcccattaaaggcccatttacagatatgggtttggctgttctttgttttttttttttactttccttgacataaagttatattcactcatcttttatgtaaatcaagagctaaataactccaacctctagacaaggctggtttttcttcttctctccagaggtttcagaacaaagcttataccttttgggcacacatttgaaagcactgaaaaccgttcatggttttggaatttgtcaccaaaattttctgccttgagacatttgaaggatgcaagcacatttgattatgttggcttttgatggtaatgaaaagtatacctttgttcagaagaagagcctctattttcttaaaagaagattggagttcttgaatgcacaagccattatgtaattagaagccagaaaaggtgtaagaacagaaaaaatagccacaatacaaatatataaacactaggcatttaccatcagaaattgcgaatatgttaactctatacttggaaagattatccagatatcagacagacaatacatgtgtatactcttccacactgtttcctctatattcttccaagtttttgtttagtgttttacctttacaatgtcaagtcttatttcttatgtttgtagcccagagcctgaaccagaatctaataaagataccaaaagtagccagaactatttgccggttggtggccacttcgtggtgcttgctggagaggaagcacaaaactcttcccctagtaaaacaatccattggtcttttgcattttcaggaagataaacaatgatgacaaagagagcgttaaggggaaatactagttggaactgagactgtagtagaacgattgtgcacagatgaacaaagtctaaggataaaacaagcagcagtcatataaagcttaacaagtgtttgatgtcttttgatgtagtgaacatcttatgtttaaagtatatgtacacagacactaacatcattattggatcaaccaaaggttttctcactgctatagcacatgtaaacgaatccatcatcatctttgtaagattcgtagaccgagtccatcagagcagctgcagagaaaaggaaacacagaagacatcaaacaaactattcctagaaaaagcctagaagcaaaacccaattgaagcagaaactcaccagtttgagggagagtgttgttgacaaacacgaataaggctttaccaggagacaaatgtaacctagcactcaatatgtagatgaattggccaactgacatatctcttggaaccagaaacctaacattcaaagacaactctcagatcatattgaaaccacttattcaaatcaaaagtgataactttgaaactaaatcagctatttaactcctaaaaatgtgtatgaatctttgaagttataggataaattagctttcagtaaagcataaattgaaccaaagatgattttggtaatcaaacaagtcataagctaggcaagacgagatcatcaaaatcttaagatgagaaatttttacttctttttctcgatggcaggcagatccgttttgcaatacttctcagcaattacctacaaaattatccaattctcagaaaaatttccaggtttagaagttcattgtcattgaacataaacaaacaaaatcatcttctcgggtacatcggataattgaagagatcggaggaatcaatttgaaaaggaattagaattgagctggatatatacttactggaatccgagtagggtacttagcgattatctcccgcgactccgcgagcctttcatctgcagataagagataaggttattgattactttcgtttttaatcaaccagagaacaattagagaacggtgatcgatcttgagatagaaacgaacccaacgtgtattgttccttgaacgatttcatcttcttcgaccgcccggagatttcttcgtcgtgtgtgtttttgtctccgtctctcaaaagcaagcggcgaagtcaaaaggaataattgagaaaatagaaatttaaactagagattaattatttgacgtatcgttaaggtaacaacaaagcggggatagctcagttgggagagcgtcagactgaagatctgaaggtcgcgtgttcgatccacgctcaccgcatttttgtatttttcaattctcttataatctgctgggtcccacgtcattggatatacccaacccggttcatgtcggctctgatgtgtttatttatttacggttcaacttctcggtttcgtcttccaatttctactagtctagtttttgcttcggttcgataattttttccacgtacctctagtccagttcaattttattccagtttatgtcacttacaaaaaaccacaggaacacaaactcaaaaatgagaaactttggaagaaaaacgaatcctctgtttattatttcctagcttggaagcaaccagaacaaacacttaacagctcaatacataagatgattatcgttatatgtcaagtaaaacagacactggacactttttaaacggattaacctgagccagtttcgcagctagactcttgttcgggaacacattgtctgccttcatcctctcaatcatcccgtaagcaggagttttggcgttgatataagccaggagcacggtttcatactgcataagctgagctgcatagcttgcccttttcattttcatgaataccttctctgtgttatgaacatcgcctctttttgcatattcttcaagaatcgccatgtaagtagtgaacataggtctcatcttattatcctttgtagctctgttcaatatcaactcagcttttccaacttctcctgctttgatgtatagcttcacaagcgcgtgccatgtcgacggcccaatcgcaatccctgcatttcccattcttttaaccagatctctgccttttgctagcatcttgttctctgtgtatatctccatgagggcaaaatatggcatcatagggaaaattttgtatttctccacaagtctctcaaacactgcctctgcttcttcgacttccttcagctttccccatgctttaatggcagaaatgcaattatcgtatctcggattttgatcaacaaacctactcagtcttctcacattgtcactgtctcctatgtctgcataaagtgggagtaatgaccggcacacccatggagtttgttgcaaacctttcccttctatctccttcataaggtcttgtgctctttctttaagccccgctcttatgtagtacttagccagaatagactgcagttcaggatctagttcgatgccttcttccttaattgtctccacgatcttctccattccagttatgtctccggctaaacctttactattgattaaaaaatgataggtagcacgactcggcttgatgttttctctctccattagcaacaaaacatcacttatcttctttctatcatgcatactgtagaggagaagcagctggttgcaagcaaacacacttgttggaaattttagctctttcattttgttgaaaatgtcttcagctttatttacatgatgcttaagtacacaatttgccagcagggttctgtatactacttctcccctagaagattctggaatatctttcaaaaagatttcagctttttgtaaactatgtaccttggccaccaaatccaactgagaagcataatttgcctctgtgaactcaaactgcgtattagctcccaaccactcccacaactgcaaatgccaaagcccaagcaaagacatacacattaagagggtgatagagacagaacaataaaagatttggcaaagtgtaaaatgagaacatatttacctgcaaacacatagcataggatttgcgtttacgcagattgtgtatagcaagagtaacctcagcttgactcaaatcttttccttctttgacccatttttcaagaacatgtttcactgatttataagcaacaatggattcgtacagctcagattgacctcttttcttagttggtttcccaccatctttcgaatgcttctcttcaatttcaagatcatcattgtcactaccaagttcaggctcgaacaaagaatcatcatcaacaactccctctggtacatccccagaaacaggaaccgcctcctctgattcagacagctcctcttccctaactacctcatctcctttatctttagcatcagctatagaagaaagcttgtggatgccaaagaaccgtgaaaacacatctcttgcggaataaagtctgactaaaccttgaggtttgctataaatcaatccaaatgatttaaagacccgttctttatcaccaccacttgatacttctaatttactgaccgcaccaaacgaagaaggtgcaaagttatatctttgactcctaaatgacacaatcaagtaaaaaataaaactttcaattcaaataaatcataacaaaccccataagagaagatctaatttgcttgctgctaaaccacacacaagagctctaaaaattgaaaaaaaaaaccaaaatttataaattagaaagctttttacctttggagaatcctcgaaagcgaatacataacttccttcaatcaattgaggttaggatcctgaaaagcaacacaacacaaataagagtcgacagtgatagtatcaacaatcattttaacaagccgtaagaatcttctagtagaataaacacaaaagacagagaaaattcggtgaatttcagaatctgaaatggaagctgctgaaacgctaaacccagaaatggagacgtatgagagaattacgatttcgagggattttttcgccggagccggagaacagtgatccctaattactttcagggtttaatgtctctgctagggtttatacgtgccaaggggaccaaattctcagcggctcctcttggttgaagagtaatctcatatactctttttataaaaatttgtttttgattttttttattccgtaaacgaagtaaattactcagaaaaccctaagaatattgcttaattacaacccaaccagggcaaatggatcctaaaataatccaagtccactgttttcgggtcaaatccaaataaaaccctaattcccctaattctctgcggtaaaatcgattcacatctcttttcctttgtttcttctttatttcttcactgtaaaatccagtaaaatcattctcaattctcgtcaacgacaacaatataactgttcgtcgatcttggtatatctacaggaaactaagaaattggggtaagtgatttaactgttcgtcgatttgattcgagttgtttcagattgggttttgtgatcgaaattgattgaagagtagtgctaatccaaatgattttgtttgtaggtttggagaaatggctcgaacaaagaacgcatgtgtgccgttggcggtggcgtccgcggcggaggtggtggtttcacagacaatcaatgacgaagtagtagtagcgtcggctgttgaagtggattctgaagcaacaaattcaatctctaacgacgatagagcggtatgaactttaaactttacacaattagaaaagtataactatgtatgaatttggtatatctttgttgatattgtaacttagaaattttaaaaagtatatctatgtataaattagtatatctatgcataaattgagtatatctattttgaatctaacttagaaattttcgaaactaaaaactaggtatatctatgttcgaatataacttacatattttagagactaaacaatatatctatgtataaattaggtatatctatgctgatttctacctttaaattatatgaaactaaaaagtatatctatatttaaactaggtatatctatgttcgaatataacttagatattttagagactaaaaggtatatctattttcaaattaggtatatctatgctgatttctaccattaaattatacgaaactaaaatgtatatctatattgaaactaggtatatctaaacttgaatttaacttataaattttcaaaactaaaatgtatatctatgtataaactaggtatatctatattcgaatctaacttataaattttcaaaactaaaaggtatatctatgtataatctaggtatatctatgttgattgcaggattctgatgaggaaactgaagctcttcaacctcttaaaatgtacttcggtccgagtgagtatacaaagccattcaagattacagcaaagtgttatcttcataaggcagtcggattattggagactcatcttaaagagtctgagttgaagtggtttttggagcacccacaattcaaacacttcttccacatgcataaggatccaaatcataaggtgatgggtatgtggctgttatttcttcgtacaacatgtttagataagaagaaggaagtatggtttattgtcaatggcgtaccgatccggtattctctcgaagaatttgcacttatgtcaggattatactgccataattatcccaaacccttggacagcttgggctgtaccacttttgctggcaagatgtttggactcggagcaacagttcagtatcttgatgtggagaataagttattgtctatgaaaaaaccttctgatgctcgtctgagggtagctgtactatattttttatgtagtgtaatcgttggaaagggtaagacaggaccaaacgcaccaaatgtggagaagttcttccttagggctgtggctgatctagagttgtgcaaaacatttccgtggggaagatttgcatttgaaaaaaatgtgaaagacattttctatctgatgaaaaagtgcaatggagtagttggtccacaaaaggtgtttcctagttttgttatgcctttggaggtatgtcatttcattatgcatttatgaattgttttaagaaagttaaactgtgtacaactgtgtttttattagcagttatacttattagtttttgaaaaatcttgtattgtttttatgtagtatctagcatttgaggcgatcccagttctcagggaaaatttctgcgaagatattgaatccgcagatcctcagtgtccccggatgtgtaaaatgaagtttaaatcaagcactatgaaagggtttccaatgtcagatgtgtatgacaaactcggtacaactaaggttagtgatgacatatttattagttatctatcatgtatcatgtatgttctatcatgtatgctatattaattactttcttatcatgcacaggacattcagagtatcttggctccaactcctgatgagaagctacttttggaaagaattatggataaagagtgtggagtgaatgatgtcgatgatctaatagctgatggttggaagaaacgtctagttgatgaggagaggactatatgttttgaaccgttgttcaatgaagatgtagcacaccggagctttgtggctaataaagctccgtctactgtggtaaaagctccaagaaaagccgcagtggaaaagaaaggcaagggaaaggctgctgcagctctgactagtccaagtgatgaaggtttgactagtccaagtgatgaaggtttgactgaggttgtaaacgaaatgaagaatttgatggagaatggatttaagtccatgaacaagaggatgaaagatttcagtaagaagtatgaagagcaagataaaagactgaaactgttggaagctgcaatcaaatcaattcaatcaggcattagaactgaagacgcttgtggttcaaaggagattgatgataaagaaaacgagctggaggaagggagtgatgcagagactgagatagacaaagaggtggctcaaggtgataaggagagagaggttggagaaacagagactgagatagacaaagaggtggttcaatgtgacagtgataaggaggtggctgaaagtgagattggggtggctgaaagtgagaaggacaaagaggtgcctcaagatgatgagatggatggaggtaaggtggctgagagtgatggagagatggatggagagaaggacaaagaggtgcctgaagatgatgagatggatggagagaaggagaaagaggtggctgagccaagtgagattgggatgcctgaaagtgagaaggacatagaggtggctgatagtgagaaggagaaagaggtgcctcaagatgctaaggtggctgagccaagtaagaagcgaggaaaggcacatgaggatggagatgatcctagtgaagaggtagttaaaaagcctaaggtggtcaagaagctggcagagtcgaggacggatgctaagccggtgtatcggagtcctacaatgacgaggtataggaggaaaaagacaaagaagaatgtttaagcaatttcaactcttggtttgttttaagtataactatgttggttgttgaaaacttggtacatctgttcgaacttggtacttggtttttttttgtatttctccttaagcttttgaaaacttggtacaactgttgaacatgtttattagggtttttgttttattttggtatatctacttatgttttgtaacactaggtataattatatgtttttgtaattgataagaaaagaattttaaccgaaataactagattcaacacaacacttagtctttataattagattcatatccattcatcacatcaaattcaacacttagtcttcataattaaacattacaacacttacgcttgaatttctacgacaaacacaacatgccaacaattgccatggttattaaacatccagaactaaaaatgattatcatattaaagtccttcccctttttgttcttttccatcggatctctttccatcctctcttggttcctttccatcttcatcactcttacttcttcttcaagaacaccgagttgaaattccaattgttcaatctcatgtgtaaaagcctcatctacccacttaaacacatgattgtcgttcataagctacattttgaaattgtaaaaattgttaaatcacatgtatatctatgtataaactaggtatatctattaggtatatctattaggtatttctattaggtaaatctaggtattttagtgactagtcaaattaggtttatctataccttttttctgcagctaaaccacaccggtaataacgacggtacggatttggatttgatcttgaaatcctctcaacgatttcatcgccacaccaacactgctttggaattccaggaaccattggtcttggtcgggaaacggaggttccacacgagttcgatgctcctgagaggtggctcataattccctgagttttggatttagaaattctagaatatttaatagataaaccaggttgtacaatatgaatcttcaaactccgaaatcgaaaattgtcaattgcatatcagaaatctataagtgaaacgtgaattgaatgaaaaatgtacccagaaaaacgaaatgcttaccaaataattccactcttctctctttttctctcttcttctctcttctgagtcttctctcttcttgtcttttcttcttctttttcgatttgattttctgattttaattcataatagggttttaaaaaaattctgcgaattgggggaaacgaaaattttgggtgaaaattttttgatagtgtgaaaagtaatgtgaacacgtttcttatagtgtgaaaaagaattaaccgtgggacccgcgtacgagttgttcggaacaaaaaaggtggggcccgcaaactctttgcacacagatattccaagttaacaggttgtacctgtgtatacacagtttgacttttgggggttttataattttattagatatacttaattttaaactaaacaaatttagttataccaaagagttttgatgttttataaacattccacatattttcataggaaaatatgtctgaaaaattcaattttgtgtgttttgcaatgttatgatgataataattataaagtcatcttcaaagtgtaaggtgtttcttgtataacaaatgaatttggtaacgactaattttttgaagtttcattaaattatgattttatcaatcagtagttttaatactcaacataagtggtataatttgtataagaaataacattacatcaaattttgttgcaaattaagcacatttgttacatttgtgatagttgtacctttacaaaaccaagtttaaacaagttttacaaaaccagagagtacaaaaaacacgaatttagagacatacatagttctaccatttaaaaattaagtttaaccgagttttacaaaatctgaaagtacttaaaaacatgaatttagagacatacatagttctaccattagagaataaagtttaaccgagttttacaaaatctgaaaatatttaaaaacacgagtacattaatttccgcttgtgttttggctaacactttcgtggtttggaaaaaaccagctctccaagtttctgcctttcacacgcttattcttggggcgacgttctccaactgatgggtgtctagtttcttgaactcttccctttttaacaacatgaaccggaggatatgcaaacaattcttggatttcacttggaataacccactctgacttatgcggcaccggataaatggttctaacatatgccataacccacatctcaacaaagtaatattttgtgatcaaatcatataaacttttgacctcctcggatctatctttctgtttcaagtgagtcatcacagccgctattgagtgtacacaaggatacttgtccaagtcaaaacaacgacaataacaacttttattcctcaagtccaccacataggtcttaccatcgcgaccaatgacactatattgaagctcgtaggtgttaagctctatcaccggtaatttttgtgcaacttcacatgtttcatgtatctcgttctccacaaaaggaacaagtctatgtgcatttgatccacttaaggcttccttcctattattgcagctccattccgcaaatttcccaataattgcatctatcataggtaatagcgcataccctctcacatccctaaacacaccattcatagactcaaccgcattactagtgtcaatgttgtactttactcccggaaaatgacatcttgcccatttttccaaatcagtgttttcatcaagataggtggctaccttagggtgccttcttctaaactctgcatattcatgttcaaactcagacactgaacaaatggatgcaattcttctgaacgttttagcaaccccttctttgttgtatgcaactttcgttctcacattctgtgacaaatgatacacacagtttccatggtgagagctcgggtacacctcagccactgccttgatgaggctagaatttctgtcagacataaagaccaattccgtactgtctggtataacagttttgagagtttcgaaaaaccacttccaagtaacatctttttcgccatcagctacagcaaacgctaagggataatggtgatgattcgggtcttgagctgtggcaaaaatgagcacacctttatatatagtcttcaaaaatgttgcatccacaataatcacttttctcatgactttaaatccttcaatggcagcccccaaagcgacaaataggtacttgaaccttttttcttcatctaataccacactagtctttgtgccaggattcaccttctctaacatatacaaatattgataaaccatcttgaaactctcctcgggacaagcacgaatatcactaacagctagtttttttcccctaatagcagtcgagtatgacacagttgtaccatgttttccctgaacaaggccaatgagacttttaggagttggggtcttgtactgacctggataatcttcatgcagtacggttgcaactaaacgtggtgtacctctccttttaatgcctgtagcagtattcgaccgtacacatgtatgtaacttcctatatgttcgaaccgagaagcgagttgaatccttagccttcgaaaatcgtatgtaccattcacacccttcttcagcacattttaccacataccgcttcttattcgagttgagtaatgttagtccaaaacaattcctatttgctcctgtctctactaaatatttcacatcatcgctattttcaaattcttgacctattactagatcaagaccatcatcccatggacctttaaacttagaatgttggctgtcacgtggttcctcaacatattcacgaataccatcattctccttagtcatactcagattactatcaacaccattatccacatctctaagaggctccaaaggctctaaaggctccaatgtctccaaaggctcagcaagttgttctcctagtggctcatttgcgtaaagagttatagcaccaacattagctctatcatcattatctagaccaccgaaattctcctcttcataattcacaccaactgaactctttctttgtactctcgattgttgctcgtttacgtcaaccatttccaactcattaccgacttctacatgcaagacacttctacttttctcttcatccaacgtggttagataaacatatacatcatcatcatccctaatatataaatatgtaggaggtttaacacccgttggaatgtaactcaatttccgcttcatcgtagattcatctatctttatctttgtgcatatcttatccactaaccacgaataagtaatctcctccattgatgatgtcctaaacaatataccatacaaaccaactactcttggattccattgatatgcttctccggtttttgaataatatccatcataatcaaaatatatgattatgcccattatcctgaaaaaaacaaaaaaaaaacgttagctatacctagattttcctgttctagcaaattgtacttcaaacagctataccacgctcattttcagaaataccagttatactattgaaacagctataccacgctcattttcagaaataccagttataccataaatagtacttcaaacagctataccacgctcattttcagaaataccagttataccataaatagtgcttcacacagctataccacgtttcttaggtatacctagattattctgttctagcaaagattttcggaccaaaaacagtaatctgcctaagattaactacgaatcaaccattacagtacattaaaatgtcttaatagacccagaatatatagttgccaacataatgtcccttaatttccaacaccaatttcaaatctatcaaatctaattgaaatctacaaaattcaaacacaacaacacaatacttgatgaattaagatgtccaaagtataagaaaagaatggtaaagctcactgtgaataacagaagcaaaacgacgacgaacttggtcgattggattcaacgtcgaaggattcgacgatagttgcagtcgtcgatttggattttgtgagggaggaaaagaaattctgggaatttctgataggttaatattttgtgaattaaatggtattggtttggagacttaaccgtaattagttggtttggttcgtccgtccggttccggtttgttgggtaagggtaaacaaggatttttaaaattcattaagagtataggagtatgttagattatatgagagtatttagattcattttaggagagtagagagtatatgagatcatcgtccgtgccaaggaaatagtactctttttttcccaaacacgtgtgaggtggtttaaagggtataattgtcaatttcaaaataagaggtttatttggtgcgaatctcaaacgtccaaaatgtttgaaatcatataaccatgggttgtattgtaactatagcttaccatccaaatcataaaaacaataaatgatgtgtacatttttccaacagcgatcatgcttatttctatgaaaaatgattttgacattatttgaattgatctttatacaaataaataaagttttctactagtttaaaaaaaaatataaataaacaaatgaattatgaatttatgattacgtctctctataatcatatttgttcttttttaatcattgaaagctaaacttatggggaatgaatgatctgaaatgacagcttcctaatttttacagctacggtaatatagggtaatgggtcaagtaaatgtaacgtgttaaagattaaaaagtaaaagacgtgcgtcaaagaaacagagacgtcaagattagtttaaaacttactaattacagtagttaattcggaattaagctaagtccagaaaattccatgaagcagcatccatcgtcagcatcttcaagtcacactttttcttattttcgcaaaaaccttcaaaaacccgttccggtctgttttctcctctcgaaaccctcgatcgttgccgcgaaacagctccggtgacctaaaatcgttcgacgaaacggtttctcttcctccttgtcgttttcacttttcacgtcgttcattgcatctataggtcttcgtttgttctgcattgtacggattctcttccgatcgacgattcagcttccggtatagcttctcctctcttccatggtctttaaatcgtcgtttctgtttgatttttagtaacgttgagctgcttttgttttatcggaagcaacgtccgtacaggtttgcatttttgtagcttaacggtgagtgttttccggtatatttgttggattttctgatcaacgtttgctaaaaaacaccgtgttttatacagattatctttggtatttcgaattaactgttacatctgttgcttttgtgtggagcttatgaacagtaagcgattattttcaggtatttgagtctctgaagtttaggtggcttgattttgtgggtaaagtttcatatacagtgatgacattttgttgttgcttcgtaaaatggctttgttatacagtaatgacttcaatttctgacaagtttatacttgtgaatggtggcaactgtttaggttagtagatgaaatgttgccttgtgttcttttgtggggttgtttttgacaatcttctgtataggttttggatgctttagtgaaccttatactttcctagttagggagtacttcaatcatgtgcttgcaaagtttccttttgaggttgaagacgccttaggtttaaaacttatatccatgatcttacactctctaggactactttggttgtatcttattatgtttatcttgttgtctcttttacagtttgggatatctcagcaggataacttctctatgttgcaatcgaatagtgctggtggagaagacaaccctgattttaagtggggtgctaagagaggggtgggacggaaagataataaagtccggttctatgaatcatttacccttgagggcatcgagtaccggctttttgactgtgcttacttttacgtacatggtcaatctgagacttcaatcgggaagcttgtcacatttaccagacatcaacaggtgagaagaaagtcaaggtcatttggtttttcgacctatcgacatccagcgcttcttgggagagtatgagccacaatgggatgagttgtttctggcttgtggtgatgaaaaaggggtttccaatatcaatgatgtggtaagtttgctggcttttcatctccttctctcctgcttactgaatcgaaatagtaatctgaattgatgatatgtttactatagatgtaatatgagtttgggtttcctgtgttgttggtccaggagaccatcatggggaaatgcaatgttgtatgcacatctgatgaccgaagaaacccacgaccaggaaccaaggagctgcggagagctaaatatatcttctcccgcacttttgatacaagactcagaattatatcagaagactttgcagatgctatagccggaattggaggtttggattagaacaaatgactatactttattgttcaacccctaacactcttcgagtatggatctaatgaagctaattttagtttctactggctctaatattgcagtggataaactcttcaacatgagaagagataaacagcctgtaaaacgtctaaactcaagcgcagctgccattactagggcttctccagttaaatcttttcgtccagatttgggatcaacaaagttaggtaaacatgataacagagatgcaaagctgatgagtagaacaagctcgttaaagaaaggttgatcctttttcctatctgttcaggccacttatttcctatatacttgtgaaatggacaaaccagattgacacttacttttattttgcaagtcacttttctggaggaccgtgctgatcatgtacatgtgaaaaggaaccctcctgtcaatactgaaaccactacaagaggtcagataccgatactcaaaacaagagcatttggggagttatatgcttcaggttcatcagtgaatgctaagccttctaaaaagagaaagcttatactcaacacgccagaaacagatgattcagatgatcaaggccctcaatcaggagagaagaaattaattaaaaatcctcctcttgtagaaaaggctccaagtcagaacatcgtacgtaccatctctatccttcttctttcggtggattagctgagagaaatgtaaagatttacagcacaaaagtagtgtattatttctttgcttgagcatagcaaaaagattattcacactgttgattagatagtattaacttatgacatttccaaattattttctccttttgtctgccttacaggagaaaaaaagctggtacaagaaactggtaagttctttgacgcttctaagaagaatctgaaaacatttcattccaatagccattttttcatgctatttggctttcatcacacgaaatcagaccaagggaatattactgtttatagaaactatgaaataattaagataaagttggttaaacgatttgtcctggttcaaaagaaagtctaaaatcactagtttcttcatttaacattactattcctttttccagccttttgaggacgaactaaagccggctatagaaaaaggtagggtgctcttaattgagaacctggaaccatcatacacatcgctggaggtagaggtatgtgttagtgattctacaacattctctggatcttattttatgttgttgtcaatgcaatgccatctacatatgttgatcaaagacacgtggaattagcaatcattctaaaaaccctgtaaaatataactctcctcgccgtttcctttttgttctgttcagtttctttttaggcaagcattcaaagaaggagttgatgctaagatgatcccttcaagtcccatgtctagcccacatagtggtatatgtatattcttacaccttcctgtttgctatttgttagctcataatgttaggaaaaaaaaaaaaactgtcaatatatcaaattaaactgcatttatctaaacaggcagggctcttgtgatttttggaaccacaaaggcagctgattctgctatgtcgcggttaaatgaagattgtctgatgttatctggccagaggttacttactactcttttatattctacttctcacgtatatgttaacttcatcaaatccttctttcttttactatctaatatgat

SEQ ID NO: 1033 - DNA, 43500 bp, Arabidopsis thaliana
catttgatgcgaagctattagatataattgtttttgatgtcctaccagtttctaatggaaatgatggtgtggatatatcactagcagtagaactgaaggatcataatcctttgcggcatgcattcaaggtcagcaattactgtcctacttatcttttaatcaattatatgtgtgcttactccatctaaataagctttcttgatcatctttttatacaatcctccttgtttgataatctacgatgttgttcttttatgcttcattgcttcttagagaaattaaaataaattgtccaagttatatatccgaattttatttctattacgcatggacactaatgcgccgtggagaactgataaccaagaaaattagaatattccttttgttgtaaattaaaatgggagcctactgaatccttcttttattagctaaaagttgaatcatcctcatttttcttgcccctcttctgctgcacaaatatttctggggttatatgtcaagaaagctatggataatccatgtatataacttttgttaaaatatcccaggtaacatctggaaaccggagtataagaataagggcaaagaatagtgcaaaagttaaagattgggtggcttctattaacgatgctgctcttagacctcctgagggttggtgccatccccatcgctttggctcatatgctccgccgaggggtttgacggatgacggaagtcaagcccagtggtttgtagatggtggagcagcttttgcagccattgctgcagcgattgaaaatgctaaatctgaggtctaccacttttcattactgggtgtggagactgatgatgtgttgaatgttatatattttcaactgatctgatttgccttatagattttcatctgtggctggtgggtgtgcccagaactctatcttaggcgtccttttgacccgcatacttcatccagacttgataacttgttggagaataaagctaagcaaggagttcaggtacttactacagaacatgcatgtacttaatagctattatcttctgttgtgaagcatgtctgtagtctgcaatggagatctgacttgtcaggtttggtggattactatctttcaactttttcatttttattactttctttttcagatatacatccttatctacaaggaggttgctcttgctttaaagatcaacagtgtatatagcaaacgcaggcttcttggcattcatgagaatgtgcgggtacttcgttatcctgatcatttctcaagtggtgtctacctctggtatgatatggtggacagttctaatatatcactctaatatgtcacaatgctctttctagtttatctttctgagtttgatattagataaactgttaaaaaactcctatctgaccacaaaaataagcgggaaggacattgattattacctctgcgtgtctttctaggtctcaccatgaaaaactcgtcatcgtcgataatcaggtttgctttatcggagggctagacttgtgttttggccgatatgacacgtttgaacataaagttggagataacccttctgtgacatggcctggaaaggactattacaaccccaggtaagaatttccttctttatgcgaataaagagttgatttttagatgtaataaaaactaagaacttatgtgtcacttgctagttatttttagctgtgatgaaatcaaattttgtattaaatacaaaccaggatgtccattagtcatttcacctttccgaattcaaccctctgattttttggtttgaacgtacttaaaattttccagagagtctgaacccaatacttgggaggatgctctgaaagatgaattagagcgtaaaaagcatccacggatgccttggcatgatgtgcattgtgctttatggggaccaccttgccgtgatgtggctaggcactttgttcaacgctggaactatgctaaggttcacccatacttctttaactttcttctatctgtttgtttttcctgttattaccgtaacataaccattgtgtttttcagagaaacaaagcaccatatgaggattcaattccgcttcttatgcctcaacatcacatggttataccccactacatgggaaggcaagaggagtcagacattgaaagcaagaaagaggaagacagtattagagggattagaagagatgattcattttcttctagatcatctttgcaggacattccattacttttgcctcacgaaccagttgatcaggatggttcgagtggggggcataaagaaaatggaacaaacaacagaaatggtcctttctctttccggaaatcaaaaattgaaccagttgatggagatactcctatgaggggctttgtagatgatcgtaatgggctagatcttccagtagcaaagcgtggttctaatgcaatagattcagagtggtgggaaacacaagatcatgattatcaggttgggtcgccagatgagactgggcaagtcggtccgagaacttcatgccgctgtcaggtgggtgttatgaaagtttatatataccaattatatgtggaatttcaaatctgaatagagctgatgctattatgtacgatcctattctgtttcatgcttggcttcagcatacaagctttaaaattttattgtgatcataataataagaatttcccttcaacatttagcactgattagaactattttcagattatacgaagtgtcagtcagtggtctgccggtacaagccaagttgaagagagtatccattctgcttaccgttctctcattgacaaagctgaacattttatctacattgaggtatttgctataacatgtgtttgtcgtggaatctcggttttgcatgagttcaatttgatagaccaagtaattagagcatcatttagcgtttcattgaaacgacctgacatcttttctccctgaattatgcataatgcaatttgcatcacattacattcaacttgggagaaatatggaacattctgctaaatgtgctggtaatttgagctgtcagtcaaataatgtatacatgtattggtttccgtactttgatttggcacctctctgattccctcttagccttggtgagctttgctggagatcctgcagctttccttggtcaccttttatctggcctacacaaaagtttaatttatctggtgaaagaaactaatcccctattgaacgtggacaaactaagcattaagtaatagtcctatacccttgctcctgcaaaatccaccttgcaaatcattcatactttatatttcagataatacaagtaacttagttcttgaaactgtagtagttgccaggttcacattgtctttatttttctgacttctgtttgcatgttgtgcctccagaatcagtttttcatatcaggcctttctggagatgacacagtaaagaaccgtgtcttagaagcattgtacaagaggattttgcgtgcccataacgagaagaaaattttcagggttgttgttgttatacctctcctccccggtttccaggttagtttcggctagaaaagtgtattctgtttaaaaagatttgctcctgcaatgcaactttttaaaccaacgtatgtgtctggcagggaggtattgacgacagtggtgcagcatctgttagagccataatgcattggcagtatcgaaccatatacagaggacataactcaatattgactaatctttacaatactattggcgtaaaggctcatgattatatttccttctatggccttagggcatatggtaaactttctgaggatggacctgtcgccactagtcaggtaacaactcaatcatccagggtttagatttgtgcattgctgcctttttttttgtgatcacggaatcatataggatgccctgttatacatgtgcttgaatgcagtggtagtgagtattaaaaatgtgaatgctatttttttctctcaatgcaggtgtatgttcacagtaaaatcatgatagttgatgaccgtgctgcattgattggatctgccaatattaacgaccggagtttgcttggctcaagagattctgaggtcatattttactcacgtactttcttgtgctaagcaatgatttccaaaagcctatttcatacttgaaactaaggtgaagatcataatagaaaacaaaaagagtaaaaaaaattatttcctctgttgaaggaaaaagattttcgttgcctcagcacgttatatcagagtttatagttaggaataaattcatttaaagtatgttgaacaagtttttttatataactgtgtatgctgaacataaaaaagcataaaatgcttctgtatgctttatatcagattggagtactaatcgaagacacagagttagtagattctcgcatggcaggaaaaccatggaaggctggaaaattttcttcaagtcttaggctctctttgtggtccgaacaccttggacttcgtactggagaggtttgtgtcatattctctataatgttcttacgaagtggtctaagatatttcagtatataggcagatttaacacttgaaaagccatggaaattattcttttacttagacttaatgatgaaagatgatctgaaccacgccggcatgaactttcaatcaatggttatgactgaagaggatcttaagactataaatgtgctttgattactaaaatgtgatctttctttgtagatcgaccagattattgatcccgtctctgattcaacctacaaggagatatggatggcaaccgcaaaggttggaaacgtgattacagagagaaatttatattttcacttaccagatataaccagtgagcttatttatcccaacgcagacaaacacaatgatataccaggatgtcttctcttgtgtgcccaatgatctcatccattcaaggtacaattccggtctatcttttctttcttcacctttggccactatcattattccttttgaaacgaaaagattccggattatgattaatccatggcattggatcgtaaaatctcttgaatatatacgcagaatggccttcagacaaagcctatcgtattggaaagagaagctgggacacacaacgatcgatttgggaatagcaccagagaagctggagtcttaccacaatggagacatcaagagaagcgatccaatggacagactaaaggcgataaaaggacatctcgtctctttccctttagatttcatgtgcaaagaagatctaagaccggtcttcaatgagagtgaatactacgcctcccctcaagtcttccattgagatcattacatcaattcttgactgctggcttattcagtgacagctctctacacgaagaatacttcattgctacctttaaccattttcatctcatatgtttatgagaaagaattaaagatgtttgtatagcgatatgatatgtgcaaacagaggaggaaactgagaagggaagccattttgctagtttttggtttctctcttccgaggtaaagtaaaaaaagaaaagaaacaggtcattttctaagtcaaatattggcttactatctataacagtgaatgtgtcaccccacacagacacatatgatttgtaattatgcgaaaaaagactgaataatataatgtcggtgtcgagatccacgaggtgccatgtgaatatgaaaatatgatgtgacaatgagtttgggtcttatctttgtttgtctctgagtcaaacaactccatctttaccacttgcatctcctttgttgtgtcgtattttgttcacaacctgtttgtatctatttatctcaagtctcaactgacaacaaaaaaacttaaatgaaaagtaatacatagcatgtggaggatttggtgatcaaatattaatccacacatgcaatatacgaaaagttaactttttgttcggttctgaaagtaatgaaaccaaaagcaagagaaaaatcagtttagttaggagttctatttaacaaatttcaacattaatctttttcagaaaaagattaaaatcaaagaaagcaaaacggacagagttttgtaacttggttcgggtacatgtttacatgatcttatttcatagtttcccaagtaagaaatagatttggtttgctagttacatttgcgaccatgcatttagcatattccatctagtgaaaattaattaatattatctatttctattttttatcttttatttcactatcttatttctaccacccacccaagctagaccgccatcttaactaataattaatcaaacttaagagtcgtaagcactgatatctatggattacctaagaaatctatagtggacatgtataaaatctaacatatgcactagggacatccatatcttaggcacatatgtatggttaaagacaattaaaaaaaacaaccttacacgtaaataccttatacacacgtaaaatttgcatacgagccaatgtctttcttgtatatgtatgtattgatatttttttctctttttcattctttgttaagggaaatatatacttatcttatatgacccctaaacggctaaacgatataaaaacaacgttaaaaatcttattatggtgcatggcttgcttataattgtttagctatttttaggttattagtagtcgcagcataaaaacggtatgtcaacaaatttcatggtagatctagattacgacctcaaaactcgtttatacaaagtatacaacgtttctacaatttatattaattagttttttgtgagtatgcatatatatcgtaactatgtcgggttttatattattacatttaaaatgataggaacttatcatttgacaaggtgtaacaaaaataataattataaagatgagagttgtttcggatcaaaggcacttaccattagcttttagattcgagagcctctcacagccacacctttttttggactagtccttattgtttaacaaaccccacatgatatccttttatatttacaccactttcgttaatttattaactttcttccacatccacatttaaatttgatctagacattttcttatattaaactatatacatctctatcctaatgaggtattaactagctatagtttattcatttgtcggtcttaagctttattatttgtcatggcaagaaaaagaaaactttgattggttattcattgtggttgttgtaacgcttttttttgtttgtgttatttgaccccaaacataaataattcttcattttcttgcgcgttttatgattgcgttgaaataacatcttcactcgccaaacactccagtaatacccatttttccaacatatacacttctaatcatacccacaaacatacacacgttttaatctgcagcttcaaggatatgttgccttctttaattgaatcttatttaccaatggagaatacgtatacatttccttagactaaaaaaatatataaacccttttgttaattataacattcaagtattcaactataacttcttaaataaaaaaattcgtcaactttattcataacatatatacgtgtccttgtcgacatgcaaaaagaatgtatatgtgcatttgtacgtgtatatatgtattaaaataaaaggcttagaatagtcgaaggagagaaagcgaaagatgatgatgagtcatagagacaattcaccagcttataagtagtaaatccaccaaaaggaaaatatattcaacagagaaactccgatcaagaatattcatatcagagaagaaaaagtaaattcctattaaacttctgattctcttttttctttttgttctgcttttcatttgctttttggatatctttttacagtagttataacttataaatgaagttcgtaaatatattgtaggatcataagagaatcaaagaatggtgcttttaccagcgtttttggacggattagcgagaactgtatcgacgaagaaaggtaaaaaactatcggaagatgaagatggagggagagagatcgcaaaatcgatgattaaagattcgaagaagaactcgacgttgctcggtacttcaggctttgttagctccgaaagttctaagaggtttacctctatttgttctaatagaggtgagaaaggaatcaaccaagatcgtgcaattgtttgggaggtacactttatataaatactagctatatgttaggtaattcgtctttccatgaaacgtattatgatatctacaaattattgacgaacttatatgttagaaatggaatcatcacatgcatgtagttactaattaattgtgtttataagatttgttgtgaaatttaaactgtttttatgtatttatattacataatatatagggatttgggtgccaagaagacataacattttgtgggatgtttgatggacatggaccatggggacatgtgatagccaaaagagtaaaaaaatcatttccatcttctctgctttgccaatggcaacaaactcttgcctccttatcatcctcgccggaatgttcctctccgtttgatctttggaagcaagcttgcctgaaaacattctccatcatcgatcttgatctcaagatcagtccttccattgattcttactgtagcggctgcaccgctctcaccgctgttttgcaggtaacatacatacatatgttcataatagtactgaacacctttagcaaaaaacaaaaatacataagttcttgtaaccatattataacttttcattttatggtgtatagataatattttgtgagtatttataatgtttcatttgaaagatgctaaatgataaagtttgattttgtctttttaagggtgatcatctcgttatagcaaatgcgggtgactcacgagcagtaatagcaacaacttctgatgatggaaacggtttagtcccggttcagctctcggtagactttaaaccaaacattcccggtagagttctagaagcctttccatattttacagttacttttactcagatgaaatgacgaattaacaattggtatgtgataatttccggttaaaacagaggaagcagaacggataaaacaatcggatggacgattgttctgcctagacgatgaaccgggagtgtaccgggtgggtatgcctaatggaggatcactcggtttagctgtttcaagagcgtttggagattactgccttaaagacttcggtttagtctctgaaccggaagtaacataccgaaagataaccgacaaggaccagtttctaatcttggccaccgatggggtgatatatcaaacttactcagcatttaaatcaaaatcaagattgataaatcatataattgtgtaatgaactaatgatgtatgtatgtatatgtagatgtgggatgtgatgacgaataatgaggcagtggagatagtaagaggagttaaagagagaagaaagagcgcaaagagattggtagagagagctgtgacgctttggcgtaggaagagaagaagcatcgccatggatgatatttctgttctctgtctcttctttcgtccttcttagtttaactcttctttaacctctctattacttatatacatttatcaatgtattttgggcgtcattgaacaacaaaaatgtgatacatatacatttttacatagaataatagatgttgtgaggagtgattgagaatggagagataggtgagtaaagagttttataatggttttgtttgtaagtacgacatgtaatggttcatatattgatcaaagtttggaccttgatcttgattatgatttctatagaagacaaatttctaaaatctcaattctaaaaactaaactatatgctggtcctgaataaatccaatcaaaatcataactcaagacttgaataaacaattttaaaagaaaaaactatttcatatataatatccaacattgatgagttttgtgacaaggattagttttcagttttgtcataaagaggatttgcttctaccctttatagtgacaaaaggacaaaatttgccataatattcgcaattctgaaagccaagtgaggccgttgcatcattcaggtttcttggttgctgagatcttcagagtaccttcattcaccaacacctgaagctctgttttagccatctcacgaacttgaacatcttcagtctctacgaaagcagatagtatctttgaactgccaaaaaaaaaaaaaaaaattaacgcagcagaacaagatttcaaggcttgacgaaaaacacctgcttgtttgcagataaatggatgtatgagaggactcattagactaactaaccagtgtccttgtgcccacgaccgacattttccagacaaggccttcttaaagagaatggacgcgaaaccagggcgattcaagacaagccttcttatggtccgacttgagtgaaagttttccaggatgtgttctgaatccttctcagattcttggggtttcggttctgctgctacagagctaatagcttcgtacagctcacacagcttctcgctcagagatgggcagagaataccatcagagcctccgattgcaacctgatacaaaacaaacgtgaaaatgatgaaatctagagattagcttgatgaaatctagagattagttgagaggaagaagatcatgacaacacaaaagaaaagaaaactggaaattagcattttgttatcaaaatatatgattcatctggggtagagattgaatttcaagaaatattgaatgaaagtagcatctgttatgaaaggtggataagagtatacgactatctaccctaacaaatgtcatgtggaaaattggtatctacaagttacagaaatcaaaacatttttacaacaggactaaaaccaacaaacgatgtgagaccacaaattacctcatacatgacctcattgccaaattttgactggaggaattcctcggcgttctccacacacacatcaataagcctctgtagaaaaatcaagaatgatccatgagagttaatacaactaaagttgcaacattgtatcagaaaacaatcaagaaactgaaatctgagtcaccacgtcacacaaacctcagcaaggccactgttgacaagcaactcctgtcttctcacaagggggtcttttttaccacccatagctgtgacgttttcttcatgatcagaatgttcagctactgtatcttcttgttcatccttcgtctcctcaccaatttcgttaccatctgtgtcctttgttttagaggatgtctctgacttatcctaaaattgaaaggaaaagattgacaggttttatatccagtagaaatccataagaatgaataattctagcattttaattaaaaagatagttggcgatatctatcatcataccattgagcagagtgatggaacagaaagatcaagagcggccaaatcatcatggcttaaataacgtgaggaatttggatgcagtagctgcaatagcggtctcctaccattctgaatacacaattttttgaagtaaacgttaaaagaagaaaatagaaaggcctaaaaacaaaggaacaaaattatgtacaaaatggaaccaacaaaaggttagatgtcatcagatcaaagaaacgataaggtaaagtttcatctcagaaaaatttcataaagaaggaacacaaaccttgtccataacaagatcctttagggtggcctcaagctcacgaacaattatctgtttatggttgaacaagattcagaagaatcagaacataagcatataaattcaaacaattttttatttggctcagtgaaactaccttggtcacgagctttgtgtcatcaactattgaaaaaatacatgcaagcacctgagaacacatggtagacaagggttaacatctgaaagacgaatacaaaccggtagtgaagtactataagttgtaaattcaaaaggaaataattaaatgcctccttaccatacttccaaactgatcaaaagccatctttttaacatgctctttcattgctttgataatcttctttctctcctgcaaaagaatacgatttagaaagagcagaagttcaacttataagttttctattgaaatctctacaatcagtcctttgctctaaaggtcttacaagaatgttttgctatttacattcaaatcacgatttacatatacaaccattagaaaggaaagaaaaacttagcaaatgaaagcttatgagatatacaaatgaaacccaccataattctgaggggtaatcccttgtattatcagttaacgagtaaaagaaaaaggatacctacttaaaaagttcaagaatgtgtaccttagcgcttccatgtttgatagaaagcatggcaagcctagaaccatcacgggtatgaaccatacgcaaaagaagggagcctgtcagtagctgaagcacatctgcagcagaagtctacaaaaaaaaaaaaaaaaaaaaatccatttagcataaaacaagaagaatgtaatgcaaaacaaatttgtaatcccaaaccctcacataaattatacatatatataccttatcagctattgtcaggtattcaatcagcaatttgtgtgtgatagtgtggtcgacaattcccttctcaagtatcggttggataatggcagtcatgtgtcggttaacagcgcctttttgcagtcccagcttagcaatgatgtccaccaccctgaatcacattctgtaactcttaatatatgttcaactcatgacagtgaagagtgatatcgagtttgtaatcaccatcgcaaataacaacaatgaaagctaagataagggattcctagttctcaagtatcaaaaaaaaaaagatacaagagacctggctgctctatttcctatactttaagagtaagacaggaagataaatgaaggtttacgttttttcgttagatgtggtcaagcccttgaataactgaagctcagtagaatacaattctgcaaggagttcttgtttttgtgctgcacttcccagatggtatgcatgctccacaacttgaggaagattataaaaaaaacaaagagaaagtgagcttcaaaagaaacaaaaaatgctatatatgttgaaacatcactatgttacatcagtagtccacataccaagagatccgaacacatgacggagaagaggagcaacatgtcccctgaggctggatatacaagctgccagctgctgcttagatgctacacaaatataaactcaaattagcagtttgtataaagctaactgtatatacaagttgaagttagagcatacctccatccaacatcttctgtataaagtgaacagcatatttgttagaagcaaggttaagaaactgtggctggagttccgtgaagagaacatctttctcagcttgtgagcaaaacttcacacaagtctacgtaacaagaagaaaataacaaaccaattacatatcttgttagaaatttgacagccttattaacaaaactcaaagatgcaaaaacatacctgaagtacacgagatgaaacatgtgagactgcaatctctggaaccttccccttcatcttccttatagcttcagaaatcagcctaacaaatagtttcaaaaccaagtttaatcaaacaaatacaatatataacctttttaaatcaaagattgacaatttattgtataaactaactttgatcgatcctccttgccgatattacggcgtctcatcttctcccatagagatacaagctcctgataagagttatccctatgttacaataactagaagacgaaaaaaactaaagccagaaaatttcaattcacaaagcagcatacttgctcaagattgtaatgaggctttctcttcttcttcctagcttctgttagctcctgcaaacccaaatcaaagcacatgaagaatcagaaactaaagtataattcatcagacatatagattcaaaatccaaaaatgttttaccttagcctgtacacgacgctccttcttcgatagattagtactctgctccttatcacctgcagatttgggtttaccaaatttaggtttcacatgttgttgttgttctccagacactagctttggcttctttgattttagagaatcgaatttggcagagctatcggtgtccttcctcttggttgatttctgaggtttcagacctttggaagacattgttgttgacaaacaaaagttgaactgtgatggtggtgtgtgtaagagataggcaagggttttacagtttctagggtttttgaggaagaagagagacggcgatacagttttgtttggcggaatttggacaccaagtaccaattaccaaaattaaggcttttttctttgaaattacatctttgccattggcacaactggattagtccgctctgtttttttccggtttaacttgtggaaatttcattggttaatttaaccatctctgatttgtatttcataatgttgttgattcttgtgaagcaaaatccattctgatgaagaatctctatttgcacccaatagtcaaagaccaacaatggtcgacatgtatacaaattaataaccaaagatgacaaaagaaaagagtaaatacatatagattaggcattgtaaatggactaattaatcaaatatggtttgttgtctcttgcaagttgctaaaattgcactgaacttggaacataagagaacacaaatggataaccatttctgtctctagatcctcccagttccacttctttgaaatatccatcatctccaatgaaatatcctaagttgcgagaacgcgtctctttgtctttatccaaaaccactacaaccttattcttcttgtcaatgaagaaactcacatggtgaaaactaaaccgataatgagggaatgttatcatgttaacctctaagaactttatccatgacaccgcattgagctcaatcttattactaacccatatctccatcatcattgtaaaccaggggtgatataacagcacaagctgctcttctctagcactcaagagactcacactctcctttgtagaatagtcaaaaggcagagtaagtcgcggtccaaatctctctgttgtaaaatcaaaacaaatcaagaaactaacccatgcttcttgtcctccttcatagatcacatactttctagcaaaccagtaagtatttcccttaagagacacgccttgtttaaaatattgcatatccccttcaggagtggaatcaacaatattcttccatgaatcagagtgaaagttgtaaatttcagtctcataaactgggtgaaaatcgactaatgatgtcaccacaattttcaagattttgtgtcgaaagacaagagttgttcttcatctcgtacccgagagcgtagctgttccatctcttgtaagaaatcctatgttcgatacactttgtttgcccacgataagggttccaaaccacaagcttataatttttttcgttggtgatgcataaaaataaaccgtgacagatatggacttgagatatacctattcgatctgaatcatctaggctgataagtttacatttaaactctatagatggatcaacattgttttgaatgccatggagattgacgctcattagataaactttgtattccgtcattattaccacctgaaactcactttcccttgctgctgcgtttgcttgaccaacgtgcttctttgtaaagctctcgtctttggatataatgttccattttttgcaagtagatcgcactgttctcagagatgtcaccggaactctagagagcacctcctctaccaaatccctaggaagatctgaaatcgccattgttgaatatgttatatgtcatactacaaatcaagttacctttagcagtgaaacaaaaaaaataaaactcttttcttttctctgcctagctagggcacacccggtggtatgcaacagaaaatttatattttctgagttaacttaagatatagattttattatgtttgatatcttgaatttccttgaattgcttttttaatttaaataatttgacatatgattttcaatagtggactttttttagcgaatctcattaattgatcatacgatgggtcctattagtgaccattatttagaaaatgaatgcacaggaacaacatgttgttcctctttttttcaccatcattagtattttttttccaaattgtaatatgtagaccccacaatattcctaatcattctttattttttgaggaatggtagaagaaaatttttccttcccaaatttgatgaggaacaaacaggaaaaaaaattaaatatttattaaataaaaattaaatttatgttcgttttatatttaatatttaatttgaaaaataatttatttattttttaatttttgttactatttattctatgttttggttatcatttacagtaacatttgttctatttttcctttatatccattccttttcattcctattttatcattttttcttttcctgtttgttcttttttagtcatgttcttcttcattccttgtattcatttataggtcaccaatcggacccgatatgttgatttaaagagagtggacatatcaattctggtagctggtaaaaagcatctatttcctttgctttcaagctcatgtgttacacaaacatgttataaagtcatttttttgtttttcatatgcaaagagaacaacaattgtatcatggacaatacagaacttctttattttcatctaaatagcaatgctaaagagagcttctaaggaaaaaagtgtctaagatgtattcggctgtttcaaaaaaatattggaagagccaacgagagattacatactaagtgaataataatggtctgacatacaaattaatgatcaaaccattattatgtcaagagcgaggcaaccatattcgattaattagttcgcactgctctaagagatgctaacgggaccctagagagcacttcctcttccaaatctcggggaagatcggacatcgccattgttgaatctctcatctccaagttaggtcaaagcttctacaactcttttcgtaccttccggctatatatgtaacagcaattgaagacacaactcactgggctaaacctgggcttcagttatcaagtcggcctcttaatgtgggaccaatacattttttgtatttgatcgtatagcaaaaacaaatgattagcaccatgtggaaacattagagagtttgtgtaattaaatttcaagtttcttttctgtcttgttatatacataaaaatggttacagtaaccttgttttttctagttatcctcatatgctccaaaaacataggagaaaacataatcatgaactttttgaccaatagtattgttaggacttgaattctcttagatttgttaattgatgatgaattctcttagatgtttataacactatgaaaatcattacttaaaaaaaaaaaaactaagatgatccatcagtcacactttaaatgttttttaaaatatgttcatatgttttgtttatggcattgcgtacataatttaattagactaattataatatcgatcaaacaaagaattattggctggatttggtcgcagccattagcagtcgctctcaactaatattattacgagaatctctagctgagcaagtatctcgtatttctcacgctctgacgaaaacttctacgagatagacgcagatatcgagaccacgtcattccccctaacaaggcaacaacatgtggcggacgccagtaaaactctgctcaattcacttcaattccatttttcgaatccgcgtgacgtaacccacctaagggtttataatccactactttgcacccccacctaaaaatgcatcacaagcgcgacaagtgtcaatacaattcagatacggagaatactctgagatcccacatctgctttcggtgggctcacccgcatcagataaaaaccctaagctaagggatcagaccaaacagtttaaccaaacgaggttatcaacttatacgacaacgaaagcacttatcaatgataagttagttaacttatcaaactacagtctgtgtgacaaaacgcatcgaagaaagtggagaacaagtcgtacttttttctttatctttttccttttttattaaatgaaaaaatataaatagaaattttgtagcatctctggggtcagctttttcttaatgttcgctttgcgacgcgaggaaatgcaaccttgaaaccctagaaaactcattctcaactacgactaaatcgatttcgcaaactttgacctacccttctttcacgataaacccagatcgcttaaattccttgaatttcttcttctgagagttttaggaaaaaatgtcgtctttgagcagagagttagttttcttaattctccagttcttagatgaggagaagttcaaggaatctgttcacaagtaagtttgtgctttgtcgtttttgtgtgcttgtttggtttctctgcgtaattttgggtataatttggaattggttgatgtgtaggctagagcaagaatctggcttcttctttaacattaagtactttgaagagaaagctcttgctggagagtgggatgaagtggagaagtatctttctggtttcactaaagtcgatgataatcgttactctatgaaaatcttctttgagattaggaagcaaaagtatctcgaagctctagatcggtaatgatttctcttcttgtttggtcggatatttagactagtgttgttgatttgatacatttgtgtgtttttattacagaaatgacagagcaaaagctgttgagatattagccaaagacttgaaagttttcgctacatttaacgaggagctttacaaggagattactcagctgcttactctggagaattttaggtttctttttttttttactttgccattgatattattgaagttttggtaggtggttacgataatgttgaagagtgtgtttttttcttagggaaaatgagcaactgtcgaaatatggtgatactaaatctgcaaggtctataatgtatactgagttgaagaaattgattgaggcgaatcctctgtttcgagagaagctagccttccccagtttcaaagcttctcgcctgcgaactttgatcaatcaaaggtgaactaggaggagtcataattctttcctttttttatagagattagttaaagtgtatgacaagtgtgtttgggacattgcagcttaaactggcagcatcagctatgtaaaaatccaaggcctaatcctgacatcaagacattgttcttggatcactcttgctcaccatcaaacggtgctcgtgcactcactcctgtcaatcttccagttgctgctgttgcaagaccttcaaactttgttcctcttggagtgcatggtggagtaggatcacttacttaacttccacccattctattatataacttaatgttcatattttgagggttgatgaaacaactgtatctgtgcagccctttcaatctaatcctgctccggctcctaatgccaatgctttagctggatggatggcaaacccaaatccttcttcatcagttccatctggtgttgtcgctgcttccccatttcctatgcagccaagtcaaggtataatttatgtcacaacttacaagtgtctggatattatggtatctttcgtttttttttcttacttgtgatattagagtttttaggaaatgaattttaagacctgaagttctattgctgtatttcgtctcaacagttaatgagctgaaacaccctcgggcaccgtctaactctctaggattaatggattatcaaagtgctgatcacgagcaactcatgaaacgcttacggtctgcacaaacatccaacgaggtaattgccttcaggttttccttgtttttgaaacgcttagtgcttacctagcaaacaaaactcttgttgcttttggaatgtgcgctttgatgttgagtagatggctctacttttcaaatcacaggtcacatatcctgctcattctcatccccctgcgtcacttgatgacctccctagaaatgtagtgagtacaattcgccaagggtcggtggtgataagcatggattttcacccttctcatcacactttgctcgctggttagtccattgctaccatgaaaagcttagtagagttgagatttttatttggctcttgttataatatgtctgttactcgtagttggttgttcaagcggcgaagtcaccttgtgggaagttggatccagagaaaaggttgtcacagaacctttcaagatatggaatatggcggcttgttctgtgatcttccaggtttctctcttcttccatcgtttttacttattttcttgataaagataaattatctagaaacatactttaacactaagctaatccagccttgagtgatttatgttctgttctgttctatcctatactttaaaactaagctaataaactatgattttgttgtgcgggcattttctcgccagggttctatagtcaaagagccatcgatatccgtcactcgtgtagcatggagcccagatggaaacttgcttggtatggtagatggagattgttctcctaaaaacgttttaaagatatatagttgtaatttcaagtagacacgaagtttgaactttgtaacattttccatgtacaggggtttcttttactaaacatctgatccatgtatatgcttaccaaggctcagacctacgtcaacacctcgaggtatgtttaattgtcttttcgtacttagtttcttgcctttgcatctgcaccaaacttaatcgatcatctgtttctgtggattagattgatgctcatgtaggctgtgtgaatgacttggcgttcgcccacccaaataagcaaatgtgtgttgtgacttgtggggatgacaaattgattaaggtacgttaggattatgatgactctgaactcagttttattatcccgtgtctaattatgatatttcctaggtgtgggatttgagtgggaagaagctcttcacctttgaagggcacgaggcaccagtttattccatttgccctcaccagaaggaaaatattcaggtgcaggcatctcttgtttaaaaagacctgaaaaactttccctttcgctgtcttgtaatttatttttctctttttttactatgcagtttatattctcaaccgctcttgatggaaagatcaaggcgtggctctatgataatgttggttctcgggttgattatgacgcaccgggacagtggtgtacaacaatgctctacagtgctgatggaagcaggtacatcattgttatttgaaaagctctggagttgtataacaaaattatgtctctgccataaattgaaatcttctgaacaaaatataggctcatatcattatcaagtaaatatctgctatgatttcagactattttcttgtgggacgagtaaagaaggagactctttcctcgtcgagtggaatgagagtgaaggtgccctaaagaggacatatttaggctttaggaagaaatcagctggagttgttcagtttgatacaacccgtaaccgtttcttggctgttggtgaagacaatcaaataaaattctggaacatggacaatacaaatcttttgacagttgttgaggctgaaggtggacttccggtatgacattcttgcccaaaatactcctcttggctacttgtatataaaatcttttgtattctcgagcctgttactttactgatgctatgtaccgtttatttcagaatctaccccgattgagattcaacaaggatgggaatcttcttgcagttactacagcagataatggattcaagatccttgcaaatactgatggtctcagaaccttaagagcatttgaagcgcggtcttttgaagcatctaaagcatccattgatatgaaggtcttggaataattactctttatgttatccatgaaatatttttattactcatgccttatgtccagtttaactcgagtgtcaataccggtgattcaggtatccacctccgcaatggcttcaagcatcagccccgctattggtaaaattgaacacatggacgcaggctctcctgcaaggccaaccccaattcctgtatgatttaaattttagtatatctttttcaatatatatatatatattttttcctatttcaataagaatccttatatgtggtctctgttggtgttatgcagaatggaattgaggcaatgtcaagaactatggaaaagccaagaaacttggactctgttgataagtctaaacctttagagctcacagaaattgttgatccgactcagtgccgacaagtgacaatgccagatagcaaggactctgttagcaaggtttgttaccgtcttagcttgaaattgcccatcaattgttctgtttcattaataattatcttgaaataatcttttgctgctatgtcaatccttaaggttgctcggcttctttacacaaattctggcgttggtgttttggctcttggatcaaatggtgttcaaagactatggaagtggatccgcaatgagcaaaatccaactgggaaggtgattcgttgtacctttcaaattttacactcatgtggtttgttgatatatgtgagttgttgagtcacttgtttgaagctctcttgcataagtgtctgaaattttgtccttttattgtgaaggcaactgctagtgtaactccacagcattggcagccaaacagcggtctcctaatggcaaatgatgttcccgagaatcctgaagggagtgttccgtgtatagcactttccaagaatgactcatacgtaatgtcagcttgtggtggaaaggtttcgttattcaatatgatgactttcaaagtaagcagcttaatccaactttttctgttctcgggagcatctcctaaatactgatacctcaggagctaatgaaactatttgagtaatatgcgaagctaaatgcatttttccctttcgtgcaggtaatgacaactttcatgccaccgccaccagcttcaactttcttggcatttcatcctcaagataataatattattgcaatcgggatggaggactcgagtatacatatttacaacgtcagggtagatgaggtatagtacatttgttctattctgcggtctactggtttttactggtgtaactgctgattcatctcttaaatgaatttgtaatgtaatctcttttaatctataggtgaaaacaaagttgaaaggtcaccagaagcacataactggtctagcattctctaccgcgctcaatattcttgtctcttctggtgccgatgctcaggtaagacaaaattcatgtttcttagatgctattggagcttttcgtgtccatgttggcttgtaacttaacagactcgttaactctctttattacagctcttcttctggaccgctgactcgtgggagaaaaagaaatcttcagcgatacagctaccacctggcaaagcaccagtaggcgacacacgagtccaattccacaacgaccaaatccagttattggtttcacatgagacacagctcgccatttacgatgcttcgaagatggaatgcattcataaggtatcgtaaaaaatctttgtatttacttggagatcttgaatgattataagaaaccttaaattctcattccttgtgcagtgggtgccccaagaagctctctcttcgcccataacctctgcatcttactcatgcaacagccaactggtttacgcgtcattcgctgatggaaacattgcagtctttgatgctgaatccttgagactcagatgccgcattgccccatcagcctacatgcctcaacctacaccaaacaggtaccgtattttacaaacttcatataaagtttatatcatccatctgaccattgtgattttttgggactgattatgctttctttttcttctgtgatagtgcaccgattttcccacaggtgatcacagctcatccacaagaaccgaatcaattagcggttggactgtctgatggttcggttaaagtgattgagccatcagaactttctagaagatggggtgttggcgtcgcagctggttcagataaagcagggactgaaaatggacggccgtctagttcatcagcggctaacaactcaagttcggatcagattcaaaggtaaaaatagtttatgtcagttaagttagttgacatatctcttgttattttggattgtaaagttgtgatagcttgtgctgtttttgtaaatgagattctcaaattaaatcagtaggcgcaataacagtttattttatatttttcggcgttttaacagttttaagatggctatactcttgaatgtagtagctcttaaatctatggatttgtcaaaaatttgcgatttacgcgtttatatttcggccgtctgatttgtccaacatattcatatttcgtttgtggccaatgttgaaatgagtttcatctaaatatcccctaaactaaattataataatgacatgagctagttgatcaaagatttaggagattaaaccgttctttaaaaaataaaaagaagtgacgtacactagttttacaattgatggtttataactcttataataatgtcaaaatctgatttgacaaacaaaatttggaaaaagccagacgtaattaagaagaagccattagttttctctgtttcttctggttccttcgttgatcacgccgacctgaaagatggacaacgcaagatcataaacatctgtttaaggaaggacacatcagtgaaagcaagttatcaataagatcagacttatataaatatatacctatcttctcttcctttcttttctttttcaagctcgctatatcgcgcctcttctctgcactctgacctttcattttcagcatctgaacaaagcgacaacatcattcatcagatatggtcatgcaaactggtaatatagttcacaccgtctcagcaactaagaaagattgaattttaaaggaaagattatccaaaaaaaacacccaacacatatttccaatcatggtgatgggtcatcaaggtcaagctgaataggtgatttgaaataatattggggtacaggagagagtcgaaaactaagtacctcgttaccaccagcacgaagggcttgaagaggttcgatgcagttctggttaatgacaacaagttttcttctctttatatctccaccaatttgcatttgtgcttgtttttgcttctttaactctacaaactgattctgcataagagtcgacacaccaacctgggacaaaagatattgataagtctcctgtgcagcagcaccttctgtttggaagagagctagaatggctaaagatttttttttttaaatgcaagatatggaggctgtgaccaaaaaaaagaaagatgagaggaacaaaatttaccccagcaaagtaacggcctgaaaatttcttgggctgcatcggatgtgataagagcgtgctaagttcctgcggattgaaccagacatcaacatataattcgtaatacgattttcttaagggaaagtaatatttcatgattcaggagaactttttttctgagtagcagtgaaaaacctccttcagcttattaagtcgtgctgaggtcgcttttctctgcctgacattgtccactctttcctcttcactttcttcatcgtccaattcgagttccattgattcagcatgttttttaagccaggtcctgtctgcattctcctggatagcagacaccaacgacaaagttgaaagttaagtacgcaataagatttaaaaaccatccagctgagggcagtgagtgtgaaactactacgaagaccaccagctaaaaatttcacataggccagggttaactatatccaaagcatggtaatagaaacatggccttccagcatatttctttccaaaaatttcacacccacaacaaaaaccatagaatacaagtacactcagtatactgaaggaagaaatacccgcgagcctttccgctcaatctcatatatttgacgtgctagatataatcgcttcctcacagctggcatataagagttatccaaagggaatatctttacgctttcctgtaagcacaaacaaaggaacattcagcatgaaagtggccaaacgtaagtaaaaatacctactttagcattacccaaatcagtgtttttctttatgataaactaacttttgaggatatcaaagctttggtttgggagtgtaaatatatataccatagagaatgacttgcataacgtgtaaaacttggacgtctcatttggctcaatcaaagctatactgcatccatctgcgaatgctctagcagtcctcccacatctatgtacatacacctatatggataaaaggctcagagcttgtaaaattgttatcaatcaaaaactagaaaacttagagacggttgaagcttacttctgccgaatgtggaagtttgtagtgaataatagttcggacattcttaatatcaataccccttgctacaagatctgttgctatgagtattccattttcgctcgcacggaaacggtcgattgactgtgacatataaagagtgaggaaaggaaaatatgctaagtaacactagtaagcaaatacgtgtgtttccgaaacccccttgaactcaggacacaacaaaatattgtagcaaaaggagtcatgatgacaaataactaagcaatagaaagttcaaccttcaaccgagctcgctgcttcatttctgagaagagtgtgcaaacatcaagtccaagaatctttaaaagcccagagatatgccgcaaatcagtcactgatgtgcagaaaacaattgtccgcccttgtccatggacgctcaaaatataatacaagtatgcgtctttttccttctcttcgcacctgtagtttgttataagataaatatactaagaacaccgagatagaccaaaagaataagtagcatcaaagatttctggatgttttgcaagcaaataatgagtagaagcatggtgtcctccaagcaatgaaagcttacttattacccagtcaaattaaaagcttcggagggatataggttaaatagtacttacttaataaaagattcttcaatctttggtgccaaaatagatgtagttgtcagatcaatgatggcaacattatctctcattccagctcgttcagataaaacctcaatagaattcacttcaccagatgatgattgctttgactttgaggagccacgctttagctttttacggaaatccgaagacagcgctatggtggctgagaaaacaaaagtttgtcttttcttcttcgggacgtttaaaactgtgtcattactcttcacagtttgcgttttcccttcatttggtttatctgtcactggaagcaagtcgagtatagactgcagctccctgaaatgacctctttcaaccatgcgatcagcctcgtccaacacaaagaacgacaaggaatgcagctgccaaagatgattagaaaacgacagaacaatttagtgtctaagaatagctatataacagtaataacaattttacacgtgccttaattagcagacatactcaacttcaggaaaatggtattagattacaaactgattactgcatctacgcataaatccaataactacatcaaaatctgttaatgtaaaagcaagataccggactaatggaagcacatgattctttttactctccgtttatgcattgcatacctctacaagatgcttttctccagcggacataagttcccataaccttcctggagttgcaacaactatttcaggtttctcttttaaacgtctttcctgcttctctgaaaacatcccaccaacaataggaacgaccttgacgctaagattcttggcagcattctcaagatgctccgtcacctggaataagggaaaagttggaattgtatctcagaacttcctcatgacccacccacaagtcaacaaagaagcatgtcagaaggaaaaaaaaaaaaaagaagcaatgtgataatagtcaaggatacctgaagagcaagttccctagttggagtgatgattagagctcgtaaatagccatctgcagcatatttctgtgcttcttctccctttaatgcatacaatttaccaaccttttcccgctcgtctaagaggcgttgcagtatgggcaacccaaaagcaagtgtctttccagatcctgtctctgcagcaccaataacatcctgcggtccaaatatgagccatctatcaataaaatatactttcttgatagaaacaaaagctggtcatcctacctttccctgatatgctgcaacgttaaaacaagccttctggatttttgttggctccttgaaatcgaggcggtatatggacttcatgagtagtggatggagtctcatcgaactccatgcactaaattctggaggaatctcttcttcctcaacttgctcctctactgtgtcatctccatcacagctaactgctacaaaaaattatctaccattataatttgacttcttgacaagaatttggtgatagaataacaaacctcaaagatagacataaactagtgcattaaagggaacttacggtaacaagagataaataatatttagtgaaagaatgtatagtttgtaatattcagtagttttcagctcatgtgaaaatggtcgaacagaagaagtccaattcctaaacttaagaagataagcagatttttcttttctttcagctggtctaaaatgaagctaattcgatagaactgggtgttatccttgccaaatctatccaccacagagttttagtgtctgagaccagtgagagaccattaatagactaaggcattcctcgccagatcttaatatccctaagaaaattttcatgtacgactacgagtgatgattacctcttttgagccaaaaactattaaggaaaagagtatacgaaatactaaccagcagaagcgtcctgattctttgcggcctcattaatcttcttctgcttcttcttcttcttctcttttttcttctccttattcctcttagctttcttctcttttttcttacgagtctcctcgtcatcttcgtcatcctcatcatcccttccttctccatcttcttcagcttcttctccttcaatcatctcatccactgtctcgttggtatcatcatcatcttctggagattgttttctctctgttatttcactttcaatggtagggagagttagatggtaatcagcttcatcaatctcctcaagtgatagaaaacctgcccaaacaaagtataaagtttcagactttcagtgaactaacaaggcaaagcaattgaatccagacactaatttgagataaatgataatttgagttacctaaaaaaaaaacatgaattgcataaatttcaacaaaaatcaggcacccacaataatagttcacagaggaaacaaaaattcaaaaaattaaaaaacaaaaccaaaacttttacctccgtcgagctggcctgagcctgaaaatagagtggagaaggattcgccttcgtcgtcttctccaatgggtatagaagagctccaaggaagtgaatctatacgttcgaaatcctcctctcgctttctcttatggcttctcttgttcctcttcttcatcaaggaagattctttatcgcctgtaaccatgttagctgttgatttgagctaaaaaaatacccacaacgtttaatggaagctttgagaatctatctcctcgactcgagtcgttgttggctgagagatggaatatctcaagagaagttgaaaacttgcataaaccctaaatcagaacgaaaccatgtagtataattaaaccggttacggttttgatccggttaatctgaattaatacagaccgagtgatttgcctcgtaccgacacgagttacgtggaaggttaggatttaggggtttagattttagaagatgaacacgtcaaagtgacgttgataactgatactaatttgggccttttcttgtgaagcccattagctttctatccgcaaaatcgcaatattattttgatttttcaatcttttctagtttagacgttttctgttattatattctagctttatatttttttgcctgcataatgaatttgagtaaattatttatacatcgatattattgcaagcttttagctgtcattattgctaaagtgacgactgaatagcacattagcatgcaattgggagcattgattattgattagtgctaattaaaaaagcagttgaactcgtttgactctcagtacattcgatagaaacaaacataaaaaaaaaaaaaaaaaaaaacaaacaaacacagtaattagcgtggggctgaccgtaatttatggctcgtgaaaaagaatcatagattcttctcgcatggctagtatgtgttttcaacatgagcaagtaacattttatataggccaagtattatattatagatttatagtaaactagattttaacccgcgtatatcgcgggacgatttattttttaaaagtaatatatattaaaacttgcaaattttatttttataaaatatttatattttacagtttataattgttattaagtaacggtataccacgaatccatgagataattgttaaaaaactgaagttttaacccctattaaaacagcatattaataatattttaaaattttataaatattgattcaaatacatccaccatataacccaattccaaaatagaactcgttctgtaatttttttaccgtcccgtgatttttaaaaaaaatagtaattcttaaaatttaagaataattttttatatataaaagttttgcaaattgtatcattctctaacacatttatatctatagtttaattatatatatagtaacattatacataccacataacatttttggttttatataatcttttctaaattaggatgatttgatatgtttaatattagtggtcttaaaaataataaattaaagatttaacccgtattgaaacggtggattaattatattttacttttttattaatgttgattcaaaaacccgtccctccaaatccgttttgccaaaaagctatttattttgttaatattaattttattaatattaattttattaatattaattttattaatgatatgactctgaattagaatctaaacattttagataataacatatgagtgcaccatatttatttaataggagaatataccatatgacccgaatgcacttttatccaaatccaccaaaaaagtcttgcaaaaatactatagagataagaaacgatagtcggttttgataggtataagattagcaaatatattagttagcttaaattagttaaagaatacaaattgaaaaggtatattacactttatttgaatatagtatcaaaacttatataacacagagatctgataattttttaattgatgaatacttttttgtgctaatttttatgtgattaagatttaattgatttcgtatataaaatattaaattgacttatttgtttataatttggtaacatatagatatttgaatattcaatatattttgcttcagtttaagaagtctttgatgatccgtctttagatccaataagccctataatctagatattaacctgcggtatatattttagttaaactaaaaaattttattgtaaacatgatttaaaaatatttgatattattttatttgattttaaatgtatagtaaactgtgagttgtatatgttttgttgatattatctatattgtttaatgtttaagattatacacttgtagtttgattgttaatttaagagtttcacctgtagtataccatcttgtattaatatcgatctaaacattcaattataggatttccaacttgtattaaaaattgaatcacatctaatatgttattaattattgtagtatataagattataaattttcaatataaaatgtatgaaattgaatataaatatttctaattatgacccgttactcagtagaaagttttcttaaatctattttttatccgttataatatttttttatgtattgaacaatttatatttgtttttaaaaattcaaattatggcatatgggaaaaaactctaattatttttttataatgatgatattattttttcgcaaaaatagaatcatataaagatgagaagtgaactataataattaataaaaaattaatataataatttagatatcaaatataatttgttgattttaattggttacttttttggaaattaataatgtattttgtttttctaattaaattaaattaattaaaatttagatatcaaatcttatatgttgattttgattggttattatttttggaaattaataatgtatttcattttttaattaaatttaattaattaaattagtatttgactttttaatctttaaagagataaattaatttactctttaaaattttatttttaatggcatatctatgtaattacttacaaaaaaataaggttacattcaaaatgtattttttaaataatatagtaggatgtatttcggtgatcacgacgaataaaaccaaaaaaaaaaagagttgagaaagaatcacgtaaatgtcaaagtgtgaaaactaaggagtggggtctccaccgcaaccacaaaagggatccgaagaacttcctcaataagaatccaactttcaacattttcattttacttacgtgttctctaacagttaatagtctaaactctctctttttttctttactttttttggcaaggagttagtacgtctgtatattgatgtacgttggaatatcgtagtcgtagttcaaacagttgagctaatcgatgttggtttcgaaggaccagattagttcggtttgtcaaatcttcgtagattgataaaccaatactataatctttccattgcaattacaattattttccgttgctatagaagcttaaaatattaaagacacataatgttttaacatatttcatagattattttgaaattcagtgaaaaaactctaacatcagaaacaatcatactttttcattaacgatctcaaacttgtatacctttacaaatgttgaactttagcttaatcaagtttactttgatgaatgatgatagatatctatctgaaagtttcttgatgtaatgttttctagggcttagtgtattagagtaaaagtcgggaacatatcgtgggaattagtatactagtacattaatttagacagctaaggttacgtccaagaaaaacaatgataattttgataagattcgggggaagaaaaatgcttaatgagtaattaaatagttttttggaacttattgatcacgggagatcgatcacctggcataattatagtggccacacgacttaaaatttaaaggataatcattttgtttataagatgtatcgacataagtatgaccggacatgagtataatatgacccgcctcgttcataagattccaacgaatacgaaagagaccaagtaactaatcacatattgataagttaatactattaagaaactattaagctagaacttttagatctatgtgtggttgaatgaatatataaatcactagataacgtttacgtcaaaaccattattttttctcacatgaagatttcatcactatctaagatatctcatagtattttgtttcaaaatcaatcaaaggataaattaaaaacaagcaacaacttcatgaaaatacaaacaaagtagcacaaaacaacatcaataatatttccctttgatatatccaaaatccactgcattaggtataaatctataatcattggcgtggcgtatcacacaagtcacaacactaaactatatagtcaatggagaaatgaaatcaaatcttagtaatttccacacaatcatatgcaattaattgaaatcgtctcaacattaatttggtctttctccattaatcagagacttcgattttaatttggttctagaaataagtttgtgtttgatactgtataaaaatatgggtgctggaaccaaattaaaatgtgtggttttaatggaaaaatggactgtcaaagagagccaggctggcattttctctccgatgattgcttgtgggtcccgttgtcttcactgtcttaagcacatgcgcttctgcttacgtgtcctattcgcatttaacacttaatcatcatataaacctactttttttttgttcaccatgtataaaaacagacctcttttaatctgtaacattactacatctcacatttacgaaatggatactatatcttagtgtataatgttatttgaatagtatcttgcgtgtatatctttcttttacatgagtaatcctttaaaagcaatagataaacatggtttcgtaatgtagtggtagtaaactaatacgtcgtcttagattatccctatatagtaatcactttgacaaaatcattaatatattttagtgacttctttttgtttttaaaacagtaaatccaaacggctgctagctcaaatcaaaacagaccacatgagcaccatgtgtcgttttttaacacatcatattcttcttctctcctatctctatctatctactatcaatgtaattatcttctagttttagttatcttttcccaattgatcttagagtttttataatttgtatagccagtgaaataaataggctactaagactagtggtacatatacaatcatttataccaacaattcttaatctatatgaattagtaaaattaattcataatgtagaatagtcgtgtcggcaagatatgtttgttgttccagtcgttcaaggcaaaaacttaagaaaaaaaatgatgaatttaactgagttattattagttaagtttatagtcattatcattaacaagccaactatacagtcaattataaagataggaaacaaaaacagagataaacatgaaaacaaagttattcccaaaattatgaattaaattgaatttactaataagttataggagtgaagtctctcattaattcattttacttaggggaagaaggctaatataacgctccaaaaatctcagtgaatgatattgtctggtccttttatgtaaaattaataataataaggttgattagttactgggatcaaacaaaatgattaatattaatattaatagcaaattccaacaaacagtaagtgttaaacaaataataacatgtacttgtttcgcaactctctcttcatctcctcttcctctggtctttttttcttttgttgcgacttttcttcttcttcttcctcaggaacttaagtttctgagtccatgaagatgccagtaagtacgtttctccctttctttaattcttatttttgatttttttgtctaatgagtttggcttaatctctgtctgcaattctatgattctctcagttaaattttggtaaagaaaatcatatgaaatcgagatagcttgtaggattcttacctcagttctgtgttatttgtttgtaatcgagacctctctgcagccaaatctagaaatctgtctttagattcctctgttttttttttgtacttacaggctctgttacttggatcttcatgtcagtgtgttctgattgatgtttttcttatgaccgatgcttctgtttagtttcatagtttgaagtttatgaactcttatctctgtttatgaggttttccaagaggagaacttatcagattcccctgaatttcttccatggaaaccgaaaatataggagagttcatgtttttaatcagatatgattcttgtcaaactcaatttacgtttagctttcccggaatttcctttacgcaaacgttttttgtttcccttcacatatgactctcgttagtcatcacatataagatttgctaacatcatcagttttgatctgattttgtcgaatttagactgattttctcaagttgtaatgcaggtggcattggtctggctactggcattcactattctactgatcagtggggaaggcaataatgccatctgcaaggagaattttaagttagaccctagacctcatagtgtttcgatcctcgagtttggagcggttggtgatgggaagacgctcaacactattgctttccagaacgctgttttctatctcaagtcttttgcggataaaggcggtgctcagctttatgttccaccagggaaatggctcaccggaagcttcaatctcacaagccatctcactctcttcttggagaaaggagcaacaattcttgcatcaccggtatgagtgacctctctagcaaatcttgtaaagctaaatagtgttctttaggtatctatagctctttaagaagtgtttggtagacaagttttttgtaacacggtctctcaattgttgtctaatgtgctaggatccgtcgcattgggacgttgtcagtcctctaccgtcctatggtcgcggaattgaacttcctggaaagcggtacagaagtttgatcaatggagacaatctaatagacgtagtcatcaccggtaaacaacaaaatcatgccatcattaccttaagtttctggcttgacaacattaagactcaaagcttctttattttttggtaggtgaaaatgggacatttgacggtcaaggtgcggcatggtgggagtggcttgagtccgggtccttgaactatagccgacctcatatcatcgaattcgtctcctctaaacacatcctcatatcgaatctaaccttcttaaacgcgcccgcaatcaacattcaccctgtttattgcagtcagattcatatccgcaaagttttgatcgaaacatccgttgattctccccacgttcttggagttgccccaggtatataccatttcctcattcttttccatcactacaaaatgttaccgtttgaaagctaatttcttgaaccgttttttttcaagattcttcggacaatgtttgtatcgaggactcaacaatcaacgttggccacgacgcggtttctctcaagagtggttgggaccaatacggtatacactacggccgtccaaccaccgctgttcatattcggaatctcagattaaagtctcccaccggtgctggaatctccttcgggagcgagatgtcaggcggagtctcggatgtgaccgttgagcgtcttaacatacacagctcactcataggtgtagccttcagaaccaccagaggcagaggaggatacatccgtaatatcacaatctccgacgtcgatctcacaagcgttgacacagccatagtagccaacggacacaccgggtcacacccggatgataaattcgaccgggacgcactcccagtcgtgacacacattgttatgcggaatttcaccggagttgatataggagtagccgggaatctcaccgggatcggagaatctcccttcacgtcgatatgcctcgcggatattcatttacaaacgcgatcagaagaatcttggatatgctccaacgtctctggtttctcagacgacgtatcaccggagccttgtcaagaactcatgagttctccttcgtcttgcttcgccggtggtagcatatacgagggtgatgcgacggctcagtcgtattacagttggtaattatagtaaaataaaatggtgatgaagaagaagaagaagaaaaagaagaagagagtgcatgaggttacgatacgattggattttcgaattttttttgtcaataagttcataaaatttgttgtcagagagcgagaggaagaagataaaaaaagaaaaattacgttttaaggtggtgagtttcaagaacagagcgagcttttctattgtattaatgtacagcttccatttctttcattcatggtgtaacaaaattcatctttttttctttctgtgaagaagaaaataaaaaattatatgtgaaatgattagttatgtcttggatgctctttgttcggttatagatagatacttccaatttcaaaatgctctcatgttttggaagatagtattagttcagatgacgaaacacacaacaatgtgtgggattggatcagcacaacaaggagtcctgtcggaatataggaagttcatttgaatcaagtatcattgccaatttgccattttaagattctttctttttgttgtttgcattaacttgtttgctctgtttgtgagtttcaacgtttaactatcatttttgtttatcaaaatcaaatgttaggtttttgagtacagctgtgaaattgatggattactaccttttatttatacgtaacttccaacaatcttaattttctccattgagatgaaaaatgctatcattacataattatgtgagctttgacaatgcagatcttcgaacctgtcattgtagttttcagctctcagaagtcagaaggtacacccatctcttgcacatacatatacacacacacacatgtgacaagacccaagacgcaactcaagacacattccaaacccaaacggttcaaaccaatgattccaggtacaagcgacccaaaccaatctcagcccatctctggtttcgtgtcccacaagtttaaaccaaagaacggaaaagctgttacgagcggctgaagagtggcttgggcggttgcaggtcatttttccggactttagatacttcctttctcctaattagcgatgatattactattagccataagttaagattaattaccgtctatatttttttttgtcaaaacattaattaccatctactgattagtaattgtacattttcatgtccgttttcactttctttgggagattaaaatttagtgacaacattttttctttgtataggaccgcaacttttgtatttttttaaagaaacatttgtaagtgaaataacagtttttgaattacatatcgtatgaaaccaatattagtcccatcttgtcgagaggttggcaagaagaaaaagcaaaggagtcgtgtcgcaatgttgctgcggttagttcgtcgtaacactatggctgccatactcttttcttctcctgaactgacacgtggctcatctttttagccgtcgaccccattgttctcccactctattcttttgcttacactcaaactcaacagttctcttttttaactgaatagacatatagttgtctgtttgacataacgataattagtagaaatctaaaacattagttaacaaacaacaaaaagagttttaggaatggttctgtcatcgggctatattttttccccagatgtttagtgtaattaatataaaatttcacattttaactcctatgtaaggcttatcaaatccaatttatactctaaatcattgcatcaatgtaacgttcattattattttagtgtgattttgtttgtttttttattgtaattttttcattgtaactcagtgtatacaacacttgcaaaacgattagtttgaaataaatgaaaaaagttgttcagtttctaactattggtgtttagtaatacaagttacaacttcctaccaaaagttatgggcacatgataggacacccatcaagtagatgaatatataagttatgtacataactccacatttctattggcaggcgttaattaaatttggttatacaaatttacttttcaaaatccatatggattaataattaggacgaaaaagaaccaatattctattggcccgcgtgaattaatatttgaccttaaagcattatctagaaaaagaaaaaaaaaactccattataccatttagttgcttaaacagatacttccaatgcaaaatatgaaaatttgtcttcatcacatgcaatcgattctgaaatattcacattcgagaattttggataaaatggtccttcgtatatgagcatatcaagttatacttttgttttaacgcatttgtatgttttggatctaagtattttgattatccaatttgctgagtgcattttccatcaagaacttcaacaagttttcagtagcttactcacttaatgttaatataacgctccataggtgtgcaaatgttagtcatattaaagttgttggttctgcataaaaagctgaaacatttgtgttctacaaaaccttttttggtgacatggacctatagttggtacttgaaatataaataaaataggaggatctgtaattcatgtctgtctaagcacaataaagtgaaaaatataaattaaaaactcaaaaagctcatcgtaagagtaaaaactttttacagagaatatacggtttcagcgggttactttcttgggaccttctctatattatagcttttggcgcagttaaatttatgttatattaatcatcaattttttgtttttacgttttatatcgtatgtaaggaaaagtaaagaaagctattagaaaaaaaagctactaaacatgaaattatgagtatatctttcttaaactcaaattcaagctctcgtggtaataagtggctattgacgataacaattacaagttggaatgttgaatagtttcgttttttttatttctattaatgtttttaaaatgattgttgaaatagggaaaatttaacaaatgaagacaacgatagatggagaggtcgatgcaaatggttcgagtgatcttatccatttcatgtggacacgtgtcgcaatagggaaagcttctcagcaacgtgatttatttgtttttttcttatcattaaatgttttcattttattcttcgaaatatacacatgtacagtatttccaaaagaaaatacactatagttgatagttcataaaaattaaagaaatacttaattgatttaatattcgtattgttgagttttccttctaaatactacaagtagtgaattttacttgataacattgattaatgtaagaaattaggtatcgatgcacatatgaaacaagtcgtatgtcacacttaaaactatcgttaatttgaaaaagataagacatgtcggcggtgctaaacaactatttaagcaaagtatacactgaacttggataacttagatatagtttacattgaagttgacaaatttacacatttataaataagttactggtttgtatgtgtttataaatatgtcgtagagcaatcgaatagtcaaatatgatttgttatcctatacattattaaaaatatactttcgggggaatagggcgattggtgggtagcatatgatgttactaatcattcagatgaaccatttgcattatttctttgtttatttagtatccaacgttttaagagaagaagcgcacatgtttttttttgcaccatatactgactactgttgttgtaaacttgtaattatacatacatatatatatatatatatatatatatatatgttttcaacaatcaaacgtacaatttttttctattttccatttaatacaatttatttcctagaactacaagttgtttttgattaaaacatgaaaagtatactatataagttatattcttactaatcatagttacacacgacttgaaataaatacatactaaaaaatttggaaggttatatgtttaatttgcaccaaaaaaggcatcgagtaatcttatgttatgtatacatcatatatctggtttttttttgttgataaaagtatatgtactatatcttagctaaagatgtaggtgatgatgggaaatgcttaggtgtattttggtaccttaatcatatgcttgaatgtgcgtagacgtattattttgtttaatttaatgatatgattatatttttattttgccgtttaatttaatacatgtaggtccaatagacaggaggcattgtttctcaattacataaattcaaagggtagtttagtaaataaattataggcatatcaaaactaagaattttttatatatatatgcagctgctcttttgtttaaggcaaattcctattcgaaattggtagaaaatggaaattaaaacaaaaaattaggaaactaacaacaataatactaatgaaaatctattaaggtttgagtttgcaaactttacatatgacgagttaattaattttttcatgcatgagctggatccacgaatcaagggtctttggtcccactttcttcccaattatataaatttccttaccctatatttctttcattgatgattcaacccctatatttcactacttcacaaaataacccagaatttgagctcaaagcaacatccaaaatgttcttctaaatagaaaaataaaacagaatatagaacaatagtacatataatatacaaaactaacttgtaagaaattgagaataaaaaagagagtggatctaaatgaaatttaataaaaccaatagtctaaatgtagagagaatgatgaaaataaaggacatgtcagcttctacatatatgtaaataaaaaatatatatgactgagtatataaaaaccacattttttttttcttctgcatctaaatgttacaaaaattgaataggaaaaattaagagagctttactctgtgaataaataaaaaaacagagaaaaagagctctaaggtgagacaagccttgtcttcttcaactccctaagtctcatctcaccatctctctcttcttcttttttttggttacccagaagagattcacttctatctccaacaatttcgtattctctcataatattcaattttaaatcgaataaaactcgcgtcaatttcccctctttctttctgggtatatattcttttctgcttttctttttttgtttcttgggttcgagctacatagagagaggtatgatgaatccgagtcacggaagaggactcggatcggctggtgggtccagctccggtagaaatcaaggaggtggtggtgagaccgtcgtcgagatgtttccttctggtcttcgagttcttgtcgttgacgatgacccaacttgtctcatgatcttagagaggatgcttaggacttgtctttacgaaggttcgtatccaaaaaccaagatcttctcttttcatttttttttttttttttttgttcgtttaatctcacgagagagagagagagagagagagaaagagagttcatggtctcttgctccaatgatgggtttatttgtggtccattctcgaaaattatgttattttgaggaataattatggttttcatatcggtggttgactaactttgctccccctttaatagaaaccattttggttactttttaagattcacatattaatctcgagcttcttcatttagatcacaccattttgatctactgatagattcacatgtagatccattgtatataataagttaggggaggtttcaaatggattcaaatcttgagtctttgatctttgacttgagttttggttaaatgtcaattcatgaggtccttgttgtcagaattcaaatctctgtttttttcttttatctttgaagatatgaaacattttggttgttatgacatgcagtaacgaaatgcaacagagcagagatggcattgtctctgctccggaagaacaaacatggattcgatatagtaatcagtgatgttcatatgcctgacatggacggtttcaagctt

SEQ ID NO: 1034 - DNA, 19801 bp, Arabidopsis thaliana
caaataaaatttatcttgtaaaatatgtctgtaactgactctgtatgaaggtaataaaatgtgcaacaaatctctccttctccagacaaaagaaacaagtcttgttcttctctgtatctatatatatcacataattaacttatagacacagtaaagaatctaaacaatctccaaagaatctaaaagttttccttgtttttaacccttaagtcataaaggagggtccatgtttctgtttcttgctcaaatctttgcatctgttgttatatcattatctttattcgtgtctgtgctttctctatgcgtctctgcgttctgatttctccttcttcttcgttcctgatcaaaacattcatcaaaccaattatgaacattctagtttccacagaagaaaatcagtttatttctgcattgtttgtcattatgactacctctctaggcatcacagggtattcatcagattcaagcattcgagccacttgactcatctttggcctcttgtctgcatcaggatcaacgcatcttaaagctgtcaaaagtgctcgtttaagttcgcttgttgttggtttgatctcaagctctttatccaccacttcctcaaactgtttctgttgaaccattagctttaaccactccaccatatgcacctaaaaacacatttcaaatttcaagaatcaagatcaacctctgctttcagagtattctacaatctagagaaaagatgaatgttttgtatacctcttctttaggccgcgcataatccactggataccttccagtaatagcttccaagagaacaacaccatagctgtacacatcgctcttttcgtttaggagaccagagttagcgtattcaggtgcgacatacctgaacattcatcaatggaacagagaaatatgcttcattaaccaatgcagattatgaaaagtaaagttatagctatagcatacagtttcttactcacccgaatgtacccataactcgagtactgacgtaatttgaatcagctccaagcaatttagcaagaccgaaatcagataactttgcgtcaaagttgtcatccatcagtatattgcttgattttatgtctctatgcaccacttttggctcaatagcttcgtgaagataagccagtctgtgtaagaaaaatgcaatccacactttctcatgagcttacattactagaaaacaagtaacaagaatcatcaagtggttaacttacgcctttgcagtgccaacaagaactttgatgcgagcctcccaagtgagatgccctttgtgaatcatgtctccatgaagccattgctctaagttcccattgttcatgtactcataaaccagcatcctatgtgttccttcaacgcaatatccaagaagccgaactaagttcttatgccggacatgtcctatagcttccacctcaactctgaaatctttatcagcttgacctctaatgtaacaaaaaacaattattacatctcagagatgaacaatgatagtagataaagaaaggtgttatcagaaatcttacggattgttgagcaactttttgacagccacaggggttttgttagtcaaagttccatggtaaacaactccataaccaccatctccgatgatactctccttggagaaatgattagtcgcgagttgaaggtcacggagagtgaaccaatgaccccaaccaatgtgagaaacctcaggaagacccaagagaggtgaaggagctgttgttgaaggagtactaggaggcaaatgtgacccaaccaggggttttttctccaaagaaccagagaacttatcgccattctcgatgtcctcaacgaatttctcatcaagagtttggtaagaagtaccattgttgttagatgaaccatgatcaacacttatttcttttatttcttcggtaaagcgagggctttgagttacaggaagcgttgtagcattagatcttttggactttttacggaagctgagccaaactgaaaggacaaggattactatgaaggctgcaaagagagcaatcactatgatctcccacagttcaagaacaccgtatctcttggttaaagttcgttttagctgagatgtcatatttcacagagacttgtatgtgtatatatgtacctgcagaatttgaaatggattatcaatgttatcaagaacctaaaagatcagtggaaagaggaagaaacagaagctaatggtgaatgctatagtcaattctcagatcttactctaaagatattggaaaaattaatcaaatgaagaagtccaacaaggggtttagtctaatcataatccaaaaacataagctttgatcacaaaaggagctaaaagcaacagaaccaaacagagcaaagtgaaaaaagcagagcatataagaaattcaatcttatcctgagaaaatcaagaacatctaaatctgataccaatgagatgagacaaacaaaaggtttgggctgtaaaaatttacaagttccataaacatatcaacttctgaatcatacaaaagtcatacactttaaaacctcagaaactattccgacaacagaatcagatcacgtgagctatattataactgtaagaagctaaaaagtctgaaacccagaaaaaaaagtaagaaacttataagcttccaaggcaaacccacaaacaaagatcgaaccttgaacttttgaaactacagagattcaaaaataaagatatttcgattctaattaacacaatacctcctttatgaacaaatttcctctgtttcttctttctatatccggctgggagatggaaactacaactcatccataaacatatagaaaacgaaacaagaacaaaaaaagaaacaaatcagtgagattatatatccattttcagaaatcttgagagagagatctttgtagggtttccataggtgagctgagaggaaaaagagggagggaaatagagaaagaagtttgaagctttctttgttgtttcttcttctggaatattttttatgctttgtgggctctgtgtttgctttttctatattttcgtctttttcttgttttactagtctttttctaaataaaaatcatattttaaaagatttcattcatttgataaataaataaaaagatttccattaatcatttttcggcgttaaattattcatttcatttttctttcttaggtatattaataaactttatttgtaaattgttactatagagatttaatctctcttctcttttttttttttttggtaaagtgggtttccctattaactctctttttgttgttgaaaaagacactattaatcagacatagttttgctagttttcaaaaagtaagcccactaattactaatacatcgagttcatcgtagagtaaataacttttacgtttccttcattacaaagaaaatttgcatatgaatgtacactttagttgttgagaaaaaaaaaacacacacacaagaaaaaaaaaataaggatatgatgataggagggtgacgaagctaaagaccgtgattggcgacgaaaagtttcaaagaaagtgtttacaccggttattttattttattaaaataggtcttgtaaaatgtgttactaatcaatttggtcaacattattaaattagacgttgcacctaactctttaaggtaataaatttgttcattatactataaccagctttacgtttattcttctccactacgcatttttatttattaagtaagtacattggtttctgaaggattaaacaaaaggaaacgagcggctgctaaatcagaatcgtggatttcgattctttgaattcgttaaacataataaaaagaagaagacaaaaatcatttgaaaaaaacaaaagaattttaaaaaatagaagatgcgtacttgggtccatgttatttggtgaatatcgtgtagaaaccaatgtattaatcctttaagtaacatatcgtaagtgaatttaattggcatgcaatgcaattgaaagtaaattaaccaaaaaaaagaataaattggcatgcaaattgaaatagcaaaaacacaatgctaacataatttcatataaatgcacgtcgcctccaccctccagttagttcaacgtatctgattaacaatgtgacgaaaatagttactttgacgacgtgtaagaaacaaacgtgtatcagccttggaaaaattgtttcgtgaacttctgagtcactaattaatcatatcaacttatctagtagaagaccaaagaaaagattatcgtataacttactcaaaatttaatgtgaaatgtcacgtaatgcgtagcatatgtttctcgtagttcatacttattaatcttagttaccatttacaagttattgagaaaataaaaatagttacaaacttacaacttatacatttaaccagagaatatgaggtcttcatctagaatgtcaacttaaaaatatgatttataatcaacgaatttcggtgatatcaaatcatcagaactttatgaaaataaattgaataaatcatcagaagcatatcctaagatgaagtaaaaataatttatagttaagataaaaaaaaaagcaaagaaataatagaggaaataatttgttatatattaaaataaaataaagcagtaataatgttgcctttgcgtgagcttgacaaaagtcaacctgagaatggctttgtcttgctgcgtggaatacaagagacatccatcatcatcattttccagctcgaacaaatgattctctccatctatttctcttctttttattttattataactattagtattttctttcattcgcacgatttttttacatctccctcaaccgtttaatatgttaaattgtttacagtaaccatataacataactactacatttcgttttacataatttttttgaatatttcactttaaaatgctttgacgttcttaatcttttacctatctatatgatggttggtttaatacacggttatatcttaaaacataataaaaaaaaatcattatatgattttaaaataaaatatgtatatcagaaacaccctacacacgacggcagatgatatttatcattattgtaaaaattaaaaattttaaaaaaattaaaataagctaattggttgtagaagtagaacaataatttagagcacgcgtaagaaacaattgcatgattagtgtccgcctccgaaagctaactaacaatggggtttagttggtgttgttcatattttatttcatttgtatattactttctttcttttctttcattttctcttaaacttttggttttatatgcagttttcttttttctctttgttgctgactcgctgtcttattattttgttattgtcttgcagttgttgggtttacatcatcatgtcctactagcatataagatagtctaaaattaatgtattagggtcttaacaacaatgatttataatattttaaacaataataacaaggattcagtgattgtttaagctctatttttgtctcttaagtataacatgcatgcatccaaatcataacaacaatattgtcggaagtttgttcaagaaaaatatcacaagttacataaaatggatagtgcggccattggggatagaatctgagcttcttaataaaattgtcactttttcataagtagcataaactacccaaatcacaaaaatccacattaaactatccattcctcattattttttttgggttttcttcaagtgaccattttccgaagaagctcatatagtttatgggctatgttggcttaatgcagttgcttaccttctatgctttagtttggttattttcgctttgaacatggttgtatcaaaacacctttgtcacattttctcaaagtctcttactccctgattattaccgttagaaactgaaagatatgtaagggtaaccaagtccttgtaaccataataagagaggagatttggattaaaaggtcttccttcgttaagcttggaatagaacacaaataggttcgaatacaacaatgcataaatcaaacaaccaaactaaagcatagaaatcaattatcaaaactctcattgaacataagtagttattcatgtctaatctcgaaggagagtattattagagtgtaatacacaatttctgaaaatcgataattaagttgatttatatgtagatttgtttaatcaaggaaaataagttgacaacaaatcaacaatatgtgactgccgacacaaattgattagtaataccaattaataagaaaaaaggtagaatacgaccttcaattataaaattggttagtatatcacattcacttagttattcttaattaattataataaacctctcaaatcctcacgtttagaaacaatattatattcacgatttagagcttaaccatatcgataattacacacactcatatcattatcgcatatcgcagatttttctctcttcaaaattagctttgattattcacatcataaacaggcctagaacaaagtctcttgacccagcataaggtgttatataggcccataaagcccaatctttctaactctcttcgcaggtcttctccgcatacaagagataaacccgtagccgttagattcaggttttgctgattagcttattcatctccaccgtcaatttaatttaattgttttggttcaggaactggacaaaatattaattaatttcaagttctaatctttcttcttctccaactaaactactgtagctagctatctccagttctacgttctttctattaataaaatcttcttcttcttctctttttggttgattcccaccattgaacctctcacgaattcgtcgtcgtatcatcagattctgctcgaatagctgaatttgtttaatcagatagtgttcctcttgatctatcgctactagatttgttgtgcgtttgttttctttgctgataatttgcaaattctctgcttatgatctcgaggtagtaatgtctgttcttctctcccttattgttcattttttaactcgttgcttatcggatctgatccatttcgctctctttctctgatcgtgatctctcgattttatcctgctcgtatctctcgattttatcctgctcttattggtggatttttggttttggaggtttagatttcatgtcgtaggttttggattttattttctggcatcattacttggtgttgtgaatccaattcctcagttaaatctgcattggctgacaaaagttttgcttcatttttttttttgttgggtttcaggtaatggccacagagcctttgcacctggtttttatactgccgtgttttggtattggtgcagtgtaagaaattgattgtcaaaggaaaatatttgctttttctctgaggagaggggacgagtaagatggcaaagatgataaacaagacgcttgtattaacttatatctacttgctgatctacattatactttcttcaggagttatactgtacaataaggtgattttttagaggcttttatacttaaataacgtatctaattgttaagcagatatgtgtagtttgcatgttagagcctgtatctccatataaggcttcgatgtttaattatatgtagtgtatctgagatggaaaccatagccaaacccttttcgtagcaatcggtagtaattttttctataccctatgtctacctgggatgatactattctgatgtatcgtcggatgttggatatgcaagggctatgatagtattctgatgtatcgtcggatgttggatatgcaagggctatctataactgtagtttgtattagcttttgttaaagtagagtctgacttctaaatcgtgactcttttattgctttttatttgcagtgggttttatccccaaaatacttcaattttccacttcctataacgctgacaatgatccatatggggtttgctggattcgtggctttccttcttattcgtgtcttcaaggtatcctaaactcaaagattatggagtttgctcctgtacatcttatctggagctctcttttataatattatcttctttgtggatccttagactccttttgcaagggcgtttataagttttcctctgttttgtaggttgtagctccggttaaaatgacatttgaaatgtaagccagtttgctctatatttttcatctatatttttttgttctcttgtacgtaacctccactggctctccattttgacattctttttgggcccagatatgcaacctgtgtggtacctataagtgcattctttgcatcaagtctctggtaagttcctgttctatagacaataaacataatttattgatgcgcttattgctggccatcaggttcaggaaaactctgtattttctagtatttcttgcttcccaaactgtctcttcactatttcttattctcttgtgcaggtttggaaatactgcatatttgcacatttctgttgccttcattcagatgctgaaagctctaagtatgtgaagagttaacattttggttacagaatctgtttagtttatctattcattacaaagcatattaatatgtgactatgcaatttcagtgccagtagcgacatttatcatggcagttgtttgtggcactgacaaaccaaggtgtgatgtgttctcgaacatgttgctggtcagtgttggagttgtgatatcttcttatggggaaattcatttcaacatagttggcacagtctatcaggtgacaggcatctttgctgaagcacttagactggtgctaactcaagttcttctccagaagaagggtttgacattgaaccctattaccagcttgtattacatagctccctgcaggtattgatactggttatacctttggtttcagttcgtctaaatatattacattacattattttcgctagaaggaaagttctgtctcactctactgcatattaatatacatgatcttttccttgacacactatgccttcaatttgtgcagttttgtttttctggccttaccttggtatgtgttagagaaacccacaatggaagtttcacagatccaattcaacttctggatatttttctccaatgctctatgtgctcttgccttgaacttctccatattcttagtcattgggagaacaggtgcagtaaccatccgggtggctggtgttctcaaagactggattcttatagccctctcaaccgtcattttccccgagtccacaatcactgggttgaatatcactggatacgcaataggtagattacttgatgtcacaacaaatgtgattgctgtaaacatctttcttgactggtttttgcccacataactatttattcttgtcatgtgtttgacacagcgctatgtggtgtcgtcatgtacaattacataaaagtaagggatgtgaaggcgtctcaaccaacagctgacagtcttccagatcgaatcaataaggtcagtcaaacattctcgatctctaagctcaagcagatctcagcttgcatttccctttcaaaagaaccactagagttgcaaactatagtgtagaaccagttaccttttttttccttctaatgtaacaactgatgaacacaaacattacacaggagtacaagatggagaagaagtcttcggataaattcaatcctaacgacagtgtggagatcccaagagtaggaggagaggtaaacgacgaggaagcccctttgatcacatcccggttgtctcatattggtcggacgcagctcggaaatcacgctgcttaagatgccggtataaacgtataatagacattttgcttcccaattcgttattttgttacttagaagaaaaaaatctttgaaaccaaacaaagaagttgcagcaccatctagacccgtgtcctcgtgtgtcaggtgaaaaattccaaatttgttatgagatagaatagcggagattattaccaatgattagctggaaaactaaaaagtctcaaattcgtttgtagtgaattgacgttaaatttatatatttgtggtcttaattttttccatcatcagccgaccctggattcaattatgttccggcttctgagcagcatctcttatatttgaactcgattgattggtacaaaatattaatgtcttcaaggtaaattctgattggaagagtagtaattgattctccagtaatagaaaggtgaaacaaaacgaattaaaggagaatacagtcagtagtttcataaatacttaacgtcagaaatgtagtagtactcttcatcacgttcttcgtattagcaagttacagaaagtgataaccatttggactcttctaatgaaattccagctgtgtcatgaaactttctacagtaggacgaagaaaggaatctaatgaaaacgtgagagagtataacattggtctgaattttatacaaaagaagtgataagttgctacaaaaaagaagaaggaaaaagaaatagagacaaaagctgaaaatatacacaccctccaatcaaacccagattcaaacgaatgggttaaaacaagtaaaagaacatgaagataaacatccccaagcctcgtcaactatcaaagcacacaatgccaacaagcacaaaccctctctctaacatccatgaaatggattgttaacaaattagaaggaaatatcgaacctcaagatgcaatttcctcattcctcgtgaataaatatacaaatagagatttatattctcacatgtagtcttgattcctcaagtacaatagcttcctcgattgcgctggaggagctaatcctgggatgtccctaatgtctttgttattcggattcacgatctgaagaattaatacaaaaaccagagttacaacttgctaatgagcaatcacaactttcaacagagagagaaaagacagtaccttcactatgattatggctactacaccgcatacaatgagaaacaggaaccccattatgcatttatcggtagccacctgaaataagtagacataagcattcaggttttgaggtcaagccaaaaaggataaatctacatatgtccatatgaggttacacacctgtctccctatctctttcaccagctgggaggccttcttgattgagaattgaatagtgtccaagtggttaactacgcgtcccatttgatccgtctgcaaaattttcaggttgtttaagactctactcataagattaatatggaagtaaaggagaataatttgcattacctgtccctttaaattagctgcagtttgagttccaacttcgagtgtttgttctacaacctgaaaggaacaagaatgttaccatagatatattcatatagtaacaaaggctaaggggaacataattccttctgtaacttacctgttttgagcgctcaatggcctgatcagtctcatccattcttttcattccagcatcaacaagctcctggtttgacatagctatacataataaaatgacaaaagccttcatcagtttttacattcccaatataatatacttcgcgcctaatcaaattatcagaatcattcatttctattatctaggccaccgataacatttctagtgccatattaccatctgccagaaatttactgacagacatcacaaattatgccagacgaataaccagagagcattagttaccaatccaacatattcaagtacatatagcattaaaaagtctaaacttcaagcatgtcaatctctaattgttctaagcaaactcatattttggtggcaactgaagacaagaatgcataaggactcacatgaagccacttgaacattttcctcagctgtaggttcgccactaactccagctcccatatcaaaaagctcaactttcttgttgccaagggtactcatatacctgagattcaagaccaatttcacatgtatgaacacataaaagtcaaatgaaatcctatatagatattctgaacggatcgatatgaaatcaaaaccctaaaagaacaggttgagattcaaataatcagctttcttaaagaggaatgatagaaatactaacgtttttcttagagcaacgtaagaattgagctccttgatctgtaacattatacaaaagaaaaagttaaacacagatgttaaaaagttcatacaaacaaaatgttagcagatacaaagtacagaggggagtgatagatacacaatgacactcaatatccaccttaatatatccattcggttataaacacacctaaagattgaccaaactgaatacgactgatgctgtataatggaactttacgaaggtgccaagtaagagttaatattcacatatttacttcagatacatatgacattgtagtataatcaaagaaaggcctcaatgaatttaataaacaaaggataaaaactcaccatagattgtttctcatcgttcaattgcttatttacttcaggagaatttctagcttcctcatccttgagttcacggtcgaactctttgaccaatctgacatgaagtacacattagacaagcaaatacagattattgaatcatggatttgtcacatcaatactctttccttctcaattctcattatacggcatcgtatccagctcaaagaaaaagaagtacgcataacagtgatcaaagagcacattctactaaaggcaattagcaaacaatgttgtaacgccgagaacataatggtaaagcatagcaattatgaaataagtataccttttacactctctcatcttgtcagtaagttcttcaagttgtttgctttgtctagttgaatccttaatcttatccaacctctggaaaccattcctgcaaaacagataatggtgaatcattaaaagaacaatcttttgagtgatgactaaatctaattcttatcatcagcattaagcaaaacacgcataaatcctattgagcacacataatcaaaaaattccaaaaccctaaaatatatatcacagtgtttcgtaaccacgacagagatagttagaaaattgaacaagaggataacatgtaaaacatacgcgagggctcggaaatggtcacggatttcgccatggatctgctccaattgagggctcatggggagattagaagccatgtcgccggagacaattcagaatccgacgaaaatttacccaaaaactacgtcactgcatctaaaatttccctccaatttaaattaaaaccctaattagacaaaaactgaagttaaaatctccaaaaagagaaaacacaaaggagaatgaatgaaagacgaaacaaaggacgacaaagaacgggaaaagggaaagagagctgtcaggtgtgtgttgtttttttcttttttattcaaacatatatattttttaaaaacaaaattgattaataaataaattaaaaagacagatattcggtagttaaaaaaatgacagcgaggcgccaactttttggtcccatccatatccgttgttagataaattatttcactttcactaatttcacctaataatactttgattatattcttctagccaacaaaattttcatatttttcgaatattttaaggatacaatgctagaattcaaaatacagtgttacttcgttagaattgtagcactaactaatcatcgtcactaagatcatcatcgtaaggatcaaggttgtcttcaccttcaccgtcaacgttaccagattccatgtaaaacttctcctcctcttcctcatcgtcttcatggtcttccttctctgctctgtcttccccgtgcaaagcctcctccttcaccaataaactacatttattagccttttataaaatcactggaatggcgtttagcgtttctcactttaagtaagttaagtacctcctccttctcggatgttacgagccagtcagggagcaaccgatccagcaaagcgtggttaagagttggtggtggttcatcctcataatgtagccgttgcttcagctgtttttctctgagccgtaagttgtaatgaacgtatgttagatctttcgttgattttttcccaaattggctctggcattgactgttaacttggtcgtacacgctccacttaggctcacacccaacagacgagcaagtgtggctcagtatccgaaccgccactcgctggagttccaaacagcttatcccatgctgttgccaccacgccgatggatcaagctctgttcttgtgccaatggctatatccgttccaaaatcagctttcgcacaagtataatccggaatctgaaaacatttcaacaaaaagttggtttaacctcaggttctgagaacaatgtgtgtgacttggtgatttgttttttgtctcacctgcatcaatgctgtgattctacgcgtgttatcaggctcaagcctaacaatgcattcgttaactccacgcacaacctcagactgctgcagattcattcacatttacagcaaatgtaaggaaaatggcagaaagcttttagtcattgattcaaatgaatgataatcatacctaccgccataaaatcaggacgatatttgtatgccgggttgaagaaatatgcagccacatagagaggatgatgaaacaatgggttccaacggtattctatcacccgccaaaacggtccgtatttccttgcatcatcgctatgaatagacttgatcgccattttcgcacagcacatgtaaccgtaagcatatggcatagatagtctatcgccaccatcattgatcatgtgaatcacctgcatcaccggatcaaccgatttcaaaacatactgaaccttcttccaaaacacagcactcaacaccatcttctccacttctcttccctcttcagacttggcggcggtctgtgacaaaatccagccgtcagattgaaacagacctctgagactggccttgtggtccataagactttgaagagtggtgaacccggaagcgtggcgcatgactgctggtctaagaagatctagtccctgtgtgaattcgttcttcataagattaagcagccatgtttgattgtaaatgaatcttgtgattctttgggctttctctaagcactcggagacaaattctagctttgagaagtcttcaagaaccagttctgtgcaatgtattgcacaaggagtccaatacaaattctttctcttctcttcaagtaattttccagcacttctaaagatagcagtgttctgtgtaataacctgcaccacattttcctcgccaatgtcgtcaactagtttgtctagacacttgaaaaggcttaaagcatcttctactatatcagtggcatcaatcgaggagtggaagtagacaccacgagggcacgagaccaagaaactgatcattttcttgccctctgtgttggtccaagtatctgccattatggaacaacctgtaaccacccaagaagatctgtactccctcaagtagcttttgatagttgacatctcttcctgtaagagcctaccagaaaacagctgactcgagggcacaacgaaaccctctccgtacataccaatcaattcaatcatcttttgaaagtacagagaatttgctgcttctgtgggaactcctacatggtgtaagaatttggaaatggaggatgtgacgtcttttcgtgatacaactctgtttgaacagctactgtatagtttcctttgcttgctcgaagaaggtgactgaaacggtatcatcctcgctctctttgtttttgcttcagagacagatctcatgttcgttgaatcaaagctttttcttttgtctttactaaaccttccatttcccagcatcaacctatcttggctggttggatagaagtcatgatcttctctgtcttcttcttggtcaggatcctgagagaccgttctgaaagttaaagctcccatttcatcatcaggtctgttctgcctcttcccagctcgatgccatttcatattctctttaatcttaacataaacctcctcgggagcagttttacacggcgctacctctccaggtattctcgccaggtgctgtttaaaacggttaataccgccactcacaatcttgttacagtaattacatttcactttctttttcctctcgtcctgagcaataccatgttcccatccaggatcaatataacctgaagaccgaagaagactcccatcactcaagcctagctttcccttacttcttatagaccagcagcgccgctcttcctcatccgcttcatcgtcattgttagattgatggaaactggaacaagactgtccactattatcctcagactgcctcagctttttggtggaacgcaccagattctccttcatcctcatacatacttcctccggagacttgtcacaataagtaacttctcctgaaactcgagccaagtgttgcttcaatctgtatatccctccactaacaatctttccacagtaattgcatttaaccttcttcttccgttggtcttgtgcaacaccatgctcccatccagggtcaaccactccaattgatccaggtggagccattgtcaaaccatttacaagcttcaaactttaacagttccacaaaccagtgcagccacaatctacaagagtctttacaacaaaaacaagactttgaaacaacatgcatggattcaacatagatggatttaaaaacaacattttttcatcaattttataaagcaagaacaaataattgaactgggtttttcttctatagcatacctacgaagctgagaactttcgtaatcggaggcgagatttttttctggttttgttgatttttcagaccaagaaaatggaggtgaagcttaagcgaagttggaacacatatttagacggcgagatacgtatttgagctaagaatcgaagaagcgtttttgcggaggaaggaacgagtcacgggacgagatagagctgggtgagaggcgaattaactcgactcgggcgatttctagggtttctgtcttcggctgactcgttgtttttaacgaatttccaaaatgagggcttgtatatttgcgaaattacatattgagcctttatataatggaaatctacgtaactaaccctctcttgcagtccagtcagatattcatttgtggtgttttgctctttcaccaatatagcaaaacataactttggaagttcctgaacttggtctttcaattttcgtgttgcaaaaacagttttacctatattaattttaccaattcaaattatataattttccaatcaagcaaaagtagtgactttatcacatttttcaagccaaaaacatcaacgcattatcatttcttggctcgagaactctgaatcatccaaaacattcttcaatgtgtgctttatcacaacttccaaaccaaaacatcaacgtattatcactttcttggataagtgccaatcaaaacctaattcactagctggagaactctaaaaatatcaaaccttccatgaaaatctccaaaccagtaaagccacacaacaagatgaactcttgaaatcatacagatacttttaaagattgaagatggaaccgattaatatgaatgaatgtcactgagtcttacacacaccattgtacaaaataaaagccctaatgtatcctaattcaaagtctccagctttctctgggagacatttgatcaaacacgtctgaatatgaactaaaattcaccaagataaatggccaataaccgcaaaaaagtagtctttccttgaaccctagaagcgatatatcacacaaaagctctacgtaccagtaaaattgctatcaagatttagaaaatcagcgttcatcttccttcctcttgccggtgaccttactctgtcgaataacaatatcctgaagattcgtcaatgcacctttagctctcaacttggccgttttagctgctatgatcttcttaagagcttcttcctttaacagagccaccgctttattcatattagccaccgagatatttccagctgcgacaagagccattgccgatttcggagtgagaggcgtttcatcggggacgtcttcattgactcgagatttggggaagaaggtgaaattggggttagaacatggctggcatgtgaaggaagaagctggtggtggagcggaggaggaggaagatgcggcggaggaagacggcggctgagttgagcaagaaaggtgggtgcttgatgggcaattgacgcagatgatacgagcttgtggaggaacggcgttgtcgaagagattgaaacaaacagagcaaaagtgttctcggtactctttgagcaaacaatcggtgcagagtcgccggaaagcgccggttttgatgacggtgtggatgaacgacggctctttttcacggcagactatgcattcgcgctgtttctgttccggattcatggctaagtcaacgagattgagaactctctccctcaacggtaaccctaagcgagagagagagagagaaagatgaaagaagcgtttgtgttgttctcagaatgttgaagatcttgggcttgaagagacttcaacgtataattctattgggagctgaaaaaacttatatagaagattaaaaattgggtcttgattcttgttgaattaaaaacagaatcttttattttttgttaatacgaagtgtatatatttggaagatgaaaggaaacataataatcttgtgttttcctcattgcttattgcaaactcttaagcattgtgatataacaaatgcgagcaagcctaaattcctctatttaatcgttttcaaatcatacatccaaacaactaaaataagaaaaagacaaattcatctgcaaaaagctttagctctgtgattccttcacttccacagcttctttctggtctctaatcattgtaaaagcccaaataaagatcaagatcatgctgttttcatcactctgccaacataaatgggtcaacttctccaagatctgcaaccaacggttctaattctgatggatcttcatcttctggagctaagtaagttggaaacggaagctttgagatgtctggtttcttgcaccatgcatcttttatgaacacaaagtttccttctgcaccaggaacctgcaacaacaccaaatcacaatcatgacctactaataagagaagagaaatggagctcatgttttgtgacagacagatcctagccaaagactggaactgggattgagatacttacttgtcctctcacccacatgaggttcctcgcaggatcgatcttgtagacccaaacgttctttactgtcctctgatctgcacccattctcccagccatctttctgcccttgaacacctactcaagtgtatttatcaagtcagtagtgtcatttgctttggagaaaaattcccaagaatcttagcaatttgacacatacctttccaggagcatctctttgccctgtggaacccccgcttcgatgggacaatgaagcaccatgtgatgccggcattccactgaaaccatgtcttttcatgcatccctgcaaattacacagcaaaagacatcaataacacagccattactttgcacaaacactatttcatccgcactccattctatatatctgccacattgtcactagactattcaacttatcatcgcaaagaaaagataaaactttagagcccctgagaatggtttcacctgaaaaccttttcctcgagtgatcccagtgacatcaacgtactgtcccggaacaaaatggcggacaccgagtgaagtaccaacaggaagaagagcgtcttcagtcacaggaaattccctcaacttcctctttaacggcacaccttgtgctctgaaatgccccaccacagcttttgacaaatgcttcggtttcttttgcccacatcc

SEQ ID NO: 1035 - DNA, 45292 bp, Arabidopsis thaliana
ctgccttaacccagcttcttcaacaaagcactgaactatatctaatctcgtcttaatctcattcaaatccacgaggggttgcttcagccacatatgaagcagtctcttacccatccctgcggtacatgttctgttcatgagaccaaacaaactgaaattcttattagcatcagttttgctctccatcacattcaaagccctcatagctgcagagtcaagtctcatgaatccgccaatatcatatctgcggattgtgaagttcccatagttatcctcatttgagagaagttcagaaaacgagagtaatgcacctagagcaggagtcgcaaggtcaaacccggataccaaatctctaacaggctcaatattccccttcaccaatctcttaagatctgaatctaaatctcttcctttgaactcgtgtttcttcctctctgttatcatcacggcacacctctccagggaatcatacaggcttttgcattcattggatttgccggattcagctggaaaaatgcattcttttgcgcctagagcaatcaacgaagactccagattggtgaagcggctatcatcaagaaactcagctagtccaagaactcgcctagtcagatcaacataggccatcccaataacgcatctgccatcgtgaaaacttggaaatatggagacaacaactggtgtgtcctgcatttcattgtttgcaaacaaaacatcttcaaagcttccaatgtttccaggagaacctgttttcacaagtctccaattcgatccgcttccctcataaagttctacagtatgatcattacgctccaggagaagatccctagcaatcgtttcgaacatgttcctactaatgcttacgcttgaaagagcatttgaaccactcccgagctgacgtagagcagtggttgtatgataataagtctttgcaatgaaaactgaattttcaccatgagctgtataataatcctgcaaatgcatttaagaagtttccataaatcgatgacaaaacaaccaaaagtctagaccatttgagaacaatgaactcaccttgcgatcaaagaatctaacagctctcgtatcctgaagcaaagaacaatcaaaacccacataagcaaagatcgagaaattgctaaaaaatcttaagccttttttcctaattcgcttcccaatgaacaaaatgtctacaattgcttcaaaccctaattttaaagcatctactttccgactagaattggtgttatttattgcaattagaggcactgtacaagctctaacttctcccagaaatcgaaagaaaacgagaacttacatttggtagggttttgtagaacgagagaaacccttgagcttgctttgcatcttccaaaaattaaaaaaaaaatgcataacaaatatcagaccttttacaaaacccataaacccaattgggaaatcgaatacgaaaatgagaaagaaaaaaaaaactagggtttaacattacccaatttcagctccggaagcttgttctgttcctcgaaattaccctccattggaagatagagaaagctaaatccttcacctaccttctgcaactacggtgcaaatgttcttctttcgtggtttttcagtggaactggaatcgaaagcgactagaagaaatttatggtgtcgaatttggcgggaaagcggattggcggcaaccggcggcgcgtgtattaacgttctttgagaccaggcgtgcaatgtttcaatgtttggtctataaaatatcaaggcccattaattctcatattgggcttactgggctaacgacacctaccattttgagtgtgttacaaatatatatatatacttctactaaggatttcatttctttgtagtaacatgatcaacgaccaaattatttggacaatgatagttatttttcactttattatttagataatattattcctgtttataaattaaattggaaaactttggacaaagggaagtggaaggttttgtactataaagcactaaattgcatatagaggacgatgatggcctttgatgagccacaaaagtcgtatgaacttatctttatgtcatttatggttccaaatagtcaggttatattccctttttctcctttatatatttattgaattgatcccatatttatcttgaaatattcttcatgaatttggaattggatcacattataagtttttgaaaatggtgttgacagaagatattattatcacatcatagagttttaagggtccccagtttcttgtcatgatgatataccaaaaaactttatagagtacagccaacctgacaaacccatgatacacaacacaaccttatctatgtacatatatgtagtcacacacgcacacacaaatatattgatttccttatacatccatacatgtgtctttgtgtgattgtgtttgtgcaattataattgtcaaaacctattttgttatatctttttcccacttcgacattgtgtgacatcaaacttttaagaacactactaagctccaacaagtacacgtttgataaattatcaaatccatcatccaaaagtaaaccatccatcatttcaaggattagtcgactatgaatttgagtatatgtcttctgagcatgatctgattttaatattgttatctaaattttttgaattaatatactttttgccttggtacaaaaaacattccatatttattcttaggagtaaacagaatcacaacccaatatgtatagaagtactggtctctagataacttatataatgaacaagggacgtaatgagggctcgtgtcatgaacccgtaacaagaccctctcgagcctcaccagtgacattggtgacacgaagcacagcctgtgcactaagaggtgagaggtttgattggcagaagattggccaagtggctgcctctggattctcctcctcgggttcgacaggagtagttttcttatacactgtctcaagttccaggaagactgtccgtgcagcctcctgagattctgggagttggtctcaattccatattctctcatgccttcaatgccctgatgataaccatagccaaagaaaggtgatgttggtgggaacatacactggatccaaatggttgtcatgttgatgacatgacaaatccaaaacaaaagaacaagactggttttatgataacgagtgaagtttgatttaccagtcggggaacacatccggagaagcacgcagatgcttttgcgcggatccgaggactcttattcttgagacaaggtcgaagctttggcaacagcaaggcaggagaaacatgtgtagtcattgctactaatgctctttccgctgcttcacaaacaaatcgcttgtcttgggaagatttaaggaggagttgagtaagctgtaagaaaggatttcggaatttctattatagtaaacacaaatatctgctatttgaggagaattccaagagtagctgcaaaagatgatttaccaggcgatccaattgatcgaatatatggtcattatatgagctgaagatgtcttcagatgtcatacatgcggttttacttacagcacttcttgggttcttcaatgatttcacgacaaacaggatcactttctccctgtaaagtctgacagcgtgagactagaaaattctctcgacgtgtaactcaatctactttaactggtcattctcacgagcacagagaaaacgacttacagcaaatgcagcatttcttccttgtggaaaatggaaagacgacgaacggtcaagtgactggaatattaaacaaagaatttccaaaatggtattaggtaatgtccaaactccaaacagatgaatataactgcaaatttgcaaggcagcattacaaatgagaagtcacagtaaagcatagtataataccaggaaagaacaattgataccttgagaactgcatcaacttcagctacattgttcaagtctttggatttgatatactcaagttctacgataactctttctgcctcaggtttctctatctcatcgcctgtaggatgattgtgatccaaggggacagagttttgtggtggtctatcttcagcttttccattcattttgccagcacaaggattttttttacagtcaatattcctctcagagacaggaagattcttcaaatcttttaaagccttagcagccatgcgtagaagagttatctgcctgaaaaacaacaaagaagacaccaagaaaaacatcacttgtgccatcagttacaagtttagattggaaatcaacgataaaacaaacaaaaaggcagaatctgatcagaatagagagaaaaagcattggcaaaattggtgtatctgcgattacaaggcgttatatgcctgaaaagcaacagagagacaccattataagtacaaacaacatttgtgctatcagataaaactttagtacggaaatcaactacaaaataacagaatactagagacaaaattaggtaggtaatttcaagcataggtattacagagtactagaaacgagaacctttgtctgtgactgcacgaggatcttcatagatacagcaataatagcaacatgtccacatatatctacattcagtcggagggcgggcatgagacacaaactcccccacctcccactaaatcgattgtcaaagaaacgaaagattcaataacgacagatgatccggttagatcaatgtagacatatctcggcagaaacaaagcaaatgctcaaagtccaaaagagaatagaaaaaccttcaatagaaagaaatatttggccactaaactcaatccgtacatcaatgtaaaagttcaagagagaccagtaaaaaccgaagtggttattacaacaaaatcagacatagaagcagtgatatacaactatatcaagaatccacatgggggaacgaaactgaaagaaggggttcgggatggggatggggatggggatggggatggggatggggatggggatggggatggggatggggatggggatggggatggggatggggaaggcgatggcgatggcgacggcgttctcgttgtttttcttcaaaatgatcagcagccaagcagttggttttgatgatacacatgacaaccatgaagaaacagaggctaccagaaagggacatccaagaatccttcgctacacaacccagaatagcagacatcgtccctagaaatagtatgaatgtggttcggctggaatttaaatcctcggcaggagaatgaagttgaacgattgtaaccgctcctattatagacataatcaccagaaatgacacttccatcatcacatcaaagtcctcgatgctgtaggatatgcaataaatgacaaccattgtagctaggtagatcccaaaccgtccctcagctcctagccgataactcgggactggaacatcgttgcacaagcaaatgaatagcaaaccaatgtatggaatggttgcagcagacaagaagacatacctatagtcatgaacacatacacacacattatcaatacatatatataaacaaacaataaaatcaatgagactaaatcgataaactcgaaaatttccttacagtaacttgtgcaaggtgccaacgttgcgggtgtcaaaccatagaacaaagatggacccaacgagaatggtgatgacaactgtggtagcgaataagtaaaaggtgatccgagagtaattactggtcacttcagcagttacattcttccaattttgctgagctcgcgagttcatgtcttcccctgaagggctcacgagtttttccatcacgccttcgcctagttccaaatccatcactccttcggctagtttcaaatcgctaatttagttataaaaaaaaattattcgcatacagattcacataatcagttctaatctctaagaaaatagtcagtgttaaaaagtgttctgcgtctacggaatcattggactctccacaatatctccaaaagaggacaagagtaaagaacaagaaaacgaaatagcttaaaattaacgtcaaatccacattcatatacatacactaaagaaggaaatcggatcaatggagtacctaaatggaacacggcgacgggagacagtgacggtggcagagacgccgagagaacacggaaaattcagaatcagcggtcgaacacggcgacgggagacggtgacggtggcagagacgacgagagaacacggaaaattcagaatcagcggtggattaaggcgaattcgacgacgagatccagatcggcgacggagataagactacggagagtcggcactcggcaacacagatcggtgaaagaaaaaggcgaagaagagaagcggaacttttataacctaaggacggcacgaattcttattctttcgatcttggaacaaaaggtagttatggaatgcttgaatgacgataatacccttcgtttagataattatctttgtcaatcgggctaacccaatccgactgagtccgaaatccgtaaaatcgaaagatagagaaagctaaatccttcacctaccttctgcaactacggtgcaaatgttcttctttcgtggtttttcagtggaactggaatcgaaagcgactagaagaaatttatggtgtcgaatttggcgggaaagcggattggcggcaaccggcggcgcgtgtattaacgttctttgagaccaggcgtgcaatgtttcaatgtttggtctataaaatatcaaggcccattaaatctcatattgggcttactgggctaacgacacctaccattttgagtgtgttacaaatatatatatatacttctactaaggatttcatttctttgtagtaacatgatcaacgaccaaattatttggacaatgatagttatttttcactttattatttagataatattattcctgtttataaattaaattggaaaactttggacaaagggaagtggaaggttttgtactataaagcactaaattgcatatagaggacgatgatggcctttgatgagccacaaaagtcgtatgaacttatctttatgtcatttatggttccaaatagtcaggttatattccctttttctcctttatatatttattgaattgatcccatatttatcttgaaatattcttcatgaatttggaattggatcacattataagtttttgaaaatggtgttgacagaagatattattatcacatcatagagttttaagggtccccagtttcttgtcatgatgatataccaaaaaactttatagagtacagccaacctaacaaacccatgatacacaacacaaccttatctatgtacatatatgtagtcacacacgcacacacaaatatattgatttccctatacatccataaatgtgtctttgtgtgattgtgtttgtgcaattataattgtcaaaacctattttgttatatctttttcccaattcgacattgtgtgacatcaaacttttaagaacaatactaagctccaataagtacacgtttgataaattatcaaatccatcatccaaaagtaaaccatccatcatttcaaggattagtcgactatgaatttgagtatatgttttctgagcatgatctgattttaatattgttatctaatttttttgaattaatatactttttgccttggtacagaaaacattccatatttattcttaggagtaaacagaatcacaacccaatatgtatagaagtactggtctctagataacttatataattaaccttccattatgtcgattgttgaagtgttaaaattcgataaaaatcaaactttccgtaaaccatatcaagacatgacgtctttaggataatgcacctatatacattaaaaaaaaatggcacagaaataagatgtacgtttatatgtacaacaacctattacatcataaaccatattttagtggtgaagcatggaacaacaaacttagtaacttggacattatttgagtgttgtcgaagactcgaagccatttataaaggttttaaatgattaaaaacaaaaaaaaacgaaaaaaaaagagcatcaagatgttacatcgtcagggaaaagaacatcaatttctaagtaaactcgtaaaattaaggttgaaatgcagacattgataatgtaggattggaaatatattttttcaaaaaataagcaatttataatcatttcatatatatatgagaagctgagcaataagaaaaaaagacgtgagaaagaccattaaaataatcaactggataaaactattcagttattagatgactgatatgaataataagttcttcgtaaatgtggagttctaatagtagaaattaagtgaagtatatgactttgttgcccaaaaaaatgaaaaaaaaaactagtatatatatatgacttttatcctcttacatttcgcaccatatagtggcttcaagtattttcctttttctgaagtttttcccaccaagctaaaacatcattttctgaagttacaatattgaataaggtataatttgaagacaacaacggtcgtatagctacttacacttggatatatgcatatatgtttctaataaaacttaggcattctgtgttttcaattgctattatatttatatgatcaatatgaagatgtgttcatttacttttatatatataaacaataatatgaaaatgtggtgttgtcaaatctccttaacttaagcgtgaaagtagaaacataggctatctctatccctaaacctcaaagaagctctacatcaacttgttactcatcccattaagcttgtcgcgataatttgttcgattcgctaagaaataatatttgatatagaaccatttctcttcattcctgtaaacgaaagtgagataaccaacttaaaatttatgatgtattttacaaaaggcgattgtaattgaattattaataaaatcgtttgaaccgagatagtatgtttagactaacgttttaataaacgtttcaagctgtttaaaaaaaaaattagaggatgattttcataattctatttcagacttattagttgaaattttgtgactaattgaaaaaaaaaattggtgacgctttattcagaaattttgtggcgacatttgaatttctagtatacctacacaaatttgtaaagtagcaatcttttcttttcttagagaattattatttaatttcgttgtcgtccaaacaagaaaattctagattcgttttttgtgatctcgagaattttaggaaaaaaaaacttttttttttgggggcaaatgaaaaaaaataactaaaatgaagaatatgaaaaggaagaaaagtcaatattgagtatgcctgtgaaattaaaaaagtggagacaaacacataattttccagacacatttccatgaaaggaaattgcgcgaatgaatggtaatctaaaagagcattgactctctttgctatatatagaaaatgattcattatcaacctaagaaccacacaaataccaaaagaaaaaaaaagttgacaacccattatacaaagtaaaaataaattttgtactttgagaatgatgataatgagtgactgagatttgtaaccaacaactttggcaatagatagataatataacacataatgaaagcactcagggcatcaatgccaaacttttgtaaggaaaaaaaaaaagattgaaagactaaccaaagattgaaacttaaattttgattctcactaataaacaacttaaaattgttattaaaagaaacaaactcaaaattggtgatatgatatatgttgttgtcttcttcatgggttattagaaagaagaactgaaagcaaccttagaagaagccagcgagtccaaccattatagtcatgtggtcctcctgataattgcaggcctagagatagagagagagggaagagagataaagaagaaagagcatgggatgtggtggataattaggcggagaaggcggcatgtataaatggaaagagtggataacaatggatgaccaaaataggagtttttatttacaatgatagtgtttcatctttgcacgtaactcctaagtttgtactttacctacgtgcatgtatatagatgtggattagtgacttttatctcttgttagttatttctaaaaacatgcatcacatcacttaacacagctgacaaggtcaacataactacctaattaataaactcttaacgaccgttaaccgtattaacttctaacttctaatattgcttttaagcgaagagatatttctaaaatatgtttttttcacaaaaatacaagggaaaataatgatacaaaagcttacaagataagcacgagagagaaaagaggttctctttttagcgaaagcgacttctaagttataacataagtatgagagagtgtgtgtgtgagagagagagtcaaaagaaaataaaagattggtcggtcatgcaatactgaacagagaggcaaagcttttttcttttcttcctaaaattattgcagccttcttttcttagggcttcacacagccacgtgcattcctccaatttgaaaatgaaactttgtattttaactctcctatagcaaaaagattattttctccatatcatgaaaatcaatgtcttagagctaggaagaaggattttgtgatatgagaccaaaaattccaatccgagttttgatcttgttttcaagttttgtatcacaaatatgaaaacaaagagatgttttttgtttctttacataaaaaaaaagaagagaaattcttttttttttttttggtaaaagaagagaagagaaattcgtccaatgcgttcgtcagttttgctatttgaactcaattggattccaataagtctacgtaagaaaaaggagctacccttttttactaataatttacagaagaggatgttgcataacaatcaatttagaacaatcatctatgtctatacttaattttgagaaacatccatgatggatataaattgttataacagtgtttaaatttatttgatattctcaataatatatatatatatatatatattataatataagaattcatattttatactttaaaatacaattaataatattttacaacaataaataaatgtatttaaacctaaaagttggcacaagaaaatggaattaaaaaatattactgatctgtatggttttcttgagggatcgccatgattgatgattcagtttttacaacccattcagttcgatagattatctaatataagatttttttgtcaaatattttttttgatctagtataagttttttatttatgaaacaacaaataaaagatttggacttaagaatggatagaagttttggaataacaatatttgtgtcctatgtataaaaattattagatagagatacaaaaattgttatctgaacaaatgcaatatatcaatagttagtgtacatatgaagtcataagaattacaccaaaatactctttaaaaatatgaaaaagttgtttatagtgttttgaaaaataccaccaaacaaaactttataattttatttgaccttagttctttcttacggtgaaatgcaaatcaatattttatatatattttaattatatattccttgttcctatttcctttagacataatctaaaatcttctaacttttcttctattaatccttttccaaataaaggcataactaataataaaatttatccttaattttatctcatatttatttctattcaactttttattttgatcttcttaatatgcaaacatacatttatatgtctatttttgggtgaaattaaatctcattaccttttatttctttcatttagttataccttgatctttatctactaaaaatattaaaaaatataatcaatgtggaaaaatctatctaactaaattttaaatgtcatttcaataatttaaataaagatctgtttatttaaagtgaaatgttaatgtaattggtaaatatatgttctgtcaagaaactgtaatattaattattctagctaaatcctaaagttataacatatattctatagtaaatacagtgaaatattttatattgaattaactatttttaggcatcttttagtgcatgctattaattttaaagatatatacaatctttgattagttgaaatatagctgtcaacaatttaatatctatcaaataattatactgagttcttatctacatattagtaatgaactatctcaaagaaatataagaacataaacaaacacaaggtcctaattatagaaaaaaatcttgataatcaaataaaacgaacatctattatcacattttcacaaaaaacaaaaacgaatatatttttatcatgccgaagctaggaattaagaaaaatatataaacaaaataaatgctttttcaaaggcttatatgttgttccttcccccataatgatctctttgcctctctctccatatagctctccctctctctctctttttctctctctttctctccattctagttcatagcacatagactcatttaagtacgtcgcctgtgttgtctttctcaaccattagtcctttgcttcgataaaggtattctctctctacacatttagacacacacatagattctctagaacaaagacatattgtactatctgactaatcactattactgctctttttttttcttgattttgcaggctaaggaaaaaaagaaatctctctttctaattttcttgttttcattttggttgagacttgagatcaatgtcttcgtcattggaacagtaacctttctctttgattcaaactttctttcattttcttctcttttttcttgtgtgtctgaagaagattatagtacaagtgtcattctcaaaattttgtcttagggttttttaattttgttacttcaaaaacccctaaaaaggcatgaacaacaacattttcagtactactaccaccatcaatgacgactacatgttattcccttataatgaccattattcctcacaaccattgctcccttttagcccttcttcttccattaacgacatcttgattcactccacctctaacacatcaaacaatcatcttgaccatcatcatcaattccaacaaccttctcctttttctcacttcgaatttgccccggactgcgccctcctcacctctttccacccagaaaacaatggccatgatgataaccaaaccatcccaaacgacaatcatcatccatcacttcactttcccttgaacaacaccattgtagaacaacccactgagccctcggaaactataaaccttatagaagattcccagagaatctcaacttctcaagacccaaaaatgaaaaaagccaagaaacccagcagaacggacaggcacagcaagatcaaaacggccaaagggacacgagatcgtaggatgagactctcgctagatgtcgccaaagagttgtttggcttacaagacatgcttggatttgacaaagccagcaaaaccgttgaatggttgcttacacaagcaaaacctgagatcataaagatcgcgacaaccctttctcaccatggctgcttcagcagcggcgatgagtctcatatccgtaagtatccattcttttctagttttaagtctattcaagttttcaacttctatgaatttttttatatcataatctgaaaattgtaaatttcctaattaattaaggaccggtgttaggatccatggacacatcttctgatctatgtgaacttgcatccatgtggacggtcgacgatagaggcagcaatactaacacgaccggtacgaccttaaccgttgcctttctgatttacaattatatatagagtactttctatcaaaatgttacaaaagataaattatcttatacattagaaacaagaggaaacaaggtcgatgggagatcgatgagagggaagagaaagaggccagaaccgcgaacgcccattttaaagaagttgtccaaggaggagagagcgaaagctagagaaagagcaaagggtagaacaatggagaaaatgatgatgaagatgaaaggaagatcacaattagtgaaagttgtggaagaagacgctcatgatcatggtgagataataaagaataataatagaagccaagtgaatcggagttcttttgagatgacacactgcgaagacaagatcgaagaactttgcaagaacgatcgttttgcagtttgcaacgaatttatcatgaataagaaagatcacatttcaaatgaatcttatgacttagtcaactacaaaccgaactcatcattcccagtgattaaccaccatcgcagccaaggagcagctaattccattgaggtaccttatttatatctacgagtcacatttataatttttatgagtttttttccaatggttttatctaaagctatacacagttaattcaagttttagaggtagggtatatcaaattcaatgacactaatgcaccaccatcgattaattaatgctatatatagtttaattagaagttagtttttgtgttttgtggattggtacttggttattactatctagttccacatcagcgattcaaaggcgccggttttttttaactgacttggttatactattatggtttttattgttcaaattttcatcgatttttttttttttggggctatgtaccttgcagcagcatcagtttacggatcttcattactccttcggcgcgaaaccaagagacctcatgcacaactatcaaaacatgtattgaaactgatttcatttaacattaatatctcaaattaatgatatatagtttggtgagagagatatgttaatccatcttatgtttttttttcttaacatcgtaattaatcatgtttatatgaaggctttttcgtcattttagtgtcaaatattaaacctatgtgaagaaattaatgcaatttgtataatattttgttttcatagttcgagtggatttttaactgatatgtatcctttaaacgttgtttgttaatattatctctgtgttgttaagtttgtctatcgtttgcttttaggaatacaacaaatgacaaaaacaaaaggaaacgtgacaaactgatgacaaaattatataagttaagattcatgattcaatacattctcaatctatattccttctgagacctggacgtcagttctagtaatcaggcaattcaaaacctttcaagcctattaagttaaatgcgatcgacaaacgtatcgggtatcactaggcttgtgatctatgtataagtgggttaacgtacattgtatacagacaagttcatatatgcgtaatttgtgtaatatattacgtggaaactttatcattttcaaatatattttttataactgatgtgaagctatttgctttttcccttaaccaatgataagttctgctctaataaatcgaaatgtcttgggagtagtaagttacttctctattgtgataagtttgagttacttaatttggagagtttggtttactcagtttggtatatcatgttccctaactagagtttccatgataaatattaattattataaacaaattaaaattatatacagtacttctagatagatcctacaaggggttaaaagttatgaaacctgatgatatgttgcactaattaagctgttggtctttgtagtttgtattccacatttatgctataataggttgctatcaaaccttgggtggtcgttgttgttgtagaccggcgtgggaaaatgtcaaatcatccaaaattacacaactgtgagcttcagaccacacatgccggtatattctacccttgaaatatacataaatatatgtgtacatatatatatatatatatatatatatattatgttaaagttaatttgcataaagagaaatttaaaaaggttttgtgaatataagacattaattttttttaagcattaagccattttccaattaaaataatagttgtgtctttatgatttttatgaaaaaaacttttttctatgataaatttacaaaatgcatattttcacagttctcttatgaaacctcttttttgtgaaaatctcattatgtttgttttcctatattagctaccttggttcccaactttttctttggtctatgatttggcgtttgctcctaagaacgcacacatgcgtccatatcactagaaaaaaaaaaactagaaaaaaaaaactactaaaatatctagtaaaattcatctacagcctcataaagtttcgttatttatcagaattaaaattttatataggcatctgatactaagacattgactgtaatatatatatatactaatatcagatgtggaaacttgatacataagagctattatggaacttttttggttatcaataaaaaaattgagcctctatggatgacataattattaaagtaactaaactagaaattataatttgaattacaatgctttataaaagttgagtcaagatgtttgaattgtgtcttagttaatttgcaaacacacatgatgatatacatggatccattaatattacatcttagccccaaacataaaagacaatgtggggaggattaatttagtgttttgtttttaatgtgaagtttgatttgattgtactagttcctagacaattaattaagtactggaggaagagattatagcgcagtaagggattaaagaagtcccaaacacgaagtgtccaaatattaggaaggaatatatatggaaaatgtaaaaactacttcaatgacattgagatcattgaaatgacaaaagtaagttaaaagaataaagagacatttgagaaagagaaaaatgaacaagtacacaaagaaaaagaaaggaaacaatatttctataataaaaattatcaacaacttcataacataacttttttgatacaccggtctaatatgtttggattttatcaataagtcgacaaaaacgtatgcttatgtttctatgaagtcatgtgcaaggcaatcccaaacatgaaaacacaatgagaatccaattgtctttgactcgatcaggtcgaattcttttttgaaacgattaattttatcaacgatatgagctaactttgaatatatctagtgacttggtatgatggtttccaaataagcaaagcactagtaaggtagaaaatgtgattgaactataaagagagtgacagtcagaggattcctaaaccacggttattctcgcagaaaaagaaaaacaaaatcaactatgtgacaacttagaagaacaacagaaagttaaagtagatagataaagaggccacatgcctacatttgtcaaggtttcaaagattaaacatattttagaatttaaaataaaataaataataataataatctgcggtgataactaaaagaagaagaaaatgccaaaatcaaatgaaaacccaaattagttaaataatgtctcttttaatttagagtacagaaaacaaaccagaaaagggacaaactggaagaacttaaaaggtgactaattttcttatcgagaaaaaaaaaaagagaagaagaagaaacaaagcaagaaccgaacacagatctgcaagtttcttttcctcaattttaaagaagtttactaatctgcaaaaacggtaatcaaacccgaacaaagttagaagaaagtaaactaaaggagatctgttaccagaggaaaaaaaaaaaaccctaaatctgggttagttatgagaaacaagagctttgactgttaattattacaaaaaccaaaagaatccgaccacaaatgtacttgttagatagagatgcagcagatccagacatagatatatagagaattaatgagacccaaaaacagccaaattaattacccgaccttgcctttttttcaaaccctatatatttaaattagatgccctagagagagatagtggctttgaaagacagataccaaccctagaagaaataggagtagagagaactgtaggcgtccggtatcaatggcgcattcttagggtttttatctttttgttgttgtttggttgaaccaaatggagaagcggtgaaagctattcatacttagaggaagctggctcattaggctaaccgccagttttcaattatatagaagtttatgatttgtaaacttaatttcttcttattcacaatgactaatagcatgattagcatatatgtatatagtttaagatcttgttttcttcattattctctctctggacgcaatttttgacttttgaaacaaatgtgatttatttgttcattgattaaattaaatttagatatatcattagtttattgataatatgagtcatatatatattggctacggtcagaccggttgatccaatgacccgaagacttccggttcaccttccggtccagttttaaaacccgaccacataaacgctctttctcaattagcttcatcttctgctcttcgcctcttcgtcatcaaaactctctctcagtccgtcgatttgacaatgattgacttgacacaagttcgttttatcatgggagttatcggtacgatttccttctcttaaattgtaccatttcataccgtatacattaatttaatctagttgtaaacagtgatatgaatccgaacaagcatctattatatatggatcttgactctaatggcggatctctttatgcaggaagtgtttttactactggtctcatggctgttcaagtgtaagtatcccttttccttttcctctttctcttttttttgtttttcttttcatagtgtcgttatatatgtgttttagtatattctcattatattaacataatccgtttaacaatctgtttagtatatttatgagtctgttgatcaataacgtacacatagaggcctcggttggtaatgataaagccatattttcttctagaaatgttatgggttttctatggacttccccttgttaataggatagtagtatcttcgttttaacaactggtgccttcggtttgggaattggagctatctttttaaccgtcttcttcatctactgtggccacaagaaaacctccgtgtatgtttcttcagtctttactattagctagctcataattattaatgatgtgtatgtgcagaggtacattgtgtcacgtcttttggttgagatcactgggtgtactagtgatggttctcattacgcttttcgcaatcaaaagttcatttgctaaaacaaacattcgttggtgatattttgcaatatctccttgcttaaatatcccttagcttctgtcctcgtaagtcccctatctctcattgatggatggtcaaaacatttattcattacgagtaattgatttaattaaattattgcctgaaaaaacagaaaacggcggagatggagatggagattgcggagtactgttaagtatatacagttttggttaacgttcgttctcaacatggttttggacattcttgtaagtattttcttttaacacaaaaaactttcatgttttttagttaaataatagatttgccaacgttttgttttttgttttgtttatggcgtatataggtaaaaacaatgttccaagaacattggtgtctggttctcagctaaatagtctatgcctattgtctattaaaaatctactgcaaaggtgaaaacggactagagactcgggaacatcataatgatattttctcatatatacagaattttacttttcttttcctcgcttgagtttgaaagatgaggccatgattcgatgattagtgtcttcgactttgagtcatactgggaattagtaggacgaccacttatcgccccattttattcttctacgtcttctctaaggtatatatatatcccacaactttctcagatttataaaaatgttacatatgtatattcaaaatctaaaattatatatatatacaaaattacaaggcaaaatcaagtcctatatgatgaaattgattatccataagtgcgaaacaaattaagcagatgtaatatcaaattaacggatcacttttacttttgctccttgattcttgtcacttagatacaaacatactatagtgagcatcatataatatgattatatacattttcatatcttaataggcctatagtaggtttctgttacgaagcccatttatatctacaaaatgaaataatggtacatctacatcatagtgggccgaaagggtagacataggcctgataagattgaaataaataaaacaatagaaaaaccagtattttgtcccttgggaaagaaacgatttttttcttagatgggagtttgagcctagtgaagagccgaaattgtgactctcgaccaaagaggtagatcggttccagaggcataacatcatacgtgacttctcacattaatatatctactcatgcgcagatttttatctagtttgtacttgcgttcacaacttcacatgcatcctagatttatatagtatcgtaatagaaaaaaatgaaattaattttagaaaaacaattcttaataaagtctttgcttctctattttaaattatacatattatatttcaacgtacacttgctgattacatggataatgatttatattatatgtgattgtgattctctctactcatctataataagtgtatcatcatttaaaaatgttagaatcgcctctccctctcaatgttttttattactataaaacaactcgaaaaaagagaaaaacaaagttcaaaatttataattaaaaggaacagcgaatctatgaatcaaaattcttttgtgcgacacagtgatccaaacgtgcatgcactacggtcaacttttcttggaattgcgtagtgaagaacgtatgtgctaattttggattagttacgctcttacgtatttaaatggaaaaaatcttattaatagtataatgtaaatttgttataaaatggaaaaaaacacccaagtaaaccatgcgcaaaaatgggatagaatattagctttgaattatatatatgttcgttgtaacttgtaagtaaattttatttaattatagggggaggctacctaacacttctggatatcgtgcttcctaactccccttcaataccgagtcttcttgctaattatttgtaccaaactgtttgaatttaaggtatgattatttaaaattcatctgccaccaaatttgtttgaaaaatttataaactaatagtactactctatcgcatttaatagctcttggtaatatgatagggctacgaattgtaatcatacattggtcttaaaaacaaataaataaatgaaacttgattagttggttaataaaagaatatgggtcgtgccggtcaactacatttagcgtttctcaatgttctaagaaatgacccttcacgcttaattgaaatggctaacgtaactgttaattagtttttttccatatgtgaatgatagttctgtttagactaaatgagattgaattgattattaattacatcgaattaaaagtgttcatatatcatatatgatacctcgtactcgtagtaacaaaattgcagtattgccttagtaattagacaaacaataaaacaatataatcacactatatatgtaggagtgaaaccgtaacatcacttcattcaaaactattcgcaacaaatatgtataaacggcgtcgacgatcgagagagagaccgagtcagattttgttaagcaaacaaaaacaaaccaaaatagaaaactcagtgggtccctacctataccggtcaccgtcgcgttgtgaatttggttgatgatgttctcagtgacaaagatcaagttgatgagaactgagaagccaaataggtccactatcactaacccgacccaaccaaagctaacccgacccatttcatcttattcttcaacgttagacttagacacgtgtttcgcaacacctagagaataatgtaagtcgtgatcatgaaacagcactttgcaattgtgtgactaggataatgtacatccgaaacacatttagattatgcacttaacaaatatacattaggaccgaactgaatagagctcgtaatctttcttttccaaaaacaaataaaagttctttatttggccgatccatacaagtaaatttctgcatgtgtttgcgttttttccccttactcgctaggtatttggctgttaattgcatataaactccagacaaataaagaccgcatctaaacttaaattaagtcccgcataattacctaacaaagtcaaattgggtttggctgaatcagcctctctttttgttaaggcagaatcagcctcttacaatatctactcctaatttaagcagccttatttgtggtacgaatttctatgatattgttgataatttataaatgctgacgcatgttttgtgattttgtgataaacataaggaaataaattattgcatatcgaccaacacctaaatttgagtgggtttttcaccacacttgattgcgttgttgatatttgccccaccactagtgcttgatacacgaatcgacgaaccaaaatagttaaagataaagaaaacttaaactttccaagcgttgcacaaaaaaaaaaaaaaaaactttccaagcatacaaaaatagtttaaaaaaatatattttattctaacaaaataaaaatttacaaatagataagaaaaaaatccaaataatataaaataaaaatgataaggaagagctggcgaattctgttacagcaataaaaatatttctaatataactaatgtattaaacgaataacatttatcaagaaatgaattcaaacacgtaagagtattatcaagagatcgttgatgcatgtctctcgcatgctcgttaggtttcatacacaaaacataaacaaataaatagaatgtagtcatgtacttattcattgatatcatattatataacacaggatcattacagaaaatcaagaaaatgtcaaacacaatataagatgtcaacgaaaaggctaccgagtcagccggtaacctaacactcttttaatattaagggacctacattaacgcgtgcattaatataaatatacgtaaaccaaccatttcagacaagagagagaatcgcattaacaaaaaaacaaacgaatcttttgagtttaaaaccctttttcacttaccggagaaatggagagatcgacgccggaacatgtctcctccgcacacaagcgcataagcgtgagcttcctcgtgtctctcatggtactttgtgctagacacgcaagcagagtttccaagaagcttaaacccaagaagactcggaagcaaactcatcttgaagactatctcgaaagccctaagtctaacggaaacggtagcgaagacggtagaggaggaggaaggtttggatggagtccggcaaggactttttctcctatgagggtgcgtcctaaggagctctacacgaccttgagcaacaaggcgatgactatggttggccggaaaaacaaagcttacgacggtggtccgacgaagaagacggcggtggagatggtgatggaggaggatgaggaagagtacggcgtttggcagagggagattttgatgggaggaaaatgtgagccgttggattactcaggcgtgatctactacgattgtagtggacatcagctaaaacaagtgcctccaaggtctccacgtgccagtttggttccggagcgcccgactcgttcttatgtcgggtcattgttaaacccgacgggaaaggaaatttaaattttagtttgagaatttgaaattttagtatgagtatttgattgttgtttgaggtgtcatcacgtaagtggtaaattctctaggagctttgttggtcccttgtcattagtagatgcatgacatgtttttatgcatattgttgtgtagtttatgtatttaagacgtttggcaattttaaaactttagtagtttaaaaaaaatccgatataataaaggctaaggtttccaatatcaaccgttcatatataatcattcaaatgtatcattaaaaaaagaagcgattacatgtggttgaactatatttttctatatatatacgaaatataattagaagttgaatccactatgcggtaaaaaggctccaatgatggcctttaattagccgtgttaatgatatcaaacgccaaaaataatcgctttcagaaatacttagaccaaatcaacggttgacgttcagccaaactttggtgttgcttgaagttttttttttgtctgcaaatcaaaacacaaagaagtcaacaaaaaaaaagtaggcgcgtgaagaagattccaactgtctttagattctcaatgatacatgcttaatttttgtttttatccctcatgtcacgttcgagcatgtaaccattgtatgcctcttctaaatcttcaatgactggttcttccaatgtaatagtagattactagctagtagctacaaagggtaaagtaggttctgctacaataataaattatctcagtgcatgcatcaacccacagtgaatcattaatttagctactataaacggtaaacattcgaattaagattttcttaatagtttggaatctttgcaacctgtcaaaccaattaccagtggacataattttttaatcttaccaacattttacaatcctttcctttttcactaataaacatgtttgcatccgacaccgtattctctctttagatttcagtccagtgttaattaatacaaaaatagacaattctcgtgttcataaaagtataaaacgtataaagagggttattaagtcattggttttaactgtaaaaggttcttattggattttttttttccaaactttgaacatgactatttataataaggaattttcattattagaaaaagaacacaaaaaggatgtaacatgctcttccatatcgtctgaaataagcaatgaagatagaaaaaaatggtagttatttactctcattgtttcttcgaattcaaacacaacggaagacatttgattataatataagtatctctccaaaaatgtatagaaaaaaaacttaaaaacaaaatgaaatattacatttcaagcgacggacacaaagcttacattacacataactagatagatattcttcttcatcttataaagtataaacggaaacaaaataagaaaatgtaatattaccatgaaccgtgttcctcctccataaatcgaaccgtgatcggttaatactaccctgaaccagactataccaaccggttcaggtcaagcaccaggggccgcatctttagccctgccatggaagtaaccaccgtattctctagcgtaatctttgacgtgagatgccgtgtcatagatcctactacgtgcataatccatctgattcgatccaaccgggtgcattccccggaaatagcggtacgtccacgacactaaagccaccgttccgacaagaaatccggagaccgttaagaacccgccaacgacgacaaaaacgggaatccatatcggactcgagatgatgatcaatggaagaaagacaatgaagccgagcacggcagcggtgacgcttacaccaaggaggaagaggaggatgccagtggagataaagagagcgaggaaaccaaagagctgcgaggatgttggtgaatgggatcggagctgatggaaaaacgacgagatggggctgttgctaacggtggtggtggcggtgctaccataattgggccaatattgggcctcgccgctagagaacctttccgccattgtagagagcgattgttgttttgtgtgtgtgtgtgacagagaacagaatgaggaagggtaaaacaaatggaggacagattcagctttgaggtggcattcatgcaatgtttgtaaacacgtggagattggtcttggttttcactttgtctaaaatcgagattttggtttagattcggtttagtctaaatcgtattgattgggtttggtttgggtttatttgccgaaaaccatggaaaagggccaatgccaattgaagaacactaaaccaaaccttcaagttacaagaagagacaacagaagcgaaactagaaatactacaatagcaaattgtgtacctttatgacaacaattttttgtatgttaaaaatcagtagtagccaacgcctctaagctcagcagaactcggttgctgcatatcaccggcttttcccaaaaacacaactcggcctgtaaggagagaaaacagagatcaatatttaattgtttcccaatgaaatatgtaagaaatggagttttaggggttgagccattagtaccgtttctacgaattgctacttctcttatacgtcgaaccaaaccagtgacaggatcagtgaatatcttcgtctccagattaccctctaagtagataacagtactgttgaatgaacacgaaacaagttgttatgacacatacacaaaagcaagctaccattttgaatctagcaagcaagattcacctaaagtttcatcctttttcaccgattcttgatcgatatcagacatgatacatacatttgttccttattctatcatcacataaccttacaagctaaatatgatctcagaagagaactaacccgggttcaacattcttcaacacaagatctgccaagcgttcagggtaaacagagacacggtgccactgcaccgcagaccggctcgcatactctctcggatcttcgttaataagcggtctccggttgttcctgatcccaccagttcctacagagaagagagtgacagttctaccactcttaagcttcttctgcagaggaagctgacccacttgccccaccaatattgcctgtattaaaccagaaattagtctagaacacactaattattaacctatccagaacgagaatctaatgatgttcacaaaatgactcaacaaagatcatacaaaaggcaaaattgcaacgatcgatttaagaaaaacaacaaaaacagagtatgtatcaattggaattagaatctaagtttgataccttgaaaatgccagagtcaaggccattttcgagtggacgctcttccataacgcgttcttctccggaaaatcgagaaactggatctgaggcctttggttcaatgggcgattctaactcgtcaaagtcggagtcttctggggaagtgatgttgttggtacagaaagacatggaagcttgagaaattctagggttcgatagaagagatcgatagagtcttctagaaagtgtagccattgaattcgccattttcgatcttcactgagattttcgaatcgaatcgtcaaatgttggattctgggtttaacgtcataaaccctaaagggctaaagagcggagaaagtgattagaatattttggaataaagtgcctcaattatttcaaatctaatactttttaccaaaactctcttaaatgacaatttcaacccacatgctgaaatggtcaataagaagaagaaatttgcttttgtcgtcaccaaaaatacaactcatagtcctatgtatccgttaataagcatttaacaattcttttggaatacacatcgtctacataaattttgtaattcaaaataacaagcaaaaatatcccacaattctgatattcctttacaacttcaagtcatgttgttttcgacaaaatatctttttgattcaagaaattaaaataccaagtcaaagagatatccattaatatccctcaagaagtggtcaactctaacaaatctccaagtctcactctttttaaactcaaaacctcacaagtcacaagtcattacgaacactaaaaaaaaaacaatctctgtaactttggttagagcttccttcatatcaatccaaaaaaacaacaaatggattcatcaaagaagatcattatcgttatgtttcttgtaacattttacatgttttcatgtgtttcaagcactgaatttgaagttggaggagaaaatggttggatcgtaccaaaatctaagactcttggagatgcgtttaaccaatgggcgtcagataaccggtttaaagttggtgacactctccgtaagtaattaagtatattgaacacttttgtatgaagtttaaacgtttcatcttgtaagataataagatatattaactcttttgtgcggtttttggtgaaggtttcaagtacacgaaagactcagtgttagtggtgtcagaagaagagtacaagaaatgcaaagcgaccaaaccacaactctactcaaacaacgaagacactgttttcaaactagaccgacccggtttgttttacttcatcagcggtgtctctggccactgcgaaaagggtcagaagatgatcgtaaaagttatggagacggagtcttctacagagtctcctcctccatcctcttcttcttcttcttcgtcatcatcatctcttccggcgtcaactcccaaggccaagaagagcaatgccttcaaaaccgcagtccagttcagtagttccggttttgttgtctctgctgttctgattgtttcagtttttggtttggtttagttccagcggttttagctgctgaagatcttaggccggtttagcgttttctttttctttgtttcgattactgaatttggtttccggttagaccggtttagattcaatgaatatgttttcacttttcatgtagttccgataatcacttaataaagctctttatggtttctttatgttttcttattccatttccatgtatcagtttttattataagcaaacgatatcaacaattcttaaaaagttataacccatagaactgaaatattaatagtagccaaggaacatttcatttaaatcaaatgcactgtttactctttaaacaaaacttggtggtggtaattagtcaaaactacggagcaaaatagtaattttgtaaacaaatgacactttatgcctcctttgtaggtgtggacttgccatagggactgtaaggactgaagccattgcgaccttgctgctttctcgccttcctcaccttcccagctccactttctatgttcagattcactttaggcggcgaagagaagcagaacgattcagcaacagcctgtgatactcaacgtcaaaacacgagatattagctattatgaaaacaaaaatctttggaagaatatttgttttttaagtttcttttaccaggaggtcaagtcggtgaacattaaagatgtctttcaaagagtgtgaattgtatgctgagagataagccctgtacgcatctttggctaacttgttcagattgtagtccttggcaacacatttctcctgtgagacagaacaagaaacgttgttattacaaatggaaagttattaaacccacaacattactgaatcagaagtcttaccagcgcagattgaacattactaagcctcttctcattgaactcaagctctttaacaggtactttcgcagcctgagggttaaattacaaattaaaactcaagttggttaacccacaataaaatttcaataaccattcttaccttcaggtagcgaataaactgaagttcttcaggaatcaagacaagtaatgcctttccctttgctccttctccacgggctgttcgaccaaccctatggatatattcctgaaataacagcaccaaagaacaatctaagatacacatacagaggcaaagggatatgcaaaaccaaatatgaggaagtgtttgtcttaccgttggcttgtctggtggatcatactgtataatccagtcctacagataataaaaatcgccagaaatatgatttccataaaaccattggtaagtaaatgcgtacaaaaccaatgcaagaacatagatgtggagacgtaccacggaaggaatatcgagaccacgagcagcaacatcagtacataacaagatacctttctttgctttcatgaagtcgaaaaaggttttagttcttctgttctgatccatgcctccatgaatatcagagacatccacgtcgcttattttcatgatttccgtatggaattgtaccgacttgcaagtcgagaaaaataccataatctttttatttaggttctttttcaaaaaggaaattagaaggataagtctttgtttgctcggaacaacacaatagccttgctccaatccttcatttgtcacctaacagttttggaaacttgataagaaaactctccatgctcccttaatatccattatcagagtatttaattcataccttgcgtctgccatcatcgacatccacatgaacaggtgatgtcaatgacacccgagcaagatctttaacctgtaagattagacaatgcatcataagaaacaaaagatactaataatgaccatacaacagccaacagaaaaataccttagaggtctgggtggcagagaataacgcagtttgcctagtctgcagaaacatggtaagaacttcaatcagcgcaaaagccaaatacacagtaatgccagaaattttggcaaataagttgtgttgacagttgaacaaacaaaattcctacgaaactactttggtagttgtttcggatgaggagaatatcaacaccaaagggcattcacatgatattggcatgtttctataaaagagataaaaatgaagtctctgatactggtgagccaaaatgaattcatctagttttcccatatcttttttggttagaccttaatttagacccaaaaagatgaaattacctttggtaaaatctttagaatcttattcatgtcttcctcaaaattctcttccagtatcctatcagcttcatcgatcacaaggcactgcaatttgtagggaatacatatggcaataaaaatttattagagtcatctatagcataaagctgtgtatttacatttcaactattagtattgctacagcccaagctacaaacctaaacaaaccacggaatatgtgtggatcacatcggcagtattccatttgtaagtctaacattgatgcaacagaaataatatagcataagctgttgtcaacagttcaaatatttatctatgggctcctttacataatattgtttgtttactggaaattatggccatgtggctcaacagtaaagctttttgcatttacatcacacaaagaagactagacaacacgccaaatgtaacaatggaaaggacagtaccttcaagtgtttataaatgaaagcctttgtattctgaagatggtcaagaagacgaccaggagttgctatcaccaagtttgaaccactggcaatgcgttgtgcttccgaccttctgttattgccaccaataaccatgctgactgtctgtgaatgatgcttgagtaactcctccgccacatttttagtctaaaatatcaaaatagtaaagtgaaaaccagaatgggaggccgcaataacatacaacgatgctcatactttacaaacacaaagcaatatcaatgattcagctagaagaaaaacgagaaccttacagatctgatctacctagcgcattacaacaattacaggacatatctactcgaaatgacagcatggttgttgctaccaagttgaaaatgccttaagttaataaaaacgaaaattacctggatagcaagttcccttgtggggcaaataacaatcacaccagtcccgttgcgaggagagaaacgctctttaaacagcaactcaacagccggaatgagaaaagcaagagttttaccagaaccagttctggcagcaccaagaacatccttcccctccaaaaggggctgaattgatccagcttgaatctgaataatagcaaaaaatgattaagagacttagaaacatactctacaacaagtcacaagaccatgtagtgagaagaaggttaaaattaacgtacttgcgtcatgtactgaaagcccatctccttgatagctatagaagtttgctcagataagtcgagggaatcaaaagtcacattagtcattatccctttcccgacaatcacaatattcttctcatcttcaccatcttccattgcttccaccttttcttcctcttcctcgattttgcctctcactttcttaaccttcttttcactcttcttctgcgtttcatcagcgttttcctctacagtgtgggttttttcttcagccttttgctgctcattcttcttcccacggcttctcttcctaaccctcttcttcagctcttcaacggatgacttgtccgattcaaccatgtttccactttcttcaaccaatcaattctgcagcaatattaatgaatttatgaatgaaaaaaacaacaaatttgagagtaattatacacctctaagagaagggaaacagagcaatcccaaagaaaaacagagtaattaaagctgtactcgatttcatctagggtacagagattcgaaaaggaacaaccacttgaagagaacccatagattaaaaaaacttacttttagaaacgaagccacttgaaaaggatgggagagagctcagagaatcgaagaaatttgctgtggaagaagttgagagagagagagaaacgtaagagtgataacgcggcgcggagacaaggtttagggtttaacgagcctttgaagttgtgtaattcgtaaccttttatttatttttttattttttaacatttatttcattatacacctaatttcagtaattcgtataatatcggcaattttttttatataaataagtatgtacttgtgttaaaaaaaaaatgagtatgtgattaactaaaatgcacataatttcagttttatccgtctattatttttattttaaaaatacattagtcaattcttcttttggcttacaattcacaaactactcccaaaatcaagatggttaacaattcggttgtgaagcctcagctttttcttagtgtattttctagaaagaaaaaaaattgttttataaagatataatttttaggttttcaatgtatttttttcaataaataataacaagatattgttattttcaagaaatattgattgaaaattttatatttattgaattactattgggttagaattatggaaattgtttaatgcaaaatagtatatttataattaaacattaataaaattcttaacgtgtgaaaactctaaaaaatatttttttttagaaactgagaattgtcttagccagattcataacacgtgatctgtctagaaaatgttactcaaaaacttttggcatgggcaacagagaatgataattagagattttaaattgtctaagctttattctgagaagggctgatagcaatgccaatgaaccactaatgaagtcaaaaggatttattccaaaattttgagcagcaaagtaaagtgctcttaataagttttaagaaaaaccaacaaaaagaatcttaagaagagtataaagcttaatgcttttctcaacagaaaacaaaagaaactaggccaaaaacgctctactactataagatagaaccaaaaacagctttcttctactcttcatcattaaagaccgtcttcgtccctgcaagaccatacaaacacacaagttttaaaacaacactaattctacaatgcacaacaacaaaaaaggggaagaggagaggagaagaagaagaaacaaacctttggatgattccattacacttggtttgctgggtcctcttccacgcgtactgaaacggccacgaggtgctcctctatctgagtgacgtccacgtggtgctctatccgagaaacgtcctccacgaggtgctctatctgagtgacggccacgaggtgctcctctagcaggtgctctgtttgaggaacggccctcatcactatctcttggtctagactcttccacatgtatgttccctcctccaatttcacttccgctcagttgcaacgcctcatcgaatccactcgtcaaatctatgtaagcaaagcccctggaagcaccagtctcacgatctgttggaacatgaacccttgtcacctctccacacttgctaaaatgacttctcaactctttcttgatctgatcatgatcacaaaagtggtttgcatcagagttttacacaaatagcttttgtaacatgttaatattggtttaagaaaagtctaggacaagaattttacttcatcttcgccaagagaagaactgaatcctctaacgtaaatcgttcgactttggcttccttctcctttgcgaccaggattgctgcatatagtccaacaaaccagatattagcctataaacaaaaacatacataatcccatcatgctcatatggcaaagtaagaaacgtacctgtttcgtggagtacccctctcgttagcaagatcaagacgaacatcgcggcctagtaacaatttaccgttcatttccaatgcctacattcaaaacatccaaaaatgaatccaatcatcatcgtaatttcaataccacttccatgataccaaaaaaacccaatatgaacttaccttctgagcttcttctggagaagcaaattcaatatgcccatatcccttaaaactcccatcatcaaatgaagaaagtctaacatcgacaacttcaccagcttctttgaagaaattctctctgtattttgggttataaatatcataccaccaacattttataggaagaaccagaaaaatgttatgaaaaaatgtcattatacttacatgtcagatctcgcaatttgataggaaagatttccagcaaatagcgtctttgatcctccctgagtctgattagtaggtgtcttcggctgtaatatataaacacataacatttaaacgttataaccacataaaaacgttattacataaaacgtgttaaccaaataataatcataactaaaggaataaaattcttgacaaaattttactgtatggagtttttacctgctttgcattagatttctgctctgcatccaccatttcaacatcagaatcctggtttcattaaaaggttagaacatatattatttataaacactctatagagaaatctgagaagtaacattattggtacctttttctttggtgtcactttctcatctttactctcctccttatcagattcatcactagattcatcactagagctttcttgtttagaagtttttgatgaaactttagccttcttcgtaggaggtttttcatcatcactttcctgaaagtaggaaaataatatgaaatatttagtgtatagaatataaaactaatcacaagtcattaaaaatattcaatcttgagaaataaaacaaacctcctcatcagaatcttcctctgaggatgatgaatcttttgcagctggtttagcattcttaacaactgttggcttcttggcaggtgttggttcctgattacgtttgataaaaaacaaatctcaaagtaagtaaaatgatttactttaccattgagtgaataacatgtataacgcaattctcacatcgtccgaagaagattcctcctctgatgaactgctttctgccttggcatccttaacaactgttgttggcttcttcttcacaacgggggtttcctgataaaattttatcaaacacaaatttcagattaagcttatgaaattcctcctaagcttgaggtaacatgtaaagatgcaacatacctcatctgaagaagattcatctgagctgtctttcttaacaacgattggttctttctttgcaggggtgggttcctaacatgtttttttaaaggtaagcatatgtattatgttgtcaaattgagctaccatgtgtaacataactcttacctcgtccgaagaagatccatcgtcggatgaactgctctctgccttagccttctcaaggactgctgtttgcttcttcatagggacagtttcctaacacacaaatattgcaaagttagcttacgacattcatctaagcttgagttaacgtgtactaatgatgaagtaactcatacctcgtctgaagaagaatcatcatcagatgagctgctctctatcttagccttctcaaggactgctggttgcttcttcacagggacagtttcctaacacacaaatattgcaaagtaagcttacgagattactctaagcttgagctaacgtgaagtgatgcagaagcaactaatacctcgtctgaagaagaatcatcatcagatgagctgctctctaccttagccttctcaaggactgctggttgcttcttcacaggggcagtttcctaacaaacaaactgcaaagtaagcttacgagattcctctacgcttgagataacgtgtagtgatgcagaagcaactaatacctcgtctgaagtagaatcatcatcagatgagctgctctctaccttagccttcttaataggttctggtcgcttcttcgcaggcgcaatttcctcatctgaagaagagtcatcctcctcttcagaagaagactcatccttcaacttagatggagtttccttagtctaaaaaggagaattagaggaacaagatgagtatagacagaacattgtacacaatcttaaactcaaaataactaaactttgtcatattactctaaactaattaaactatgagattgaagctacaccttctcctcttcatcagaatcagaagcgtcagaactgctactctctaccttcttaggtaccgttttctcagctttctccttctgaacaacatcaatcaactctttcttctgcttcttcgtaacttgcatgtccaaatcctcttccgcatctctcttacctaagaaaaattcaaaatagaatatggttttgagaacctaattcttgagaaggcataaagaaacaaagcacaactaattccaacactctcgttcaacatactccaattaacagcaaaatcctaaatcgtcaaaaagaagaaaattgaacctttcttgagtggctttgtcattgaagcaggtgtttcaacctggaaaaaacagagttttagattcgataatcttcacactcaaaagagtaacaagaagaagaagaagaagtagaaggagaaagatgattacttcggtgacggatttcttactagacttgcccatagatcctgatcacaagcgaaactggtgtagcagctaccagctaggtttacgagaagcttaaaagttttcgcgtgtagggtttttgcttttttccacgggagatttgttatttataggtagagagagattggcttctgaatttttgggaaattgaagtgtcggtctttttattttgatattcctttttccttatatgtgaaacttaatctgaaccgtccacgtttcaagcgatatgttaacttaccatttgttttttttttggacaaaagataacttaccatttaatgtgattctctagacacttgactcccaagttttgtaaattttacatgtgtcaaaatttacatttacacggctggttaaaataagattaaaagatacattatagaaggaattaaaaaaagaataaaataatgggagtgatatgcaaaatattaagaattaatcatttctcgccaatgtgttcaaaagcttcttctcttcttcattacttccgatcaaaatttgccggtgtttactgttgcaatagccgtcgccactcgccaacggtggggtatcggtagattgatttctaaaattagagggagaaatagaggaggctctcattttatttcgtgaatgttaaagacggtcaacgcaaaatcacttgtgaagaatctgatgctttgtgtcgtcgtggtcaagcaatttcagattgatccgaaaacaatctgtcagatctttgtgtaaagagagtagctttgagggagctgatagttctgttcgttgcccatgattagagatttagtatattctcacggatgattcagcgagacctgtttcatcgattagcagatgaatggatggggtttcttctgaaattgacacgtagtccattgttttaggatattcaaagctagaggaaaacaagtttttggttgattcttttgatttcattacaaaaaaaaagagctttttggttttctttgagttggtgattgttaactctcatcaaatcttctgaagaaacctttcttgtaaccagctatggaagattcttcccaggttagtagatccttctctctctagtctcacccatcttcactacatagtcttaacgatttcatcttgttatgccttagtgtatcttgaaattattggccagtttcagcatgcttgcttgatttagtgatttaggacttaggagatcaagttgatatcaaatctggcattatatatgtgatgcaaaacctttttacttgagctttctcttttcataatacttgcttagtgaatggtaaagaaagggaacgttttaacctctcaatcattggtagctagtagagaactgttcaagagaacataatacagtgtaggcaatcatgaagctggattgtgttagtgtttacacattgtggtcatctaatagtagagtgacccttgcatagtgggactgttttcttgcagcataggtttaacagagataactgtgaaatagctttataactgtttgctttttttttctctaggggagttttgttgcaaccataaatgaggattatgaagcaatttgttggggctgtgggctaaaccttgttcttccatcatatgcacctgtttttaagtgtggatggtgtggtgcaatcacgaatcagaatccagtcagacctgaaaccaaaagctttgggttgagacgtttccgtgaccggtgttttgtcgttattcttgcagtttttatgctctttgtgatatgtaagtccctctgaataagtaaaccataattttgaaaattatatttcgttccctgctaaatactcttttggataaaaaaaacttcaggtggtgggatttgggctgcatatcccgtcttgttttcgatcagcttggcttgcggaattttccattctgttacaacagcgactctggcgatatcaacgctctcaacatttattctcgttgcttttaaatgtgccgggaagccaacaaatattctttatggaacccaccctggagtagggaatggtgcacttaacaactataccttttgtaactactgctccaaacccaagtcacctagaacccatcactgccgcacgtgtggcatgtgtgtattggacatggatcaccattgcccctttgtaagtctcatagcgttttcaggtttctctttagttattacatatatcatttttacttaaagggctgaatgtagagtggctttttgagtttacgttgtgtggtgataggaatgctagacttgtaccttgttcatcattttatctcatacgaccctctgatcttccccaatcatagagtcctcggatactagacttgtttgtcaataccgtaaatattagtgttcttaattaccggttaaggacttaatgctaatgactctccttgtgttgtatttgcagattgggaactgtgttggtgcgggtaatcacaaatacttcatagcattccttatctcagccgtcattagcacaagctatgctgctgttatgtgtgtgtataccttgattcatatcttgccacctattgaaaaaggagctgcatatgcatccgatgtggcccatgtggcgcatggtaatagtatatcgattctgagagtggtgaagaatatatgtcttacttacatagccaacgctgtcttcatctctgttcgaagccttgttctagtctatctctttgtggcgagtgtttctgtggcgattgggctaagtgttttgctgtggcaacagcttagctatatctatgaaggcaagacttacttgagccatttgagttctcaaggaacagaagaagatggtgaaaaaagctgccggaatcttttgacttttttcgggtgtccacattcaattgaaaggcacttgccaaccataaggaacttgaggaagagacataagacatgagaagaagaagaagagaagaatgtgagccaagtatgtttttttctgtttcctcctacacttggagcttgttgtggtcaattcagaaacattcatcatacagtacttggagctaacaggtaatgcagattagcaaagtttgtacctcatttgtgaaaattcatgatcatagaatataggagcaactgctcctgtaaattttgcttaaagattgtaaatttgttgtttccctgacatgcctttgaactcaaggataacattatcaaaggcgttccatagataaatcttttttggatcttgccagtgacttgagtcattgataacagaacttaaagcttctggttttctttcatgcactttccatacaaaatataatacaccaccactcttcaaaactacaacataaagacagtttgccactactgagccatactcagatccaactacttcaacagcttatgctagggttccgtgataacatatttcacaaaaaagggacattagaactattaagaacttcaaactctcttcaccaaaaaggactgcaaaaaacacaaggcttcccgagatgaatcacacttcgccttggccttaagactacggttaacaagttaaagttgccagtctatgggaggaatccccatttcctcgagtagctggtttgcgcgagagaaatgcctgtccaaaggtagaacatatattcagcagttggtacaacataagcacaacactcagataactgcaggtcgtgccatatcttgcagaccacagaagcaataattacattatgcatgtaaataggcaggagagacgaaaaggtttattaagcttaagctaacctgcagtcgaagaagcctctattcgccgacaaaccagatggatgagctgctgtgagtatatgatgtttagtcgcatctatcaacctgcattcataaaagacaaaaaacaatgaagatgcatatgctgcaatatctacaagtctagcaggttctagtgttattgcaagtcataaacagaatttcagttactaattttcttatcagctgtatcgcattcataaaaccaaacctacttggatttctcttgagcgtatcttccccagagaagaaaaacaacaccttccttctgctgtgagatactttgaataacagcatcagtgaattgttcccatcctttctttgcatgtgaattaggctgtttactccttactgaattagaaagcaagttaaccgacatatttgtgagaagaattgcaggactttgacagttttatacatataaggtcatcacacgataggagacattacctgtaagaacagcattcaggagtaacacaccctaaaaaaaaaaaaaaaagtgaattgctttaccttctccaagtaaactgagaattgattgcacaaacaagtagagatgatccatttacctgcacagcccatttctgtagattaccgtgacgtgggatggaacagccaacatctttatgaagctccttaaagatgttcaacagactagaaggaagcttttctccttcaggtacagagaaggacaaacccatagcttgaccaggtccatgataaggatcctaaatcaaagagagtaaaaaaacttgtcaaagcataaaaacagaatccagaaaagaaaccaaagctaattccaaatgttgtatgtacctgtccgataatgacagtcttaactcgatcaaaaggagttgtattaagagcattgaaaatcaagtgctgcggtggataaatcagagggcttttactgtcagtgatgatctcacgttcaaggaaatcagaaagtgatttggcgtagggtttatgaaattccccaggaagagctttaagccatgattcttctactaagagctcactcaatggtacgtagcagtttccttcagctgtaatttccatcccaaaatcaattcaaaatctcaaaacccttaatgggggaaacaacatgacaagcaatcaactaaaagaaagaagaaaaaaacatacattttgcttttgtgaccctctcggagcagacggcgaggttacgcttggacttggcgacgaacttgttgaactctgcgcgagcgatctgttcaggtgtaaggccagacgaatcatcggcgacggaagtggtaacggttacacgaggcggcgagtttgctacagaacccaaatcacgggaaccaccggcgacggagacggcagggaaagaggaggaagaaggggaagctttgaggcgtttggcaggttgaaaaaaatccattagggttttaggtgtcgacgaagccatctccgtttcagaagtgaatcagtcactatgaagaagaagaagaagaagaagagatcccaattttttattctcaatttttttttatgtttcccagaaaagtttcagagaagagttaaatggcgggaataacggtggtataggccggttaaggaatctcttcaggccgatataaaccggttaaaggaagattcgcacactcagaaagtcagaaacaattccaatttcaatttgacattttagtttaggaacgaatttagtagttctgtaacttgttctgttgagaagaacaaaagcaaaagggctaaaagacaaattcaacatatataatagtcacaaagagatcactgaaattggttctaagtttctatataaaaaaaacaaaggacataaacgcaatcttggtctattatcagacttggaccatatcacattatgtcgaaaaagaagaaaaaagaattgggacaaaatctctctaatggggacaacaaagcatcacctgctcttctaagcatcacctccaaagattaacaaccatttttcactgcagctctcaagatttatgatgatggaaagataaggaattgtattaagacaacatgggagtacaattcatattaggtcttcttgattttgccgacatatgcctggagagacaaaacaagagttaacaacatgtgtatgttttgcagttgatttaagttcaacaaagcaaaagagtaatgtatatgaaggaacctgaacgagcttggtaagctttggtttcgaagcggatagataatggtcaatcttctcctgtgtttgaggaacgtttccactttgcattgtaccagtcactttctcagctaccttcttcactatgtttttgtaaccatctttgttcagcttaccttctttccaagctggttttaaaagctcttttacaacctcaactaaagcaaacttaaacgcccgcattcctttcgggtctttctctttcttgttctcttcgtcgctcccatcatcatcaccatcttcatcttcatccacgacattctcagcatcattagtgtcttctccagttttcttaccctcttcttccttgctagcttcatcagtctttttgtccccgttttccttgggatctagcgatacttcttgaatctcttcgacattgcttatctttgatgcagtaaccgcggggactccttcagcgccagtgctcatccctaatccccatagctgatttggattactactcactacattactttgagtagtagcctgatttggttgaacagattctgaatgcagaggcagctgcaatgcctgttcaagctgtggaatgggctgaccatttgcaagaaactgcgctagagatgctgagatgttagtaatctgatcgatttgttccctacttactgtattttggaccaaaacaggtttctccacagttgagtgatgattatcttgataaacttttccactctcaagattgctcaagttggagcctactgagaaatttgtagcagcagcagctagcacttgttgacttcctccagcagttagtgagctttggtacggtaatgcattatgattctgattgaatgtttcaactggcgcaacattcactgaattactgtaactctgatgtgaagcagctacaggtttctcagccatagttctgccaccatgtgaaaacataccactactcctctgatcatctttaagaactcgagattgtgaactctgaccaataataccaacactatggtcttccttcacaggcttctttaaagcttggactccataattccaatcaggagacatctccatgtcatcaatccagctactactaccattccctttagattcagaaactcccttcttactggcacgagaaacttcgattccgcctactcttccattgtccaatctttcaacatcattccatttattatgaccactagtatgattgttattgtcctgtctataaaagttgttgttgttgtcttgaggctgttttctatcagcaacatgatgagaaaacctgcaatacttgccattacgacagaaccccgtccccgcagcgaaaaacttacacggaatattcgaactcctgtggaatcctccttcaccatcaccaccatcccttctttgtgtttccttctctcccgtaaactcgcttcttcgccttcttattctcgaattatcctcgggataatcagtattattatagtcagaagaccttgcaccttccatcattgcctcttctctgaaatcatcggtgtgatatttggtctccctcggctttctaatgttatcttcccaaccataatgatcacttctgctttgatcaaacaaatgatcactgcctctcttattgaattctctgattggcgtaggagaaacttgtgttctcgtcttgtgtctgtcataagatcccgcgtctcgtctagctctatagactgggcttctactacggcttctactcctgctattacttctacttccactcctagaaagaaaataaaaagagagagacgttaagtaacaacaactgaagaacatataaataagaatctctgtaataactcgtaaacactaacctacggacaaactgttgcctagtaccatcttgttcagaaaaataactgttatcgttattctgtgaaactctgcttctagtcctagcttcaccgttactctctgcattgaaccggacaggctcagactctttgtcgcggtaataagaagccgagtttgcatttacgctagaatgatgatggtgtgtgtcttccttagagtcccactttgaaacacgttttcttcccagaccactcatttccatccccaactagtaagcaccaaacatcaaaagaatatctgtagataacaagtttatgaaatagagtaaaattagcaaacaagtaaaaaagaaactgtaataataactagacttaaacctcctaactggaaacatctgcacacgaaaacgaaaataacaacaaattggatttgattttaatctatcaagtttctttgttatatattttatatattctctgctcaacgagcaatattgctcattctatagatcttccaacagtagtgtgaaaccattcatagcaaatcttgttatccattaaactcagaatccaagagcaattgaaaagattgatctttga

SEQ ID NO: 1036 - DNA, 73977 bp, Arabidopsis thaliana
gatcaataatctgtgtcctttaacattttcttgcatcatctccttttcattcacttactctgttttttcttttttcttttgtcattgtcctttgaacaataatagtcaatcatgttaagagatttagttagaaagaaagtagtagcagtatactgctggaaaatatattaacctcctaggtgttagaggttttgaacaatataagtgttagaactaggaatgaaaaagaaacacaacttgttgatgtgcttggcgcttgctctgttttggaaatgaattccatttgactaatattgtagcaatagtatttccttcttttttttgcgtatggcggtaaaagtttttttttttatgtcggtaaaatttagttacggtatttttctatatatttataagagtgggcaagggtgaaagttagaagtccctaatttatatcacaagcttgttcgttaataaccctaattctctatgtgtatgactatgatgtccgatatctcgcaggatttgttagaggagattctctctagggttccaataacatctctgagagcagtgaaatctacttgcaaacgatggaaggatttattgaatgatccgagcttttcaaagaagtatggtggtaaacgagacaacgagtttctggcgatcatgacgagtggtagtagggcttctttaatgagcgtaaatctccatggacctcgtgacaataaagacttggaagatccttttataaagcaaataggtgaacttaatcaagaccagatatttaaagtgtttcattgtgatggtttattgttatgcatcaccaatgaggataatactaggctcgtggtatggaacccgtatttggcacaaaccaggtgcatccaacccatcgacaaattctacatatatgattggtattgtttgggctacgacaaggacaaaaaccacaaaattttagtggtttattcccctatgtttggccgcattgagtatgaaatctacagttttttgtctaaatcatggatagttcttagtttccctaccgattggcagatatcgcgtgatgaatgtctgtctctgaaaggaaatacttactttattgcttataaaaaaatggaagtggaagaagtagggtttcaagaatttttactctgttttgattttacaaatgagagatttggaccgcttctccctcttccattccaatgttataatcaaacttctctagttctatctactgttcaagaagagcagcttgcagtgttatgtaagaggtgtgatgcatatgagacgaagatatggattacaacaaagattgagcccaatgcagtgtcgtggagctacttcttaaaatttgatttcaaggttgatatatctggtggcagtttcttcgttgacgtggaagagaaagtagcagtgcttttttgtataaacagagaaaaagaaaaaggcatcaacaacaagacatacatgattggagaggatggatactacaaagaagtggatctcggagaatctaactggtgtccatctatgtgctcttatgttccaagttgtgtgcaagtctgagtaatgtcgagtattaaatctaccagaatgttatttgtttcttgcattttcttttcattcatttactctttttggcttttcattcttataaattactgatttaattagttgatgagacaaaaacttgattctcgaaataattgtttcttgttggcatttattggtagccacattgcttagaagagtccttcaaattcccaataaccttttgttactttcttcttagtcaattcttttaaaaaagacagacaattcatatgatggaggtgtcctaagacaaagagagggtgtcacgttacaaaaaaaaggatcgcttttgcggcgactcatttaatgatttaaactcagtcgatatctattttgtagtcgctgccaaccaagtgccgaacagggtcatatgtcaaataacatagtctcttagctcttacaaaaagactgctgaaaactatattagcctcctaagtgaaacatagcaagtgttgaattaaataagaaaaacaaatgttgtgcctgctctgtcttggaacagagcaaaaaatgcttctcgtttcagttccagaaaatttcttagcttaaagaaaaaactcaatcgagaatcccattactaattttaattcagtagcaacaacagcttttttcatgatatttattaaaaagtggaacgttttatctaaggaaccaagctttacaaagaagcattgtggtaaagcatctggtgatcatgttgaatgattttagggcttgtttaatgagcgtcaacctccatggaatccatgaccacaaagacttggtagatccatctataaaagagtatgtaattcatttgttaacgaacgtctttcactgcgatggcttgttgctatgcgtcactaaggacagcactagcctcgaggtggatcaaaccaagaagtagttaccacagactagaaaggtatgctcttggatacgacaacaaccgtaaccacaaaatatcgaggtatttatttattacgatcacaatgttgcgcaacgagttcttaagtacgaaatcttcgatcttaagtgtaacatatgaacggttcttgatgtcactcctggtactggtatatactaaactatagttttcggggcgtgtccgtgaagggtaacaattactttgttgctcaggaaagattggaaggagtgatgacaaatgtttcactttgctttgatttttacaaacgagagttttggaccgaacatgcatctgccgtttgaatcttatcctgacgatgctgtgactctatcttctgttagagaagaaaagcgtgtagtgttatttaagaggtcgaatgcatgtgagatggagatatggattacaactaagattgacccaacgcggtgtcgtggagctacttcttgaaactggataggtcagtgttcaatgaaagattgaggaatatagatgtgagcttattcgtggacgagaagaagaaagtagcattggttttctgtaaagacagagaagattggaccaacttcacagcttatatgattggaaaggatggatactacaaagaagtgtatctcggagaatctactacatcttggccatttgtgtactcttatattccaagtaggcccggtctctacaaggatggttttttgtttagtttcttgcatctcttttttaattcatatattaactctttggattttcttgtttagtagtcagtcatttagaacaaacatgcattacatttagattctaaagatttgccttcatttggatccgcctttatgataagcactaacctcaaatattgcaagggtataaaattttctctgtttgaagttaaatgcctcaaagcacaaaagaccttgtgatgaattgtcgatgacagacaaagagactttcttgattaactagtcttctttaggatccaagaagaataacagattttctcctgtctgttattgtatatagttcgtgtgtaagaattgcttatctgatcacggaaacagtaccctagctagttacgtttatctctgttgcaaactttttaaatgtttagtggtgaactaattttgaaaaattcaaatgaaaagggttgtttttgttgtgggctttcatttagtggcctaattctaagaagataccttgaaatggtcggtgctggtttcattctattccattaatatgatggttcctgctacatgcacaacattttagtaacccaccattcttttcttcacattctggaaaataatgcagaaactgagattggtgctctggtccttagccatggcaaatataagctaatgtgagtttcttcatcgaccaaagagtagaaaatcgctgtggtctttcataagaacgaatataaaaaaaacatgttaacctcctccaaatgcatcacagcttataatttttgttatcacttagtcacattaatacattatcatactttaaaaattttggataacagcacatcgacaagctagtttagtagaaatcacaaagcataatttcaactctgcaaagttctgattttaaaattcgtaaattttttacagttttaataccgagagcttatcatataaagtcatggctcattattaatgtcgttattttcggatttctctttaattggctaaaaagcaaataaattaggtaatttaaattcagcttaattagccaatgaaaacagagttaatgcaaaagttcatcaaacctccgaaaaagcgaaaattaaaaaagatgagctcatcagaataccccaaatccagaaaccccaccctttcttcaattctcacatctctctctcttcgctctgaagcaaagacaaatatgcaaaatcctctctgaacaaaattcactttggatttgcagaatttatttgctctaagttagagtgaggagaagcaactgccaaatctctgtaatgcactgtgaagatctcgaagaacaacaagacgaagaagaagacgaagcagcgagacatttctcgtagataatggtggctgcgattcctcaaggagcagcaatttccaacaccgactctaagaatcctccacctcgagatcggcaagacaaacctcagctcacagctaacaatggcggactacaacgaagacctagagctgctaaaaatgtcccctcacgctacttatccccttctccttcacattccacgacgacgacgacgaccactgctacatctacttcgacttcgtcttcttcgtctgtgatactgaggtctagtaagcgatatccttcccctttgctctctcgcacgacgaattctgcttctaatttggtttatacgccttcctcgttacctaaacggtctcaatcggtggaccgtcgtcgtccgtcggcagtttctgacacccgaacggaaatgtcggcggcgacgaagatgcttatcacttctacgaggagtttatctgtttcctttcaaggagaggcgttttcgtttccgattagtaagaagaaggagactgccacgccggtttctcaccggaaatgtactccggagcggcggagagcgacacctgttcgagatcagcgggagaattcaaagccggtggatcagcaactgtggcctggtgcttctcggaggggaagttctgaatctgttgtgccgaattcgctttctagaagcgtggattctgacagtgatgatgggaggaagcttggatctggctttgtgggaaggtcaatgttgcagcattcgcagagttctagggtttctggtgatgggagattgaatttaggttttgtaggaggtgatggaatgttggaaatgagagatgagaacaaggcaagacaaagcacacatccaagattggcttctagcgtttcgtgtgactttactgcatctgatactgatagtgtttcatctggtagtactaatggtgcgcatgaatgtggttctggtgaggtttctaaaacaaggagcttgccgcgtaatggtatggcttctactaaattctggcaagagactaatagcaggttaaggcggatgcaggatcctggctcacctcaatgttctagcccaagttcgagaatcagtagtatctcatcaaagttcagtcaatcgaaacggttctctagtgatagtccgttgacatcatctcctcgtggtatgacttctccaataaggggtgctactcgccctgcttcaccaagtaagctttgggcaacagctacatcagctccagctaggacatcatctagtccttctcgagtgagaaatggagtttctgaacaaatgaatgcttataaccgcaccttgccttcaattctttgtttctctgctgatattaggaggggtaaaattggggaggatcgtgttatggatgcccacttgttgaggcttctgtataaccgtgatctgcagtggcggtttgccaatgcgagggcagactccactctcatggtacaaagactgagtgcagaggtatcctttcttttagattaccgcattaatgcttaataattgagtttatgattgtgtcatgtgtgtgcctgctgattgtaattgtctttagttagccactgcagcagacttaggaaaatcattattggtattttacttttagccactgatgcaatgcaaatgcttaagcctctaaagtacgcatttctttcgtgataatgctagaaacacgatttgtattttaccaacagggaagacttattaatacttctctggtaagaggagatctgatgctaagcctcttggacctagaatagtgtttaatttagtttctacgttttggattgtgctgcatgctaacttttgcctgatgctgatgtgatgacatagatgaaaatatgaatggagtaagcattaacacagttatgaagtctagatatcgttatgataggatactcttttagaaagttgagttattgattttgtccaataaactagacacattctggtgaactcattttttcttttcttgacagaaaatcctgtggaatgcatgggtatcaatctcggaattgcgccattctgtcactctgaaacggatcaagttgctcttgatgaggcagaaactgaaactagcttccatcttgaaggagcaggtgagaatatgaacttctagcaacttcataattttaattctttgaacaagaaactttttcatgtttatattcttagcttaaatttagtggcaccattcaagttttgagactaaacaagtatcttcaggaatgtggcttagtatttctaaaaaaacttcttgttataatggaaaagtaaattgaatacaattaagtactgccaaatgataactgcaccgttacgatcttacaagtgaatgtggtacatttttcttagttctgcttctgtggaagttattatcttgattgcttaaaatcatcatctcatggcattctgaatcttagacaaggaagcacgttaagaaacatgaaagcatatttatttcaaaattcaaaagtttttttaattgctgacattcacttgtaaaaaagagagattatgacatattcatagaaaaaaaaatgacattcatagaaatgttttttaaaatgttgtaacctttttgagactgacgaaataattgtatttgggaattgtagatgtgttatctagaagaatggtctcttttggacagaaatcactcaaattctttgtcaggagcaactgaagccttgaaagccagcacacttcgtcttccagttagtggtaaagccgtggtgagtgcttcttcgcctgaccgtgatatgtttgttttgtcttattttgtatccttaagtagtgaacattagattcttttttctgaatgcgtttaaatgatttttgtgttgttaggttgatattcaagatctcaagcatgctgttagttcagcggttgatgtcatgcacgctatggtgtcttcaatattctcacttacatcgaaggtaaataccttgtctcggtgattataacgtgaatgttgactaaggaagcttatcctctcattgctcttctgtgccatttctgttttgcgtcggagaatagaatattagaatgcaatatatagctacgacgtactgcagaagtatctccatgaccatgataatacagaaaggcatacaaatacttgtctccttgccacctttgtcatagtggttattgtaagatagaaagttgaaactcagagttttagttgctggtacaaagccggttttagctctgttcagagaacccggttgtctgacaatgtacttgtctagatttgtttctatatgaattgcttgtgttttctgaaccatactttgaatcctcttatctgggtgcattttgtttttctgtcattggtaggtggaggaaatgaattcagtaatggcagaaatggtgaatatcactggaaaagaagaggttttgctcgaacagtgtcaaggattcttaacaagagtagcagcaatgcaggtttgaatgctctctctgctttctgcttttgccttttcctcctgctcagcttttataagcaaaagcatgcctcttgctaggttacggactgcagcatgaagacgcacataatacaacttagccggctataaaccaacctgacttcacaactgtagaaactgatctcctctgcgtttacacgactactcacgccacttcacaacctgaatggtttctaacaacgttttacattcccacggccttctctcggaatctcaaaaccgcctttatcgttttcaaccggatcaaggtgtgctgtctcgagatatctgtttcactgcactccggattcaacgttttttaaatgtaagttcctgcattggagaattacagaagaaaggtgaaagaatagaatgtggtgtttagttttacctatgaatttagtttaattgtatacagaaaaagcttctaaatagatcattgacttttgttctcaaatgaagaaaaaaaatgtacataatgaagatatcaatctctcttatttagagttggatttcttgctgtttcttatttcccatgtgtcgcgttccttccttttgtgtgtacacttcttgtcgtttttatgtgcccgcatcaatgcgtctttagtacgtgattgtgtcattgtgtgctaaaagaataagacaagtgacgtcattctttttatttgtttttaagtacacaaccaacagagacacaaagacttggtgaccaaggatcgattctttttttaataaaagaaaataagaacaaaaaataatgtttggataagattataattggcaacacgccaagaacatcacagtttatatgcaaaacgacacgaatggaatggattcaattgataatattgtttagtactcctgaaaatcttgatcaatatgaagtctaaaatcactacctcctagcctttttatacttgtcatacacgtaaattcttaactctagctctcttttattccatttttgggttcactagtatttacaaattatttattatttccagattaattattatttcaatcaaacaaaaatagtatagtagtgttcttttggtgtaagatatctcagcaccgccaaaccaaaatagcaatcactttatacttaattagaatatgctttttggtgaaaattaagtaatgttggagaacatagacttcaacgaaaacctatgtggttcttttacatttgcgacgcgtattaataatgacctatacttaataacgtgttttgttcctgattagtaagattaggtagaaccgtacacgagccaatacactttctagttttctggtttagtcttctttcctcttgatcatttcttttaacaaagcaaaacagaaaacgaatatatgtttggtacactatcaattaattagagtgataacttgaaaaaaacaattaacttcctaaaatcaaactaacaacgctacactaaataaattagatggtagaagttaggctctaattaatgtttttaagcacaaacctaagaaccaatacccaggttcgtggtcacatctgtattaatgattcgatataatcaatttctaacaaaattaagtaatgatgcatgcattgttgctaacaagcatgtgcaattaatttatgatttaatacgaataaagaaaagaagctaaggctatacactatagttttagtggccaataaccatatcggaaggtatgacaaagaatataaaaacagttttctgaaaattgtaaattgttatttatggaccagattaaataatacatgtgctaaatactaatgaaggcaacgaatcccacatggaaggattctcgtttccccaactatttctgctctgtgttcccacacataatgccacgcaatatttatacagagtggactgatcaagagattagttaccaaaataaataagaaattctgacttaatcaatcatcaaatttttgtatcaacccctaacaatataccaatattcaatccaaatcagaacaattaaaaatttgtaactaaaaaaatgaaaatgaaactatggttgtaacgaaaaaaatcacacaagaattaatagtcgagtattagatttttaaagataaatcttctttcttgatgacttggtcgtgatcggtcaacaaaagcggttttttaccggtcaacggactcaagatctcttcgtcgacgattggattgtgatgaaggctgagttcaggtaacgccggtaggtttagatcgatgaatccacggtggctcctttcttccgataccgtgctcgacacgcttccactgtgactgattgatttgcttcctcctcctcctccgccgccgaggttgccttcgtagtgacaacgtttgtgaccgcctaaagcttgacccgtcggaaacactttatgacagattgaacactcgtggatctttccggaggcagcaatcggatgtttttctccggcgacgatggagatggtcggagctgttgaatcatcggcggttgttgagattacggttggtggtttgattcggtgacttgctttgtgaccgcctaaagcctgataggaaggaaacgctttttcacagacgttacacttgtacggaaggttctttgattctggcggcggcgttaacgattgcgactgttgatgaaatcgcgtttgcgacggttgatctttagcgagcatgaggagacaaagagcgagatactcttcttccgtaagatcttgattctgggatttgggtcgagatcgaggcggtgaggaagaagacgaagaagggctgtgagaacgctgacgtttggagcgtttgcgtttaagccacggctcaatgaaaacggcgtcgttcatcaaatcttctttcgtttcgattctggtgaaagaagaagttggagtgttcatcgcttcgagggccatgatcagatgaatcttcttctaactgttggatcaaaggatcagaaatttgagagaaaagttgagagtttttaatcgcgaatatggtgagagatagagagaaggaaattagagagtgaagtgcttaagaaatgttttggacttgttgtttttatatggaaaccacgtggcagatgtgtttttaagtcggtcaaatttttatcttctttttttttgtcaatatactctctataagaaacctaacactatagtgtaaacatggaagaaaatttcacaatgtttaaattggattatagtatcaacaaatatgattttattagtattcttattttaaagcattttttgataatatattatctatagcatatttagctttagatatgtgtcagatatatatctgatagaaaattattttagacttatcaaatcatatatattttgttatctaattttgagagatttatggaaataatcacttaaaagtaagtaccaaaccagcaatggtaaaccaaatttgaccaaaaggaataaagagaaatttactgtaaaataccgggttgtttttggtcacggctgacctaataagttttggtcatcaaagagtgagagaccggttcaaagtcaataaccagaaaagtaacaaattggtaaacccgcaaatagattttagcttatattaaacaattaaaaaaagaagcatacctttcccgtggagctgacttatgtgttagctacgcgccacgagtcgtgtgggtcacgccttaaaccaaacgcgtacacgcctaattacgtttttttttggtactaatcttcttgaagatttatcaaattttctagatttttttaaatttattatctcttatcatgaatcatgatcttatcttaattatttattaatcactcttcccatgctaatctatagcaaataaatcgataagattcgtttaataaaacacctggattctacccgaaaaatacgtagggaataaattaacggaaagaaacaaatcggaatttttgttttcagaaaagaaaaaaagaatgttgagctaacttcagtggagttgagtgtaggtgaggtaaaaattgggtgaggcatggcgtaccgtattagtaactaaaacggggcgtgattataggacacgtgggagttccgttaccacttgtaaggcccatgtcacttttgttgttatacccaacaagcaaaaaaagtggacgtaatttatccaaacgcgttggcggagacgtcacgtggcaatttatacacgtgtcacttcgattgcgcagacaacatcttctcaggaaacgcagttttagacgttttctctcattcagattctatactcttcttacctttttgggcttgcaaggttctgtataatatgggctttattagcccaatcatctcgaaatatgtaagtccgtatcagacatctaacggcccatcttcgttgaactcgtgttttacatgattcattttggatcattgaagtttcgaccatttcgctaattcgaattcaaataaaataaaattagtttttctgtttggatatgtagagtagatctaatcgacccttgtacttctgcaatttgaattcaaaatttaaaccactctacttttgaatctctctctcactaaacctagaaagtagaaaaccctagcatttgtgatcttcaacgggaaaaatgacgactgtgactccgtccgccggtcgtgagctctcgaatccgccgtccgacggcatttctaatctccgattttctaataacagtgatcatctcctcgtttcttcatgggataaggttagtgaaacacctcatttgctctttgactgatttgattcgagtcctctctttccttcatctgaagtttttttttctgttgttctgcgtttgttgaatctaagcgtgtgagattgtatgatgtgagcaccaattcgttgaaaggagagttcttacatggcggagcagtactcgattgctgttttcacgatgacttctccggcttcagtgttggcgctgattacaaagtccgacggtattgtctctcttttctctcagtcatgtgaagagactgttggcataataatgtttcccctcaggctaatttaacattggctgctcagaagttgttgattttactgcgattttttcttcatattttgtcactgtgacggctatggaatctttctacatttagcaaatgccttgaatccgttgtataatttccttaatttataaggtttcatctggttatactgcaggattgtattcaatgtcggcaaagaggacattttggggacacatgacaaagcagtgcgatgtgttgagtattcttacgctgcgggtaggtagagtggtactctttatgctagtttgaacttcaacactgacgatttctggtgcttttaagttctagaaaactcatagctaaccagtttttgttatatgactctgatgatggatgatttaataccttagctgtcttggacagtgaactttgttccctaatcttttgtaatgtaactatatctggaactcagatattttgatttcagcattttgtttttttacacattatgtttattttgtgatgttacaggacaagtgatcactggatcttgggataaaacagttaaatgttgggatccaagaggcgctagtgggcctgaacgcacccaagtgggaacatatttgcaaccagaacgtgtttactctatgtctcttgttggacatcgtttggtagtggctacagcaggaaggcatgtaaacatctatgatctcagaaatatgtctcagcctgagcaaagaagggagtcttcactgaaataccagacgagatgtgtgcgttgttatcctaatggaacaggttagatgactgacatattgtttctgtccttgctaattttttcttccaattccaaagtatactctcagttcctcttcttccataccaatgaatttcggaaattgaaaatttacaggctatgctcttagctctgttgaaggaagggttgcaatggagttttttgatctgtcagaggctgctcaagctaaaaagtatattccttgtgttcttcttttctcttttccatgactttgactgacaaatgtatttgaacttattctcagatatgctttcaaatgtcatcggaaatcagaggctggaagggacattgtttaccctgtaaattccattgccttccatccaatgtgagttcttgtcttagaaggagcccaactgtttcatagatttctatatttactactttttcaaaacacaagaaggttaagataatactccaactaaataagaaagtaggaaaaatattttcgtgtaaagttgttcagcccttgtctgctgattgatatgttaaagatgaaattctaatgatgaagagaacaaatcgacttggaaagctgcttggatgcttggtctgagaacttatgggatataagagcaaatgaactaatgctaatatgctgtgtctgtaaacagtttctgtaattagacaatatgttagcttatgctttgtctgagaactaatgggaaaaatacaatgctgagaaatatctcctgtatagctactttcctgtgtaatcatctgagatttttaattgcagctatggcacctttgcaactggaggctgtgatggtttcgtcaacatttgggatggtaacaacaagaagaggctatatcaggttagtaatgagcaagatcttttggttattattctttcaatgttagtgtggcacaaaatttatttgcctccttgttccttttgtagtactcaaagtatccaacgagtatctcggcactgtcattcagtcgagatggtcagctgctggctgttgcttcaagttacacatttgaagagggagagaaatcgtaagtaacttgttccctttctaatcctttgaagttttagaatagtatgtctttgaaatctctgatgatttgtgcattggtttgattggttgcttattgagataacatagcagagagtaaccctgtgccttaatcttacagagattatcacaaacaaattaatgctttaaaggcaccctttttgtctttgtcacaaaaccgcacacttaaggatagtaatctctttgtatttggtttcaagttagaattctctttgattgggtctctgtgtgagaggttttgcaggcaagaaccggaggccatctttgtaagaagcgtgaatgaaatcgaagtgaaaccaaaaccgaaagtatacccgaatcctgcggcgtagaaaggaagaaacacaagttatttcctatgttggttgtttttgtatttgctaggagtgttccaaagattgaatcaacgtatgtttgagcttttaaataactagtgaaatatccacattcaccgtatatgtttaaatttctgtagtcaaactctcttgtcaaacatataatataagatgacaaatttccagtgtttaaaagatagaaagagatcattctacagattctacgttgagttcaaagtctatttcttgaagcagcgacctaacgtccttcgactccaattcttcctcgactctgaagaatctttggtgaacttccttgagtagtttcaaaacattcgccaatccaccttcgctttcactctcgtctgtcttctcctcagagtaaggcattgagtcttggcctttgagtctgaaatagctgtacttgcttatatccactaggttactcttgtgatcaggccaaacgttacgcgtatcatccacaatcaccaccccacgctcctcagccaaaacgaaatcaagtgtcttcatatgaggactctcggtttttgttatcactctatctccaaaataaagtttctttggatcaatcagctccaagacttgtttagcgtatacacgactacccttagtgtaaacatacatggtgaaaaactcgttggcttctttcaagaagtcgcgaagaaaaggtcgtagctttgtcaaaaattccatgggatctcctacggctttgatcttccataaatcatcccttgttgctgaacccgcttcttcgattagatacttctctgcttgggagagacttggaaccataacagtatggagaagcgtgtggtccaagtcaagtacaaggtgaagcttcttctcgttgagacaagataatttcgttgtaaagcacttggttaacgccacagcttcgtggcttagttgtaaaccgtcgaaaatataatcgaatgctcggccttggctttttttcacagtcgatttgcagccgatgcagattccgtgacagatgtaccagtgaccacaactactagaagaggataacgatgaagaggactcgttgatcgttggttcgatctttcgtcttttggcttttggttccgaagaaaaattctcaactacagacatggttagtcttattgataaacaaataactaatttgataagaaagctagacagaggaagagagagagattagtgtttgtctgtttgaggttaaacaggaactcgtgatttcttacgcctagtctcgtatttatagggacagagaccgtcatagattaaggaaatcctaaacctaacctgactttgttctggtaattgaccattatgccctcatacttgccacgtttgcctttttcgagagccctttgttatcttagtattttctgataattgactattataccattattttatgcactttctactgatttagagcatcattatcatgggtatataataaaaatctcttaagagataaaaatactaatattttaattctacagttaaataaaccaataactggattataaagtgtctcttagtttgttattatgtctcttagctaagagattttttcgtttctctttcttctttctcttaagttttaattatttttctttttttttttaattgttaagaatcaattaagaaactactgataaggttggttttaggttctcactttaaaaaccaattgtgaatttagaacgagggggtattggataattgaatttaaaagaattaaaatgaatagaaaagtaaaagattttaaagtatttgacaaattctatccaaatcacaccataatagctgggatttgtttcttcacgtttttgtctttgatttcttttaaattctaatcaaatcacattgctaataaaacaattttaatgttgaataacagtagaatttaaaagaattctaaaatcaataaattgaataacagtagagtttaatagaattctaaaaccaatcaattgaataacactagattaaatagaattctaaattctttcatattcaatcaaaatcctaccttcaataacccccctaatgtattttttgaaaataaaagtttctttatgaagaataaattaaattaataaatttagataaattagatgagtcaaatatgagctgtcaaaacaattataaatttttagtagactattttagctaaattggtggaatgaatattttgtacctttcccccacaaaattgaagtgaaactcaaagcatatcattatcctgaggcatagaaaggaagattcacaagtgatttcctgtgttgtattttgtatttgaaccaaagattgaatcaattcaacgtatgtatgtctttgaagccaaaatatctctgcaaacaaatttgtaatgaaccaatagacaaacttccaatgcgaacaaagttctatatacttaaagagatcattttacacataaatcgtcggcgaacaaattctatatcttttagcagcaacctaacgtcctgtgactcaacctcttcctcaaccttgaagaatttatggtgaattcccttgagtaatttcaaaacattggccaatccaccgttgttctcactctcgtctgttttttcctcagagtgaggctttaacacccggctttgggatctgaaatagttgtacctgccaatcaacactaggttactcttgttattaggccaagctttacgtgtatcatccacaatcaccactccacgttcatcagccaaaaccatatcaagtgtcttcgtatgaggactctcatttcttgttatcactctatgtccaaaatagagtttcttcggatcaatcagcttcaaaatggcttcagcgtaagggcgagtaccctttgtgtaaacatacattgtgaacatctcgttggcttctttcaagaattcgcaaagaaatggccgtagttttaccaagtgttctatggttatggatatgggatctcctctgactttcattttccatagatcttcccttgttgttgaaccagcttcttcgattagatacttctctgcttcggagagacatggaaccctaacggagtggataagcgtaaggtccaagtcaaggacaaggtgaagcttcttcatgttgagacaagagaatttcgttatgagacgcttcgttaacgctaaagcctcgctgcttagatgtaaaccgtcgaatactcggccttcgatagttttgtccaccgttgatttgcatacgatgcagaatccgtaacgaatgtaccagtgtccacagttattaggagacaacaatggaaatgagggttccatgatctccggttctttcttctgccttttggattctcgttccggagaaagatttttggctacaaacatgatttctctgatctatgaaatgaaccgtttaggatgagaatcttagagaactgatcagagatttgggagctaattcacacacacacacatatacacaaaaacgtaatttgatcagaaacctggtcagaggagagagtgaataagaactcgagatctcacctttttgatatcactcaagatctcacttttctcgtatttaattactaggttattaacaaaaaattaaatcctaaatctttgcttctcaagtaagataataacagaagtttgttatttttttaaaaaagtttgttattattttgtgaataaaaaaataaaaaatgtaaaattattttgcgaacaaccttccaaatatatctcgtttgaatacacctccaatacacaatttatataaatgtattttgataagatattataatttataaatttttaatcaatgaccataaacgttacgttactaaaaccaacagatttttattttttttaccccttcttataaagctaacagattaaacataaaaagatactacaaaatcctgacgtaaatttccgtatgaaaaatatttcttctactctcctcatttcagtttggttcgatacagttaaactgatcatccactaaaccgaacccatataaatttcactgaaaaattccagttccttctcgcttaaccggaaaccctaatctcatgagtcatgacctcatgaccaaaacgaatattgtctttcagaacaaaaagaagagaaacactaaagtgacattgtcttttggaacaagtgttgttcgtgttgttgttgttgatgatgagacatgagactggtacttcgttgatgacttaacaaagaagttgtctcaacatgtttcaaaagaatcctataaatcttgttcctcactctaccacaagcctctgtttcagactctgacatcatcatcatcaccatcttttcttcctcatcttcttctcctttaacaatggtgtctaaccaatcactcactcgctttatctgatacattgtttcccctacttcttcactcctcatctctctccactttgttccattgctgatctcatctaaatacttctcaacacggtttaggtaccaacttcttccttcttccttaagccagtttctgagttcgctcgatgctctgcttaacctctcctttatctctcccaatcttgagttgctttcgcttgcgttaccttcacggttatcactttcttgagcaattagggtaagaccctttctcccggggctctgtgtaggcttgcttgcggataaagaaaccagtttgagatcggtagccaatgctgatttgatccactgagtcgccttttcgcgtctctcatctcctgttttgactatgtttgcgttgcagtgctctgttttttcagttgatagtgattgaatgatgagcctgctcttgcttaactcatcctggaaactcaagaaatcttggattggtggctgttgattttcttgatgttggtttctcctgtctgaaagctcagagtatgacctattatatcatttcagtgagaaacattgcttgagcaagaaggtacaactagttttgtctcaattaaaggaatgtaccttagacatttgagcaatctttcagcagctgaagcctctaacaaagcttgtgaggcagctctaatagccgtatctctctgtctcagaatttcctgccaaattcgcaaggaagctctctttagaaccaataaaaacccgtttttatgattgatcaaaatctatcagtattattacctttccgagatttacaacttttggaggaagtgaatcccagagaatctctgtctctgtccagcttcgtttccttgatatcggatctgaggattcaaaggtattgcttttaggtggaagaaggtttttactcttattacttctacttccatagcttaagcttttagaccatcttggagatggtgaaaccacaacatctcttcttcttgttctactacttgacttctcctctatccctccatagcttcggatagaaagagaaggtgaagtctgaaaagatatcgaaaagaaacagatgtcagataatctcgcgtgcaggagatgttcttacgaaaagttatttctttaaaacttacagcagaagaacttcgagctcttgaaacatgtttagtgtcatgatcatgattcttaatcatggatggatctaatgaatctcttctcttcctattatcagccgagcctatccagcttctcctcctagctgctgaagaaaaagacgaagagcaacttgaaatcattgactctgtatcatccttttcttccataacactcgaaagatttttcgataaccctaaatctgtaaagtttaactcagagacgcttgagttattccatctagttcttcttggcttcttcacttggtgatcgtagttttcttcgatatccgatagaccgacacagaacttttcgatccgttctttagggattagatcgattggatcaccggtgcaagcccttcggccaggtgttggtctaatgcctttgatcatgggaactggataagcaaattcaagcttctcgacgaatatcaattgcccgatttgtaacttgtcgtagagaacaagatcgttctcttctcgtggcaatgagacatatattgaatgtgtcgaatctgttatcctcaagaagaaacctttgtttggccataaccctccagctgctaacacagggattatgcatcttatttgcagcaaaacgggtctgtgatcgacgtctcttcgcactttcccgactcccatttcttctagaagcttgaaaagaacacctgatcttaattctgccatttcaagaagcaatgcttgtaaatgtatcagatgaaacacagagagaaacgaacagagaaggctacgtttctcaatctgttgcatacagacaagaacaagattggtggagtctaatgtgtttatgtttaagttctttttagaatgaagttaagggttttttgggaaatccttcattctttttctatgatcaaaaagacctaacgtggatctttctttcttaaccgccaagtaatcaacagatcattcttctgtgtcctctgtttattagccatttcgttattttgacagttctcttttactattcttggtcattcttgttaattgtgtcagttcaaccaaaaatacaatttgactattgtatttgaccaatatagtaaatgaaaaaaaaaaaaaaattaatttcattgatatcaaacttattacaaattgatcaatacacagaaaatgaaacgtataattttttctatcttacatataattaacgagtttacgcaagctaagtctttgttgctattttctgagaagaagaatctttattcacaaattcttgaccaaaacctgatgatctctgatcaaacttatccattataacatgtggattatagtctgatctagttcgacggtgagaagatccctgcattgaagaagagccgtcttgtcccatcattaaaggtcgatagcttcggctcgatcccacagatatcgatcgatacctctgatgatcaggcttgtggtctttcttgatagcatgaatcagatatggaattaacccctccattaaaattctatgtttctgtaatacaaagaaaatcttatggaaacccaatatttatattatgtggcataaaggagaaaacaaatttgtctttgtattaatttgactactataggttcaaatatttggataactattgaccctgtttgtttgtgctattataccaaatttttatttaggttttggtcataattgatgatagcattacagtattgacttttgacaataacaactttagtagaatctatggctttgtttttttcagatagcaaccgttgaatctccggccaatctaacgttgaggtgatgatagatttgttgatcactgttggatccaataacaagcttgtggtgtccggtgactagttttcttttcccgtgagtatccacaaggctaagtgctttgcagacatcaaaatcaacggtaaatttctctgtcatgcttctcccaacttctactctctcaaaccctaccagttgcgtcagtggcacgccaccacccaccagagactttgaacactttggtggtttccagaacacgagcaccacgtggctaccagaccgtagcccgtggttcttgaccccgataactatccggatcttgagatcgtggcaatttactgtggagatatccacagaggttgtcttgtttaggttcatgattggattggttttgatgtgtatgatcgatggagctgagagaacaaaagtcgagaaagaagagtagctaagcccgtatccgaatttgtaaatcggtttccctgtgtagaatctgtaagatcttccagggaaaccagaggttgagttaggtctcatgttcatatctgtcattgcaaccttatccgcaaactcttgtgggtaccatgtctctggtagtctcccagctgatgcaacaacaaacacaaataagtaagtaatagtgtctagggtttaattagggtttagggttcatgaagtaagaggcttacaaggattgtagtcaccaaagatgacttgagctatagcgtctcctccagcttcaccaggatatccgacccataaaacagcccgaatcgtgctcagattcttggcgaatgagatatctataggtccggctgacattatgaccaaaacaacagttttctttgcagcatttgccacatctctcaccagcttttcttgataacccggaagggttaggttaacacggtcaagaccctctgcctctaccgtctgatccaatccaaccaccaaaaccgtcacatcagcctctgaaaccgccttgaccgctgctgaaatcagtgtttggtcaccacatttgacatctttacaccctggctcgtaaacaattttttccggtacatacttttgcagcccttgtatagggcttgtgtacttacagggtacacctgcgtagttactaatcatgacctttgtagcgtttgcatttggccctataaccgcaagtttcttaaccgtggtcttcggtaacggaagatctcctctgttctcaagcagaacaatcccctgttttgcggcttctaacgcaagcatttgatgatccttgctgcaaacatcagacggaccaagattaccaaaaggaagcgactttggatctccatcgaagaatccgagcctcatgagaacaatgtagttgtaaatcagcgcttcatcaacatctgatccgttcagtttcttaagcttcactgcattctctgtgtacttacctagaaaatctccacagttcatgttcaaacctgtttccagacaaaacaacatattttacttctcaaagatcaaaatgacatatctaatgtaataattgttttgagatgatcatctaaagatttttgcctgctttgagggcgagagcaactgcatcttcacgtgtcttggtgtaatgaatgtcgttgaaatagacctggatggaatcacaatccgaaactatgtacccgtcaagacgccattggccacggataactccacgaagaagattagggtctgcacaagttgggataccattaactctgttgtaagaacacattacgctgctcacatctccttcctctacacaactcttgaatggcgtctgatacgtgtcttccaagtcttgcttcgttaccttcccaccaaaacaataacaaatccatcaacattaaggtcaattataaggtcttgaaacttacgtatttatatattaccttggcatcaaagtggaatctatcgatgcctttccagttatcaagatcataagctgtgtaatgcttgcaacagcttgaaacctttagccgccgtgatttaccggcgtcgtgaacgtcttgtaagcccttaacgtagttcacagcgtacttcgaaacaacgagaggatcctctcctggtgtctcttggcctcgaccccatctcggatctctgaagacgttaacgttgggactccaataggtgagtccagctagtcctacgttgtgcatcgctcgagcctccgtcgataccacttctcccatttttagccacaacgatgtgttaaagctagccgccgttaatattgtcgccgggaaactcgtcgctccaggcaccgtcccgttgaaatgcaccttaagaaacaactcaaaacgttagcgttttcattacataacaactcatgtatgttcgtattcatctatatacagtaatgatgtttttacccctggtccaacgtcggagacgccatggagagcttccgaccaccactcgtacggcggaacaccgagccttggaactcctgtggctttgtttacgagttgctggactttttccttaagggagagacgtgagaccaaatctttggcacgtgcttcatacgacaatgagacgttgcagaaaccatacttagccgtcgctggggcacttatgtcacacgcaaagttcttttgagactcgcaaagtgatgaaactagagctatgattagcagagagagacgcacaaatcttctaatactcatctctctgttttttttactcttatggaatagaagacagagtgaggagctagttttataggcgggaagagaagctaattagctactatttacttcattaaaattaaagtttaacatttacttccaactttaacgatgacataacatcacttgttggtgaatattttataagagaagttaaacctccatgtgatagtgtggaaggaccaaggaccatctctgtttgtcttgcatataagagtgagccaagtgttttccacaaagtgatgagaggacaaaatgtgaagtttaagaaaagggttttgaagagtggcttcaaagatactacacaaccattccaaatgtctgtttcatgtctctggtcctaaagttagagaagcagatcttctatgtctctaagttccacagttccaggagtctttttgatgtctggttggttcaccactagctgaccgcaagcgccgctaatatcctgacccatttctttgcgaattgtagtccggatcttgtatgtttccctcaggattttctggaatcttgacacgccttgtatgctgcttgtttcgaattggcttgtggatccaattggattaaatggtatcaaatttatgacctgttcaagaaaagagcacagagtttccataaaaaatatcatcagataattgcagaacctttaagagtattaagacatcgaagatttaccacttgaaatgtctttagcaattcgcctagtagatgagcgtgctgctcttgatcatttactccatcaagcattatgtactcaatgaagatcttttgttgactgttaaatccaatgacaatgtggcataatgttataatcgtcaatgtaactgaagggattgtggttttaatatttaacagcaacgaaccagtcaagagtacatgaactacctgttcttttggaaagtttgaagtgcatccataagcttttgtaaaggaaaggctctagctgctggcatgatctggcagcggatttcttgaactggtgcatggagggatactgctaaacttacaccgggtagatcattgtgtagcttgttaattgcgtgaacaattccgacctatgcaaatgacattaggatacagggaaatttatttgctaactagtaaaaaaaagtgtcaacacaggcagcattgcatgatttagatttatgcctggaatatacggtacaagcattacggaaggacaaggaaatcagaagaaaatcccaaaacaccaaaatttaaaagtaaccaactagacaaaaaaagctgaaagatgtcttggaagctgcatactgcgaggtttaatggattgaagtttatctatcagttccctttatcaaattccataatctaaagtattcctacaaaattcagtgaataagtttctctgttttacgaatgtttcaaggtagctttctgagtacttacagttgatatggtaattcttttgggcgacagctgaaatggttggtttaacatgacacgaacagcttcaacaacagcattgtagttatttaaaggttctcccattccctgatcacaatcatcaaaccaaggcaacaactggtgaataaaattcatcaatgcagagtatataaaataaataaccataaggcaaggtgcacatagtgtagataaaatgcaataacagaagcagaaatataccatgaaaacgatgttgcgtatatcagcaatgcgagaggcgtgaacaagctgctccacaatttctccagatgttaaattgcttttaaatcccatggtaccagtagcacagaatgtgcaacccatcttacaaccaacctattgataaatactttcacatcacatgtctttcattcgataaaaccaagataacattgcgtgataaaaatcaatacctgagatgaaatacataacgtagatcttatacctccaggacgtggtttccctcctaacatccccaaccgagtatcgtatctcattaccacagcttccacaaaagctccattcttcaatttcaaaaccaaaagcaagaatccaatatgagttcgtcaggaaacagagacattacaagtttttcagaatccataaaagcaatgtgttgtatacagtaacagagtatagagtacctggagcttgatgagaagctttgaggtggtgccatcggaggaatgaaatagcgagtgaagagacgaagtaagagtcttgaacttggaatggagaagagagtatgcagcggaaggcaatgaaggaatctcgtcccaaacgcaatcaggattctgaattacatacttccagatttgaatcgcgaatttagggtttattcccgctgattcaaattccgatttgatttccgaagcatcgaacaccgatttcaacttcatcgactcttccttgggaattctccgctcgccgtcgccgattttaaaagccctaaacttttaaagcaaatcccctccgtcacaacaaaaattcaaagaagaagctaaaaccggtttggtttttggtggaaaatctaaacccggtttgattttgatatttgggggaaaagtaaaaaccggtttgtcttaaccgtttttgtcctttgtggtggacgagccggaatataaattccccaattttcacttccaacattcctcagctgctcgatctctctctgatcacaacaatcataagcgatgagaggagctagacccgatgaattcaattttagtacgaatccatcaacgccaaacactggtcagccgacaccgacgtaccccgccggtgttggcggcggcggcggtggaaggaaaaaaggcgttggcgtgaggacgtggttggtacttaactcgtcagggcaatcggagccgaaggaagaagggaaacactccatcatgcggcgaacgggattaccggcgcgtgatcttaggattctcgatccactgttgtcgtatccatctactgttttaggtagagagagagcgattgtcatcaatttggagcatatcaaggcaatcatcactgctcaagaagttttgttgcttaattccaaggatccttcggtctcaccctttattgatgagttgcagaggcggattctctgtcaccatcacgccactaaacctcaggtaattggagaatttagggttttcccactgttcatttggagctctttttgtttattcaaggagttggcttttgtattgtctccttttgtttgtgcctaattgcattgttttggaattgggaagtagaaatattttcgcttgacaatggaatatgtatataatagctaatgtattgttgagacatggttgactatttgatttgtgcaatggtgatgatatgtgaagattatggttgtcagtttagctatggttgactatatactctctttgtatgtgttgtgtaaaggaggagcagaactctgggggagagcctcatacgagggtagatcctgcccaaggagaagctggaacggaacaatcttctggggatcaagggagtgaagccaagaaggatgcgaagcaaagtcttgagaatcaagatggatcgaaggttcttccatttgagtttgttgctctggaagcctgtcttgaagctgcatcaagcagtttggaacatgaggtaaatacttatgttaaggctctgagacaaagcatatttcttctcttgtttggtatttgattcattcttctaatgtaggccttaagattggagttagaggctcatccagccctggacaagcttacttccaagatcagtacccttaatttggagcgggttcgacagattaaaagcaggctggttgcaataactggacgtgttcagaaggtgctatgattcggacattaaaatggctcctttgatattatgataaggatttatcatgtttccttatagatgtgaacctatgacatcaccatattctaaccacgtttgcctatactaataacactttttctctttacatgttctaggtgagggatgagctagaacatctgctagacgatgatgaagatatggctgagatgtatcttacagagaagttagctcagaaacttgaggattcgtcaaattcctctatgaatgagagtgataccttcgaggttgatcttcctcaaggagatgaggatgacaggcatgtatcaactttctgagcttgcagtaccttctattgttctgatataagtttaacatctgcctttttactccaggcttcctcccgaatttgcatcagaggctaacagagatggaaggtatcttcaagcaaatgatgctcacgagcttcttatgagtactcaaagtgcacttagcagaaatagccgtgggactcacacaagctcaacccggagtgccatgaccaacaaattagatgtggaagagcttgaaatgcttttggaagcatatttcgtgcagatcgatggtatactgaacaaactatcaacagtaagtaaatagaccagatgctttggtactctttgtcgtgatgatatccttcttctaatacattgtggtttttgttgttgttatgatgaaaaaagctaagggaatatgtggatgacacggaggactacatcaacataatgctagatgacaagcagaatcatcttctgcagatgggtgtgatgctaacaacagctactctggtgatgagcgcctttatcgcagttgctggtgtatttggtatgaatataaccatagagttgttcacggataataaacatggtccaagtagattcatttggactgtgattggaggttctatcggcagtatatgcctctacgttggtgccatcgggtggtgcaagtacaagcgccttcttgaatgagtcgaccaacaacatattgggagaggagaataatgtcgcattgccacaaatctatttaagctaacaagacttttatgtatatcctttgttcttgaggatctttactactctcaaacctttttttatccgtctccttcactatttgcatttctttcgatttaataaaagagcaaattgcatagtttccttcttgcttatttcgacatcaaaatttagatatagactgattagagaaccggattttataatggtatcgcagatcgtttctgtgcacaattctaacttatggggttttttctgatacttgaagaaatataaggcggaaactgtaatattgaggaaattgacaatttctgacgggaaaattagataaaatgttgcaggcaggcgtgggaagagagaagagcaaagccctaaaatttcttcggtgagagaaacatgtcgacgaggcgagaaagcagagattcagaccctagacgtcaccgttctagaatcgatcgcgaacccaggtcttcttcttctggagattcctgctctatcttcatcttctattataactttgaagcaaataaaattcggttttgaacaacgaggaagctcatagtgtcttttgtctagaaatcgaaatgaaagctgaatttagtgttgaagtgattgttttttgaatcatcctatgttgatctgtctactctaatttggtcacattcactctcgaacagtggagatttttctgaagatggtcaattttactgataggcacaattagttgattttggtagcttatcacagttgtacaactaatcatttatgtttttgtctttagccctaagagatcaagaagagatggcaaacctgaagctgaacgagttctgagtaagaaggatttggatgttagagatggtactgacactgagaaaaactcacgtcagtctttgagagatgctccattggaacttgatgctcatggttcgagaaaagacagtgagaagaagcactctggacatcatgagaccaccaaagcagctccccatctgtcacaagtacctcgttctagaccatattctcaggttccaaaacaaccttgattattttccatctgataacgttctttttgttactgtccttagtagatgtgtggtcataggaggtcttgcaagtttttgatctgctggaatgaaatggctaaaagagttaatatttggccatttatctgcttgttaaaaatcaattgctgggttgctatttactgcatagttagcctttaatctgtgctcatgtgatggaattattgcatacagttgaatgcctcccaatgctcagtcatatgtaatctttggcttgcctgtgcgtgtcttataacagcatgatgatcgtcgtagtgatggaaaagttgatagaagaccaacttctggtaattctcgccaaatttactctttccttctcttcattacataagcaaaaatatatgtctttaataatattggtaggtcttatgaacatattacttgcttttaaatgtttgaagtgagaggatcgtggagaagttcaagagatcagagtaaccgaagagctggagatgatgagaagtcacagcatcgtaaagacgaagacaaaagctcatggcgacatgataggttccgtgagagtgatgacacccaaggagcactctctaggaaacgaccagccttcagggagaagaagattgcagaggaaactgggaacaacacagacagaacaagaactgaggatggaaaagacactaatctaaacaatcgcagacagaacgagaggaactggaggagcaatacgcattcagaaagacatgagagaccagcaatgggaagagacagagtgtggaacagagatgatgaaagaggcgcgggaagcagacagagttatcaagctgatagagacagattcaacggcaatgggcgaagtgggtttagcggaagctggacaaggaatgagaagaaatgggaccatgacttgttcgatgaggcgaacaagagtccagctaaagccaccgaggaagaacagatagctaaagttgaagctttgttggcttcttgaagctgcttatgtcatggtttttggtatgtattcacctctactattagaatgcctgagtttgcaagtgtagaagatgatttctgagtttatacatataatgaaactctcctctttttttccaagaaagctgcatcggtttaaacttcatagatattacactctaaaccggacttttcttggggttacacgatttcacttaaaactccattaaagtaagactgacttgccgacaaaaaaaagtaatatggactcaagaatcaagatcctatcagtaaaagtcaattatactggattttaatataaaaaaaagaaggatccttgtttcatcgatcaatcatatatgtttgatgtttctataatgtttttcttttatttatttccagaaactatacatattatcacaaacatgatctcctgaatcaaaaacaccaaatcactgaacgaagaacaacaaaaaatgatggcaaaatatgagagaaaaaaaagaagaagaagaagtattattagaaaagagttcgtttgccaggacgatcagcgacctttaaggtcttatcgatgagatctctagtcttcttacgacggatggcgactctgacgctggagcttttgtccattttgatgtaagttttcttcttcttccttagcaaactcacctttgactttatcgtctccatcaaactctccaactgtaatcccatcttctccttctccttcttgcttctctaaagaaccctaaataactaagaaagacgattcaatttttgtagttgcagctcctctgacatatttatgcgttagtttttatctttttactctaaaacgtaacgctttcgagttctttggttttatggaatagtttgtgagttataggctttgaaattgagaaattttcgatattgccactagttgtccttctttgactttaacagtatttaatttagtagtcaactgctgtagatgtcatcagtaatcacatttgcttttgtcaacaatcacatttacacacataaaaaaaatagtagtatctttttgttctccgttgcattcacacataataatagcatgatgataatatatcgtaacgtagtcgtagtgtatgaaattttatctcgttggtctttccaaacgtatatcatttaataccattgatttcaaaatcaggagaacgtcggaagatatatctttgatttatgataatacatagatgcatggataaggttcaatgatgcttctttcaatcttttatccccacactaacatgtgtttcatatcttgagtactaccttaattacacttaacggattcggaccatcgtcctattctaatccatgttggtgttaatatatgctctggaaaatgatggagaggccggagatattgcattgttcggaccgcttggtaccaatctttttgttccgatatcttttctggaaaatgatggagaggccggagatgttgcattgttcggaccgcttggtaccaatctttttgttccgatatctgctctggaaaatgatggagaggccggagatgttgcattgttcggaccacttggtaccaatcttttaattccgatatctgctctggaaaataatggagaagccggagatgttgcacggaccgcttggtaccaatcttttcgttccgatatctgctcttgaaaatgatgaagaggatggagattttgcatcacttacaacacttggacctactctccttgctttattttgtacataaaatgctggaagttgtagagattccatttcgttcgtactgctaaaaacttttttagccacatctaaatcagaagcaactgaaatgatcccgcgagtggctatagataatgtcagagaaatgaactgaaacaccacaactccaaaaaatcctttcatatttcgtttggcttctgctgttttaaggtgaaaaactgaaaatggttgtattatagggtgaacgaagatagcaactttatatcaggctttttaaataaacatatgtatttagtatttacatatttatgggccatttacatatgtatttagtatttacatatttacataattatggcaaacaataggaccatttgagaagactagcacttttaaagttaaatattttttttgttgaacaaattaaagttaaatatctaaaaaagaaaaaaatccaatagaatcttggcaaaaaaatactaatgaaagaaaacattttgaatacaaggaaggtatgtatttatattgtatattcaaccttgtcaagattcactacctaatgcatagatgatagaattcgttgacaaaattatcaatcttttagttaacccaaatcagaaaaaaaaaaaatctagataaagatgtaggaaaggatgattttcttgcaaacaaatctcacgaagagatagattactcaacctaatcataaaccttacataatacaatatataatgttagttgcctaaaacatgtaatttcgttgtttgtgttgtcactcagggctggccctgagcacaacaaagtgaaacatttgctgtgtcccaaaatttgaatggcccattttgaaaaaaaaaatttatatgtataattcaaataaaaataaaaaagtggtccattttaagctttgagtttcataaaaaaaacataaagcctaaagctttaactaaatctcataaaacctaatttttctccccaataaatccaactccacgaggcttaacattggttttgtactttttgtttagtatggtaatgaaaatttttggccctcattttggattttgctctagcccttctaatctcagggccggcttcactgcatcgcataatttgtgtttttataaaaattctataaattttaaaataggtgaaactacctgtattcaacaaaaattggtaaaataggtgaaatacctaaccagccatttctcattgcgttaaagctggagctcatgataatggtcgtaacaaaatagtgtttatgatgagaccggtttcaacaaaactcaatccaagaaaattcgaagcctaaacatctccaaacacgggagtgagacattaaccgggtgtaaagattttcaataccgaccacattctccatcttcaagctcctcttcctttgtgtgctccctcgcttcttcttttctacgccgcttttccttgccctcaacctctgcttcggagacccagcctcgctgcaattttagaaagctccgagattaaaaagcttgacataaaccatatggagctaaaccacttgtgtgtctagaactaggctagagatcgacaatgtgttaacagtaaaagatatcaacacatcaaatggttttggacctaactgagtgaagactcttttcagtagaagcagcatttctgcaaccaatccaaatactgaattcattgtcatggatcgaataatactataacacagtctactctatggttttctcgacttaaaacctaaacacaaatattactttatgctataatcccttaagaaaaggaatttagtatacctgatgtcttgatttcttatgcccaccgccagctttatgggattctttgaaatggtctgtgtcattttccttcacactagtatgtctttctctatgtctgttatggctatctcttcctgatctcctacgttcttttccatggggttcattcatatcatggttgtatttaccagctgcacctttcttatgatgatcgtcactgtctctttctcgcactctgtccttctctcttccgtatttatctctccccttgtcatgttcctctctcacatcctcgggtacctgtagtaatataacattctgtgagcttgcggacatgccatcagtacgtaatagttgaatcatctataaccacaagttgaagtatgttagtgtgcaattatggtagcaactacgaccgacagagactctcaatactgtttaagttcatctacagtctaaaataactcctatagaatataaattgacatacgaaacgcagaattatgaaagttccaccaaaactattaaatggtagactcgagcaaactgtttcatagacacaaatattaccttcttgttctgtttgatcctatttgattgctctttaaggagtgaaacgtaatcttcgaaacagcgcttccgaaagctctcatcaccaatagtactacatatcagaagcataaattatagataataaaaataatagaaagggcacaattctcccatgaattatggagaaggatggggaatacataaagtaaacaagcagcgaagtcctctggtaaaaagtattgggaaaaaataacaggcattggccgaggaagaagagtagtcatccactgcatgaaccaaggaattcaattcctaacattgaacaaaagaccaatatttggcaacaataaaacagcgtaaaaaaaaattcaggtgaaaatatgctttacagtcatttttggcaaaacatactagcgaaaagcacaaaccacagagcagagtaaaacagccatctgaatcatgaggaactttaaggaaagacaaacgtggttgctgtaacatcgacataagaaacccattctagaaagcactggtattctatttacagaggaagacaatttggtgatcatgtatatgagaacggaagttggaacttagaagaccaatatatagcagaaaaaacaggatccagccagaaacactaacatgaaaggttagaataaatgaaagtacctgcatttttcactaccctcaacaagatgctttaattcctcccaggatgaagaggcagttatatcctgcaccaaaacaaataatcagggagaagcaagaccaccacccaaaagtcatccatcacataacattatacagaatcaaactaaatagattcaacaccttgaaggagcgaagcatatcaaccaacttttcagtctgccgtgtctgttttctggcttctttttcttccttctcctttgccctttccagcaaatcatcaaagactaactgagaagcatcactaaaacaaataattagcagtcatatccaaatgagacattcaaggttcaataaagaatatgctaacactgcagtgattttactgtgcttaaactagtttatgcatcatgaagcaagaagacttgtatcttcaaacatcatctggaaatgaatttttgaaagtcaagacaaagatctacagacctttagtctaacgtcaggaataagaggaaaaccaatatcctcggaaatagaaaccttgaactcatcaaatgttgacccagcggataaatttacctggaaataaattgaaattattaaacacctacaaaatacagaaatattacagaatataaattgcgtacttttctcaatttcaatacatcctttatctgagacttgagctcgtggtcctgtgaaaaaaaacacatcaaatatacagataattaatttaggaattaagggacataaaaaaaaacaagcaaaaataaacaggaaatggaaacagaagacgccactattcacaaacctagcaaaataatgctaccagaactacttaatacaacaattactgtcttttaaaaggaatcagtctagagacagcaaagcattttttctcgtcatgtaacagattacagtcactttcatgatattttggaaagtaaacggactattgaatataatctagtaccctttttttcaaatcctcaacagcatcttcaaataagtcttttggagtagctccagaggagtttgacgcaattgctgaatatactggtaaatccttgacctgagatgtagaattcattttctattaaaacagttcaatacttgaaatggaatagttattctgggtgacataatatttaattgagttatataaccttcattaaataatcacgccatatagttttggcagtaagctctcctgttgcaatatgttcatctaacagcccatggaactcatcacggtgctttcgctctacttttttgagttcctcctgttgtcatgaacagcagatataatgaactaatgttcaatacaacaaacaaataaatgccaactagaggccgaaacctacgtaccttctgtatcttctttttctcctcttcttctctttccagatcacgcagatactcctgtacaacagttaaatttagccgagtctggaatgggaagatagttcctgataaatgaaacaacctgaaagatttctagctgatcaattttctcgagacgcgaacatctttcatccacttctaagcggtcctgaactttgcgccattgactatttggctgaatacggaaaatattaagtcagaatgaactaccacaaaatagtatggaaaaataaaatttaaaaagcgggacaatcaccttgatgaaattgcaagattccaaaaatcttttgtattcaattatgttccgcttgcgatcctcaagagctttcacccgccccttataaaattaacaacattacgaataacggaacccaaattaaagttaatgccaaaactttgaacaaacaataaatttgatatttggtcctcgcaaatataaagagtaaggacacacgttgtaatgaagttcactattcaagagatggtacacacttggctaaaacagatgtgaagtttcaaatgatgatgaagttacaagaattaagaaaaagtcaaatgactactctgagcaaaattttccaatggaaaactaatgtcaaaaatacatgcatatagagaagaaatgggacaaacaaaaatacagttacttttcaaacaacacaactcattaatgtatacatcatttaataccttctcttttagctcactgacatgatcttcaaaaatattacgacggtctttttctcgttcaagagctttgaaacgctcatcgtcttcaaacattgtcacagtcttactggatttaaaaggaaaattatatcacaaagaaattgcagtaattctcgtagagaaaaagaaaaagtattggaatcagaattttctggaaaacaaaacctccaccgagtagaaggagtaagctccacgcattcctggtaaaaaaaaaagacaaagtccaagataaagataagacgcatgctggtgaatttctctactttaaaatttcctaaaaatgaaaaggagatatatcatggagcagcagatctgcaacttacctctaacatccttttaaaatcttcatacagttttttctgtctggctagcctttcctcctcagctgctcgtttcgtttggagtaagaactgaatcacaacaaaacaaagaccaacaaaacacaattaacatatgtgatcagatgtacctcttaagcatcactgttcaaacctggagaagaatgtgtatgtactatatctaaacatctgaaatttctttaattctcgtctgataaattctcttgctagttttagggtataagataatagaatgacctcattgaaggcttgcttccgctctccaagtgtcctcagagcaccgtatcttttgtcattaataatttctctcatggcctgtgacagaaaccatctgaaacttcagaaacatgctcaagaacagttaatagtgaaagttatactacctgttcccatgtccagtcagatccaactttggcggatttcaaaagtgatttgaagacatccacagcttcctatatagtgaagtaaaattaattatgcacacagataagaccagaaatatgctcagacataaaaccaatcttttatcggataaatcaatcataccaatttattgttaaaggaaaaactctcttgatgaatttgtttttcttctgtttggctctcaaccttttcactttcaaccataggtttttggctttcttttggtccactcccactaccttgctagagagcagatcaacaattatgataaacggatacagaagaaatgcatgctaacaagaaatgctcatcgcttagctttaaatacatttgcgtttttagttgacatgtcatctgaatctccactgttcccgactgaaatttcgtccttctcaaccctgcaaagatagatgatagaaacttatttaggtcgtgatactcacaactaaaactaaatagaataaaagagaaagggagataaaattgctacaactgtcagtacaatgtagcagcagaagtttcagtcacagggacagaaagaccatcggtttctgaagtatcacacaattgtgatgtttcatctgcactcatctgaactcgatcaacattttcgaccggtgaagaacttccaggaactgaagctggctgcttcaaatcagaagtaagagttagtttctcaacgccctcagaggttgaagtttggcttggtagaccagtcggagctgcagtcgatgcagtgtcagaacgagtcagcacctcagaagcatcaataatgccttccgcatgaggcccttgaacagatgctatttctgcttgttcacgcacaatctggcgagaagagttataatttacacaatgggaaacagagaaactagaacacagaaatacagaagagaatacaataatttgtcttaagagaaaccttcatctcttccggcattgtccatgttgattgcttcgtaatcttattgtagtaatacctgcaaccatattaaagattcaacatccaaaagctaaagatttttattttttcatcagttgtatgttaatgaaataaaaactttagttgcatactcactttcttccatcaggacttgaatgttctttccagtcagttcttgcatctgctctctgtatcagagaatacacatctatacattaactatatacccatacatttttggttaatcattgcttcagatcacagaagaacaaatgaagaaagaataacggtccagttcaacataacataacataatctatgatattagccacgaagaataatcacaactgttgtgactgaaaatatctgaacgtcataagaaacagacattgaaaggtgtcctcccatatgcctttatttaggtaaagagagtatctagattaggatgaactatatcactactccctttcatcagatggaaatgagaaaatgtaagaactccactgcatttcaatgttgtcacttttgtgtaaccctagcacctatatcacccaagcttgcacaatcggaattctagatataaggtcatatttacattcataataaagaaaacaaaatttccacctcaaacgaaagttcaatgactactagtaagcagtaaatggaatgacgtggcacaagacagctttgaaaatccgaatgagtagatcattcctgaaacttcatttctttagctagggaagcttacagtacttcaggtgatttttcaagaccacaaacagatgagatccaaaataactcacctcaaaaagagtcatcaactcaacaggcttctcccaagtggacttctttgtcctcttgttgaaaaaatatctaataacaagcaaaaaatcaatgtcatacaccatatactcgtacaactggaaacatggagctaaaaataaacttattctacatattatatgatgagaataatatgtggtaaggttgggaaatacacaacggttgcacaatgtgcaggacaatgaatcatcaggaacacacagatagaacataaaattacgaacatcaaacacttcctctacagcaaaaatagaagtgaaatcggatgcctaaccaacaaatcctgtgactttcagcatatcaaactcgtaaatatcttagatgtcatgattatggttgcttcccactaaaacttaagcttggtaataagccactagttcaatattttcatgctaagtccagatggaagaacaaaacaagcaagcaaatatcatcaatatgaattacaaacaggtattagatagaatttgtgtaaaagaaagcaagagattggttcattgagtgaacatatcacataccattacatttaacagagctgacaattgtataccgaaatcaaagaatcaaaaatatatgactaagaaacattaaaaataaaaaacctcctcagagagcacaaaaaattccataaatttacttaataaagaaactatcatctggattagccaatgatatggtctccaaataccacacagtggtaaaaatagagaaacaactacacaaactatcccggacatatcttttccagaattagcttttgcacaaccttattgggtacttccaagttaccagcaatttgtctcgtttaaatgtcaatatttgaaatttggcatcatatgtgaaaacgcaagcaaaacaatcaaaaaagtatagataaaagtcacaagacttataattcttacttccttccatccgcagaggtatgctcaacccaatctgttagagccttttgagaaggtaaaggttttaaaaaagctgccttcaagtcgcaaaagtaaatataaattagtattcaaccaaaaaaagagtatagaaggtagttagaataaaagacatggtaacaacctttggttgttcaaatgtcggattcatgatagaagattctgcagaagtatgaatgatagatgctctctgttgtgcctgactatgaatgcttggtccagtgacttgaggtggcaccctcgaaccttcgtaagatgtggcactctgttttttcacagagttaggaactagaagtctagtttctgtaaatataaatataaaactatcttccttccttaccggataagaaaagagtgccctagggccaccaaagccaggcataccaatatctggagtttgtacataaggctgatgcaaggaggtaccagaagcaattgacacatttggctgtgaaattagagttgggggtccaagtggcacatgttgcacttgcacctgatttaattggctgggtctttcatgtgaatggtgcatggattgtaataactgaggtgcataagattgaggtggatatccaatgctcaatactgtgccacctctgccaacacattgaaagttctgagaagacaatcgagcaacttgctcagactgaggagcttgaatggtaggaagaaactgtaatgaaaatatgcaaaacacatgtagggttgagctgataaatagtcttcagatacatatatgacataaaacattacctgaaagttcatgggtggagcaaagcctcggggtaaatctatggagctagcattaggatgctggaatggctttaaaacaaaacaaaacaaaatcgctaaattagatgtaaaattcaaaaaaaccaacagaagaatataaatctacttaaatcatatatccaaaggtctgaggcatttagaaattaacccacagccagcggcctcagggtaaaagagcattggaataaagagggtgcaaaatagaacagatatatgaaaaaaagaacacactcagtatttacgcctacctgaatgccaggatattgatggttattagccatcttccagcagtattagcctcagtgaaaccaatggaagatccaccaaataataatggaaactgcacgtatatgctctatataggctcagttgaaatatggagaagaaaactagacctgtacaacaaacacaaaataggaatgaggacgtgaactagtagtagtctacatttatttgcaatatgcaagcaacaacgatacccctcgccttctaaagtttctcatagaatatccaacatagcatacaacgatttctatattgaaaaacggcaaaccccaatacaataaaaacgcaaggtataagcatggcattcaagcaggtctctgttctaagattgttaaatcggccaccatcatctgttcataaaatccatgtcttacttaaccataattctaagtgattccaaacaagttcataatttctacttgataaccgtctgatcataaaatcgagtttagaaacagataataaactgtttggattggataggtagtattaacatgttcatgatcgtgtggagtaacttaatatgccataacatgagaataaactattgaaaatgatccagaaatgaaaagtttttcaactctaggtttcactcttgcagattacttggaaacttacaactaatatataagaaactgagagtagagacgaactcattcaatcaaattctaccaagaagatactcactttatagaaaaggattgccaaaccctaaccagaacaatatagaaatgaagaaatatcccaaaacttcaaacacttctcaattgcgctttgagtcaatcgcagaattcgaacacaagaccaaaggaacaactataaattccggcgaagagagggacgaattgcggaaaattaccaaatcgccggcgaggatgaagttgaactcaaagttcagagccaacacgacggagcggtactgcgcttcacctattaaattattaaaattaaaaaaaaaaggtcaattcggtgtctttagttgggccagacaacccagtttaggcccaattggtagccacgtgtaaattttaggattatttcgtttagtttttgatcggtttagtgtattttagctcggtttactactaatatagagatacatacattctttgaaatcagaccaattgttttttagctaccgagctacctttatttctagtttggtttgataatcaacccctgtaaaccgaactcttacatcttataaaattatatttattaaattgttacaaaatacttgtattctaatctacttcactatgtcaaataacataattacaataaaattggacaaaatgtgtttttccaataacagaagatttataaaattctatttccaacaaaatatcgactatagaaaaccaaaatcgtcctatgttcaatgcgaaaaatataatgctcaagttggtcaaagggttgatgggctttcgtagatgtatgtaaggttcttatcgtatggtgatataccaaaatatttagtgggctttaataataatgtatagcccaagctcataacttcacaaatcattataataaataactgaaaaatttatgatttaaaccaaattagaatgcacaaaaaatgttatttttagaatttaggatcatgaaaaacaaaatataccatagtaaaaaccaaaatttttattataatagttcaattagaatggtgtcatgcctagtatatccaagattttatctgatttaaaatatgtataatgtatgagttaagggtaaaggaaaactatatagctactaaattaaaattagattgagtaagagctttgtttaattgggtttaaagtttaaacaaagttatacttttagtggggatcttatttttttgtcaacttaatggggttttattaacaaaaactatatgtgattgtaaattcttttaattggtttttcttttctaataaatccactaaatttctttgtcaataacataacttggatcgtttcatgattgtaattcaaaagtcttacaccgttacaagtcgatatttctaagtaaaaatatagtttacaaataatttatatcatgttgtataataacatattatacacatacatcaacatatttgtatattaatagttacgattttatcgcatatacatatagtacgtatactaaaaaaagtattaataatctataaactagaaaacgtatttacatagtcaatattaaagaaatgtatggaaacaagaagatttatttttataatgaatattatattatttctgatgaatttgatgatttcacttgtacgcatgtgtcatatattggtgtactaactaacaaaatcgaaatttggattacaatatgaatgagagacccctatacagctgcggctcgacagtctcctcacgatcctctctgtaagacagattggtcttcttcttaatcacttgacttctatttttattatattatctctcaaactctttaaataatttatcactcaacatttaattacaaccccatgcataaatttaacaacacagattcaatcatagtaccatacgtgtgggaaccagagcaaaacgacacaaagttaatacgtgtggaaagctttcgaaacatcttctttatttagcatataaacatttttagtagattaaaaaaatattagtattatttttaagatagatagaataatagtataagccagtgaagatgatgccaactaaatgacttacgtgctccactttggggccagctcatgctccaagtgatgaacagagagatagataaagattgcgtaagggaggctgcatggtattcatctctcgaccctacctcgtattattcatccaatggcagcgattaacctctttgcgtccacggtgttttttacaattatttattttataatcaatttagtttcaaaaatcatactatcatatcaaatgaatattttatcattgtcccatatctaccgactatacaaaactgccacacaccaaaaatctaaaataaatctaccgactacaaattatggagtatctcatttcaggtgaaaaacttcaacgttaattttgttatttatctactagtagtatttttttaggtatatataattcgtgtaattgtaacatatttattattttgcaaagtaacgaacaaaaaaaatactttgtttgtttgcaaaacttttttttttaatttcataaatgcaaactgttatttttaaaaactattcaattttaagtatttctttatctattctgaaatatccatagaaaaggtttctgaaataatgtgcacaccgtactaactctcatgtagatggcatgatcagttacagaaaaaggaaacaaataaataaatacaaccagtttaaatttactctgcactgatttatacatttccataaagatagcaggaaaatattttttgcctttttcagtaaaaaataaggcaacaaatgttccagttcacgttttgagaaaaatccaaaaaaaaaacaaaaatcagattaaggtaataataatcgaaaacgtttagaaaagtaaaaaaatcaaaaaatgatgtgaaaaaaataagtctgcctctctggaaaatgataggtgaggttaataaagcccactgttttggggtttgaccccacagaatctctattttattctgtaaaaccaaatatctttttttgtaattaattaatttatgtacattccccagctattttccagcctgtgtttcctctcccaattctttccatttttataccttctctcttcctcctttcttcttcactcatctcttcttcttcccttcaaccttcataatcagtggctccttcgcttattagtctttgtcaatcttaaatcgttgagtatccaaaaatcttaaactcaatggatccgtgctctttcgtacggatcatagtcggtaacttggccgttaggtttccgtcgtcgtcttcttcttcttcttcctcatcaggaccgtctgtttccggaatcaatccaacggctcctaactgttactgtaaaatcagattcaagaactttcctcgtgagattgtttctgttccggttatgttccgaactgaatctgaatccgagactcgttgctcctcctccggtaacgtatccaccgttgctgcttgtttcagtttaagtaaagctcagatcgaagcgtcgttgaagaaacctaaatttagtgttctctccgttgaggcttattcccgcggaaatagcgacggagacgacggtgttagcggcgcgtcgtgtggactcgctacggcgggtgagaagttgcttggtcgatttgaggtttcgcttgatttgaaatcggcggagacgaagagttttttggcgcataacggttgggttgctttgccgtctaagaaaacgaagagtaaaactggatccgatccggagctccacgttagcgtacgggtcgaacctgacccgagattcgtgtttcagttcgacggtgagcctgagtgtagtcctcaggtttttcaagttcaaggaaacacaaagcaagccgtgttcacttgcaaattcggctctagaaactccaactccggtgatcgaaatcttcttcacaggtcagttaaatcatcatcttactggaataattaagaaataggaacattgcctttttcagatagattctttacttaccaatttagcaaagagatgcgaacttagaaatatgtattttcatgctttgattggtgattgagatttgttttgtgatcgtatattgattttatggtttatattttgcagttcttcgatgatgtctgagataagctcaacgagaagttgtatatcgtcgatgaattcggaaaaagaacaaccgtcaaaagagagaaaaggatggtcaataacggtccatgatctctccggttcacccgtggctatggcctctatggtaacacctttcgtaccatctcctggttcgaaccgggtgactcggtcaagtcccggagcgtggcttattcttcgacctgacggttgcacatggaagccatggggaagactagaagcatggcgtgaggctggttactctgacactctaggttatcgtttcgagcttttccaagacggtatagccaccgcagtttctgcatcgtcgtcgatcagtttgaaaaatggcgggagttttgttattgatgttaccggcggtacaagcacaacggcgtctacgccgacaacgagtcctcaaggaagctgggatctcggatccggttcaagcgccggttcaagacccgcgtcgagaccaggatcaggatccgggtcggatttcggatatctactaccgcaacatccgtctgcggccgcgcaaaacagagggttcgttatgtcggctacggttgaaggagttgggaaacgaagcaaaccagaagtagaagtcggtgtgacgcacgtgacatgtacggaggatgcagcagcgcacgtggcattagctgcggcggtggatctgagtttggatgcttgcaggcttttctcacacaagctaaggaaagagctgagacagcaaagccagcttggtgtcgtttgacttgtttcgctttgtcgttttaccaattcatgagttgtcttccactcacatttttttggtttgaattttctatttttttctttttaagatagcgttaggaattagccagccatttttttgagaggtggatgtcatcattattaaaaattgttaatatctttctcagtacagctaagaaatgacagtaacaactaacaaacaactcattatctcttttaatttgcctcattaacaagacattagacatgaaattatttttagaatggtttttcaccaatgtaattaccaggaggatcatagttgcatgtaataaaagtaccaccactgttacacacaactttagcacatcccaaacgaactgtgtttttccaaacaacttgcgtgtaatgtagacaggtgccaccgtttggatcattacacgtgttactatcgtaatcgtagtactgtttctcgttgatccacatttccgcagcatcttcagccgacatttctccactactcatcgctatgttctctccaaatggtccattcgaatggactaatgcacaatcattgatcctctggtttgcatagcttgccgcatatgcagcgacctcatcgtcccaaaccaatgggtcgagcccaacctcgtttcgggcttcgttgtgggcctctaagaattgttgttgcaaatcttcggctaaagagccatagaaaagagcaattgctaagagaaataaaatgttggttttgagtagagacattgttttacgtacgtgttggtggtgaagcttaggagttaatttgagtatttatatttcaaaatttagaatagttaacaactttggattgtaacaaaaaacaaattctgttattttgtttaccaaaattaaaagaggatcatatttacataccctccatattaaaaagacaggctagtcaacgttacattctattctttgtattcattggattttgctatttttgtgttttgaatattttgtacacgtctccggtctctcttgataacgatttgattttgaaatcttcttattttggaaaaaattaaaatataatattctgctagataatcacttcactaatcagtatttatttcccaaatttattggtaatgtatccaacggatatgattcaagtaactaaaggaaataatttcttcagttttgacttttgatttcttaccgtcacgttgccttccataagtcaaatcgggccttttctagcgattctaatacatagcccaacacaaccattggcccttatgttgtttcgcctacaatgaccattttataattaaagtttttacttcatttaggtactatatttcattcaatgttcacaacaagaacacataaatgataaaaacaaaaaaaaagaaattaggacgaaaaaagaaaaaattaacttggaaacaaaattatatgctgatgcaaacgtgttggtgtgcatgaatgtaagaaaatccatataaggaaataacataaaatatatttgaatgcgaaaatttcaaacgccacggctttttttttgttaatccttccgacgtagagaacaatgctccggctactatttatcgttcgccttctctttttaatgccactagcttcatcgagatccaaccacagtgaagaagtcgagaatcttctcaaactgaaatccacctttggagaaacaaaatccgacgacgtctttaagacctggactcaccggaattcggcatgtgaattcgccggaatcgtatgtaattccgacggaaacgtcgtcgagatcaaccttggaagtcggagtttgatcaaccgagacgacgacggtaggttcaccgatcttcctttcgattcaatctgcgatttgaagttgctggagaagcttgttctaggaaacaactctttacgtggtcagattggtacgaatctcgggaaatgtaatcgcttgagatacttagacctcgggatcaacaatttctccggtgagtttccggcgattgattcgttacaattactcgagtttttgagcttaaacgcttctggaatctctggaatattcccatggagttctctaaaagacctgaaacgattgagtttcctaagcgttggagataaccgattcggttcgcatccatttcctagagagattctaaatctcactgccttgcaatgggtttatctgagtaacagcagcatcactggtaagattccagagggaatcaaaaaccttgttcgtctacaaaacttggagctctctgataatcagatctctggtgaaattccaaaggagattgttcagctcaaaaacctaaggcagcttgagatttatagtaatgacttgaccggtaagttaccattgggttttaggaatttgacgaatctgaggaatttcgacgcctctaacaactccttggaaggtgatttatcagagctgcggttcttaaagaatcttgtgtctcttggaatgttcgaaaaccgattaaccggtgagattccaaaagagtttggagatttcaagagtttagctgctttgtctctttacagaaaccagctcacagggaagcttccgaggagactcggttcttggacagcttttaagtacatcgacgtgtctgagaacttcttggaaggtcagattcctccttatatgtgcaagaaaggcgtaatgacgcatcttctcatgttgcagaacagattcacaggacaatttccagagagttatgctaaatgtaagactctgattcgtcttcgtgtaagtaacaactctctctctggaatgattccttcagggatttggggtcttcctaatctacagtttcttgaccttgcttcaaactattttgaaggaaacctcactggtgatattggtaatgccaagtctctaggttctttagatttgagcaataatagattttcaggttctctaccgtttcagatctcaggagctaactcgttagtgtcggttaatcttcgaatgaataagttttccgggatagttcctgaatcttttggtaagcttaaggagctttcaagtctcattcttgaccagaataatctatctggtgctataccaaagtcactaggcttatgcacatctttggttgatctaaactttgctggaaactcactctctgaggaaatcccggaaagtttaggatctttaaagttattgaattccctgaatctgtcaggaaacaaattatcaggaatgattcctgttggtttgtcggctctgaagctaagcttacttgacttatccaacaaccaattgaccggttctgttcctgaatctctcgtaagtggaagctttgaaggaaattcaggactatgcagctcaaagatcagatatcttcgtccatgtccgcttggaaaacctcacagccaagggaagaggaaacatttgtcaaaagtcgacatgtgtttcattgttgcagcgatacttgctctgtttttcttattcagttacgtgatctttaagataagacgagataagttgaataaaacggtgcagaagaagaacgactggcaagtgagctctttccggttactaaactttaatgaaatggaaattattgatgagatcaaatcagagaatatcataggcagaggaggtcaggggaatgtttacaaagtaagtctaagaagcggtgaaacactagccgttaaacatatctggtgtccggagagttcccacgaaagctttagaagctcaacggcaatgttaagtgacggcaataacagaagtaataacggagaattcgaggcagaagtcgcgacgctaagcaatataaaacatataaacgttgtgaagttgttctgcagcataacgtgtgaggacagtaagctgcttgtctatgagtatatgcctaatggaagcttgtgggagcagctgcatgagcgtcgtggtgagcaagaaattgggtggcgtgtgagacaagcgttagctttaggagctgctaaagggctggagtatcttcaccatgggttagatcggccggtgatacatcgagacgtgaagtccagcaatatattgcttgatgaggaatggagaccaaggattgctgattttggattggctaaaatcattcaggctgattcggttcaacgagatttctcggctcctcttgtcaaaggaactcttggttacattgcccccggtatgtagaatcttcaggttttcttctgaatagccatatgacattaggtcaacatatctttaggtttcttgcttatcaaactttaaattcttccatttcaatccacagttttataacacctgtaaattgcatatcatttctttgttgttcacagaatatgcatatactaccaaagtgaacgagaagagcgacgtgtacagcttcggggtggtgttaatggagttggtgacagggaagaagccgttagagacagatttcggcgagaacaatgacatagtcatgtgggtttggagcgtgagcaaggagacgaacagagaaatgatgatgaaattaatcgatacgagcatagaagatgaatacaaggaggatgctcttaaagttttgaccattgctttattatgcacggacaagtctcctcaggctagaccgtttatgaaatcagtagttagtatgctagaaaaaatagagccttcctataacaagaacagtggagaagcaagttacggtgagagtgctaatgatgagattactaaagttgtataactcatagattgcacttggttattaatcgagctaaggctcaagaataataaattcttgattggttttatacttaaaaaaattcttcagagaaagattctaagaccattcaagagttttgtatcatcttcatctacatggacaaaaaagaaagtagtagttgtaaagggttagtgtaaattgaaaagccataagattttctatgataatactctttaaaaataattaaaaagataaagcaaaaagccatagttattaaataacttacagacgaacatttataaaatacatcgcaacgataggacatgcatgatcatcacaatcacaaagatcagagacatcttcagatgtttcttacataagttttgtatacacacacacacatatttagcatcaagttacagtttcaactttcagccctggcggtcaatctccaccgtccatcccttggtatcctcgacccgacccgtctggatatcacttaacgtctcgtatagcttcgcagccaatgtttcttcccctgttttgaatccggtcctgtattgagtttatacattcaatcatttcagtcaccctaacttatgaaaaaatctaaaaatagacattttggattaacaaagggaagaaagtattactttttgtctttaaaggttacggatgcaatactagtcacaatggaagcagtgccagtacagaaagcttcgtccgcatcgagaaagtccactagaggaatcgtacgttcctcgacctttatacaacgtgaaagaccaaaaggaaattattatacatgcatgatgaatattattagtaaggagatttttttcgcaaattacaagatcaacttgatatatgtatgatattgaaatattccaacctggtagccgaaatcacgacacaattccattacgcagtttcgagtgactccgggcaaaatagttcctgcaattgttggtgtcgatacaacattgccctatatacaaaaatatcatcacaaccatcttaatattctataacacatgtataaacctcaacatgcattttcaataaatttgtatatttattttttaccttgagcataaaaacattagctgcgaaaagttcttcaatgtttttgccagttgcagcatccaaaaacaaaatatcagagaaaccttgttttttcgcctctgccaatggtatccaaaccttcaacgagaaatttttccattacaatcatttagtcatgtaattatgaaaatttgatgtatatttttaaaacttacaggacaatagtttgtgatgctcttcacaccaccagttccactaggaaaagctcgacgaaactgatcttcgattttcagattcaaaccagagttatcctattccaaacaaaaatccgaaaataatcaaatttaacataatggttttcgttaaacaacataaccctttaatttaaaaccaactctcaacaagtaattgatgcatgcatgttatattacgtacttggaatcccttatattttcatatgtgaacaataaaagaaaaacgacaagaacactagtcaccttatgataacgtccaacaggacaggcaaaagctgtgaaggtggtctcaggaatgggaaatgaaccaagaatcggaccactcccaaacaagataggcctaatatacaatgttcctttccccggaggaggaatctgcgtacatatataagaaaaccccattgattatatctttcattttataaggttttattatcttgacgaattcatacaacaatcaatatatataatatacccatttcttgttggcaagagcaacttgtttgatggcggagacgaattgatcgaccgaaggataaggcatatagagtctgtcagctccggcttgaaggcggagaccgttttggtctggtcggaatagcagaatccgaccatcttctgtcctgtaagctttcagtccttcatataaaccctaatcattcccaaaccaccataaatattccagtaaattagtatcaaaccattacttaagaattgttgcgaaactagatcacatacaatgatttgataggaatatcaatactttcatactattcggttcgttgatatacattaatacatatatgtacaactatttcattttttcaatagtttatagctcaaatatgcatacaatatagttgctaactcaatagtatactatgtaattatatttatgataattagctcaatcattttattatcagtgagaaagctatatattcatgtgttaatagttttttctgtttcatctaataacgatctagatttatattcattcttttaagtcatatataacaaacctggccatactgaagaacagcagcgcaagggttaagttgcaaatcagcaaaaggaagaatcttcccctcttgaaaactctctccatgattgcacttcgcaacatacatataatccgtacgaacaaacttgaatgccaactcttcccacttgacattcgcatatttttcatccgaaacactgtaaattttgataaataaaaaaaaacaaaaaaaagatcgccaaatcatatttcatactatcagatttaaacaatataatttgttcgacgatacagaaatattttacctcacaggaagaggttgcgcagaaggagccatggatgtgtttgttcgagtcgagttgctttgttgtaagtaggtaattgcaagaaacttgagttgtctataaagctttggaatacttctctttatatatacgtttacaacaattttttttttttttttttttctatttttacaacaaattgttttttattataataataaacttaaacgaaaataaataatatctctttgttctatttcttaaaaaagaaattagcttgtagtacttcaacgtatcttaactctttagtctttagtaggtatatatcatctatttatttatttttattttttttatattacgattatagtgtacgtacgtatttattaatcaaaaataacttggtagaagtaaaaagaaaatgattttttttttactcagtgatcagttttacgtttattcaaaaataagttgtagtttccttcttaatattcaagttatatgactaaaaattggtcggttaatttactattaagattaatcggaaactctagttagatcacgagataatcatcacgtggagaaacatttggttcttgtcacgtggagaaaacgttaagcttattttttacttctttattatatttttgaggaaatggttgaaagaaagagagtgtttaaaatgtgaatgcgctcgtagttaggtggaggttaatgggtaggagggtaggtcatatgtgtattagtgatggataaaaattaaaaacataaaaaaaacttcaagctgtaaataatctaataaaagaacatagaaatataatcaaagaaccatttaactaaataaatactttcgattcaaatagcatatttctaagttccaagaatagctatcctctatccacatgttacattttttttttctttttcacatccatatagtttttaaaataattttctagatggtattttttattcgacatttttttttccttttagatttactgattataatttatttagaaataaatgatacgactgtcgtttctacaaaactgaaatttgcaaacattggaccaaaaagcgaaaccttaatcacttgaaacgacaacgttctttagtatgtttttggacatacaaagtacacataagatgttccctcactcttcgattgtttcttaacctaatataattaagcaatattgaacttgagtcactcaatgctgcaccgaaggagcctttagattttgagcaaattcatgagagtttagcttctcattcatcactctgaatttctcttttatcctctttatctgtccaaaacatgacacataacataatgttagttctcctgcatacttccaatggcaaatagaaaaaagagacattgatcatagaagtcagtttggtttacccttctgagctcgatctctgtgctccgtttcttttgatcaagtgattgccggagattcgtgatgtcgaagatactatcgaggtcgtcttcaaatgcgttttccaactcttcccggagaagagcaggtaacttatcaacgatgggcattagaagaaaacagttgaactgcagaacaaaagaaaacacagatacaaactttttaaaagaaaagtcattttaaaagcaagaagaatctgagtaaaaactgaagtaggagcaaacctttaactcagcagaggcgagaaagtactctcgtatgccctggaatatctgttggaccaatgcgtacacaattctctcagaggaaggagcaagcttgcggttccaaagtgtgctatctagaagatcagccaaccgcatttctgttgtctgaatactggaacctgaatcgatgtttgaggcgagatggcttagctttacatctgatcttgacttggtgtctgttgtgccacctaatgcatcttggggaagactaaatcctatggcattacctgatgtcgtattatgctctgttccaccaaatgagtccaagaattgacgtagaccagctcggttctacataacattgagaaacgaaaactactcaatcagaaacggatacttgatggtatgtacacaactcaattggattgaaacagagctatagggctgtagcaatgaccttgttgtgaagagaccatgtaacatagcgagttgtacttgctaaatcctccatacatctgcaaacaatataaaatccaaagggtgatcaatcactaaagctcactagaacacaggtaggaggcaccgacatggtaagaacaggaattggaaatagaattacttgtcacgacatgatttttctgtggactccacaaaactgttgaatgctgaagcaacccgcttgagaaacacctcatgcccacttaaatattcaccttctttctattcaaatttagaacatacatcaaaaaatttgctggaaagggatcatgagtatgataccgtcaaaccaaagaaaacagtacctacctgaagaagatatacagaaattggaagcaatctcttgagaatgtgtagaagcctcgcccctaactatatcaacgcaaaacaaacgaaaatgagaactggaaaaaactttctgtatggaaagagaaacatgtgaataacaaaatttcagatgaaagtattcccaaacatagtttctgtaagcagaacatgtttactcgataactcttatgcacaaataagttccagcaaatctcaaaactgaatggtagtatgatttcaatatataacgttatatttcatttttttttttacgtacagtacaccttaactaattagtaaaattgctttccatcctccacgaaagaaaaagaaaaaagtagctatatctatgtcacctgatgaaggaaaggttcaaacgtctcacgagccttcgcaactgctataacacaagctgttctacaacagcaaataagagaaagagaataagaggccatagaaaacatgacaaacgttgcagctcagattagatactgaaaggggtctgggatgcaaagacaataaattgagaagtgtgttgcatgtcagtcaatcctatgatacctggaatagtttgttccatcatgaatatcctcaactccacatgcatttacaatttcctccctcgttattgggggacatttgatagcaccaactagaaaacgaaactcagccatggcacggtgatattgtgcacccccatagagacgcatccctgcattctgtaaaatgaaagataatctggttatggtctctcataattcttgaaggtccaacgaagtatctcttttatttgtttccaatacattattctttggcacatatgtttcatgcggtcaaatttatcttccatcatattataatccatgtacaagaacaagacaactggatttgaagaccatgcccagcttgctctataaagtccaacaatattctgcttcagggaaagacttaccggtattagcttatgtgaaaactggagaccatcagtaccaacaaatgctcctccttgtgtcctttcatcttgcagtgtctcacctgaaaaacaccatgagaaattattaacaatcaaagaacccaacataaagagaatgctgttataaaatgtgcttctgccagtaaccaaagtatcatgaccaatgattgattgattagcatacatcattccatgtgtaatcatcgcagtctggtgacccagtcgaattgaacaatatgcatttaactaaactgattttgcaaaagtccaatttaacaacacccagaaacaagaaaagtttatgccaaagaagttgactagcagagaacagagcagtaacattaccaaatttatctggaggggccacaactgttcccttcaataacagcgataactgatcaagaaaaatataaacaaaacaggtgagaaaacacagcactgatcaatactaacaaaggtacttcgtacgtcaatcagaaaatatgacgcagcaattttaaagtcttaagggcatccaacacaaaaagtttacagccattctgaatttgtagcaagtcctagatatcatttactgtagcataattttatatgtgtcagtaatcaataaacaaatttgtttttatgtgtcagtagttaataaaccaaaaaaaaagagaagtttacacaaatgaacttgttgtaattatacaaaaactattaatccacgagtccaggcaaaaatgaaaaggtatgggaaggtgtaaatagaaatctaaaaaaacgaaatgctctctacagttaccttggttaagaagagatcatggaaagtcctgcctctctctttgagttttgcttcatccaaagagctgcattgaaaggaattattcaacctccaatgagttatattttctataaatcagtagctaacaattaaactgcctaaaatcaagtagacattttcagacaaaacaaattgcgacctaagttccttgctcacggtatccagctttctgactgtactgcggtactcctttcctaacagtggaatgatcaatggaacactctctttgtacctggaaagagaagggcatcaagactacagcgaaaagtaaactacaatagaaacagaggctggaaaaatcagagttaaaacaacagttataccttttccagagtagttcttccagaaacaacctcagtttactgatgccaatcctactcttttcctgttttgtcagtaaacggcccaacttcttctctaaagatgcaatgtcttccatttctctaagtgacacagcctgtaataaaaaccacacatagtttagaaaaagacctgtttaacttgtttaaggaatcagacagcagagcagagacctgtttgaactcgtcattagacttatacactgaatcctgtccatagccaactcttccagaaggcacagacgtgaaaaaaggagaatcgcccaataaggagctgtcaagtgcgcttgcaggaggtgagagaaagacttccacgtcagatgaacatgagaattgagggattttagtgtcaagctttgtagaaacaacaattgtcctagaaagctcaggatcaacctacatgaacgagaaacaaactttaacaaaaataaagacaaggttagacgcaatggagttacgtcaagcaacgtacttgcatcactatccttcgagtggttgcaatgctccagtcactgctatcttcgaggcataaaatgatgaactctttgtgttgcatctttgctcggactagagcttccacagcccgtgcttgaacctaagaaaaagaacaagtaacccactctcaaataaagcaaaaccaaaacatgaaatcagccacggaattggctggaagccataagaaaaaacaacctgaagagctcggtttttcagtcctggtgcaggagcaataagtccaggtgtatcaatgatggtaaggtttggacaatacttatactggactttcacaataatctcctttgcagagaatgggctacatggctcttgctccagcctcatgttctcagcctcaatatatgcctaactccaaatcatataacaaatttcgttaacatgagcatttcgcttctctacaataaacctaagtacttgtgtttctcaacattcgtcaaaatcttcccagaatttatacgcagaaacaagcaattgaagaagcacaagtaataataataacaaaacacctgaatttgtgagagagatttgggaagagaaacggaaggatcatcatcagatccgagatgacaaagcgggaattgacactgaggatcgtacttcatatggagagtaatcggccgacgagtcttggttccgccgccgacatggttaaattgaaaccccataagagcttccacaagcgcacttttaccgtcggtctgctgtcccaccacaagaaccgccggtgcttcgaacggcgtctccaattcctgcgccaaagcgtgtaactcgttgtaagcttcgtaaagactccaccgctcctcaatcgcagcgtcgtcctcttccgccatttcctcaaccgtcaccgattttgctgatacttccgccatcgtctcttacgaaaatgagcaagaggaagagtaagagtaagagagtgtctcttatttcttctactctttagttttcgtcgccgttcctttttccgccatggaattagcagatacggctaatttcaatttttgtcaaaagaaatattttttgtgttttaatctcacgcgcatccatggcgcgttgagtcaacgttgtaatagttctccgctaaatttaaataaaagagcgcgtaaggagagagtttaaggattttttttttttggtcggcaaatacaaaggatttgctttgtcttgaccaatagtatatgcagaaatattatctcaaaggatttgtgataactatgtagtacagaattgtgattattggatgagaaaccagaaatattttgagcaaatgacgacttgttaatttactattttttcatttcttaaaggtctctcttgtgtaactatgattaaaattgaaatagtgacttttattgttacgacatggaacaaatcaacgagttctattgttaaagagagacattgatgaatgtaacaaaactgtggcttagaagccgaaaggagacttagttcgggtccctccttcaccgtattgctcgttccattttctcaattcgttcattgtcgtcgcgtcgtatgccactgacggacttacctgcaaattacattacaatgacgcaatttcgataatgcaaacaccaggggaaaaaacatgaatagagatgatgatgatgttttttaagagattgatcaataccttagctttggattgaatgaagtcgtccaaactcagtggtcgtagatcaggggacgcatttgttaccgagtcctgataattcgacgtttcaaaagcatggagtgagtacaaaaattatttttcgtaacaacagaaatcaactgtgtgggtttatgcatgtccttaccttgttttcttcttgtaacaattcttgaacaggtctgtatgcagctgctatgcatagattctgcaatgtaagaaaagaaaaggaatcagaactactgtgttgaatcatactcgaacttgtaaatgaaaccccgaatgaccaaacctttagatcgcttcctgaatatccttcggtttcctttgcaagtttatcaaactcgaaaccagtttcaagattttctggtgtcagaaatatcttcaatatcttcaaccggttttccgcatctggtaaatccacatatatcctataaacacaagcctcaatacaattatcgaaaagatacaaatattccaaaggagaaattacttgaaagcttaaattaccgtcttggtagcctacgaatgacagcgtcatcaagatcaaaaggtcggttggtggcaccgagaatgagaatcctttggctatcttttgatctgagtccatcccaagctgccataaactcatttctcattcttcgtgttgcctcgtgctcaaaagcaccaccacgagcacccaacaaactgtcaacctatacgacaacaaaataaattacagttagtccttgagtaacacattttacgcatcacaaaagtattcctcataaaaagcaataaccgaaattgaaaagtgatataaagctaaacaatttctcacctcatcaacaaatataatgacgggggctagtttgcttgcaaaagagaacaaagccttcgtgagcttctctgcatctccaaaccactgtgccaaacaatggacgaaattgacttaaatcagaaccaatcagaggtaaagttggaaagagatttactctaagttacaatcggcattgacaataataagtcgatgaccggggtggaaaagtttttcttatgtcattagatattctccttatttatatgaagatgtttacaaagtggaatatcaacgtgacagtgcaaacaacatagttttaaggttccatgtacctttgaggtaagcgttgagccagttatgctaatgaagtttgccccagcttctgttgcaagcgccttggcaagcagcgttttacccgtacccggaggaccaaaaagcaatatgcctttacatggctggaaaaaacaaagacacacgcattcaagaaaacccagacgagaaaattccaagtccatagtcaagaacataatgacatgtatataacagaatgtaatacccgcaagagatttccacgggtgaaaagctctggccttctcatgggaagaataactaactcatttagtgtctttttcacatgttcaagagcaccaatgtcgtcaaactttaccccaatttctccaggagcaaccacggctgagacaaaattggtttcaaactcatccttcgcaatattctgcaaaaacaaaaatctctttttaacataattattactcagagttttcagcagccaattgccagactaccagaggggggaagaaactaaaccttcaagttttgtgtgggctttcgagaaatatcttcttgtgcctttaaccttttaactgaaatctcaatgcttcaaaagaggaagacaatagtaagatataagaaaatcaaagataaatcatagaccccaaagatcaatcaacaaccatgccattacctttcacgggggagaatcaggcggccctctttaatcgatgggctaggacaagaagataaatagtggtttctggcccaaccgataactttctccgctcctgcagaaacaaaataaacaagtttctgagctctcttggtcacaatataagtaattggggtttcatcacagaaagcaagaactaaaattaaatgattaatcatataggagatgaccgatatcaaggtcaatcacatggaactgcatcctatttcatgtaatactagcaacaaatgagatacataacatacagttaaggcatgcttgatatcctcaatcagcaactttaacatacttaacaatgctaagacataacgagtaataacatacataataaaccaggtatttcataggagttacacactttgctttgtcaatatcacgccatcggtgttcacttggtacaagtcagtgcacaataactcgttttcctcaagcgcctgggttaaaagttctcaaagtgttacaatggttatgataacatcgcaaattgactccatttctctaacggaattcagtctatgtctatgtaccttaagtagctcatttaaattgctccgtgacatcacaattcttctatcttctccaagttgtttgttgaatactatgaggttctcttcttcctgcacaaaattagaaaagaagaatacaggtacaacattgataagcaagaagtgctgaacaaataattttcaagaagacgatagcagcatgagctatgtaggcatttgcatcccagatattgattgcagatgaatttaacattttccaaaaggagactctgaaggaagtttgcatatattttctcatatttcaaagtcagaagttttcaaatagctttcctactttctcctaatgtcggtaacgtaagaggaattagcagaaatattttctcaatagacattattagattcgaaaccagtctaagtctatatgcaatgtcacataaatatgaaaaaacacatcaatgcaattctcatcggttatccaaaaccatgaacggaagttattaaagtcaataggcataccttaggagggactaggttcataacattagtgaagagcttgtatatctcattatcctctgatgttttccttcccgtgagtccctcagtgagacgcttcaacggaaggggctgtaagacacaacagcatctatgataaatattttggagtgtagtggctggaatttatcaaatgcagaccaataaatggatgtactataatgtcaagaaagtgaagcaaagtatgcaaatccacattcagagtcttgcacatatgaagctagttttaccaaaagtatcaaaatgcgactgatacaaagtcaggactatatgcatgttcaagatgttgaataaattgagttggtgtgcatacgagaccaaaagttttaaaaaattaccacaatagataagtactaagactatcaattaacgttacttttaagtttagctatcataccagtttcgcaagacggccaaagtttgggagtatcatcgtctgttcacaaacaaaaaaggtcaaaaaatgaaagcaaacaaaaagaagagccaatgaacaatgacacgtgagaaaggcttacaaatttctctctctcttttgagcctgtttcaatcttgtttcgtccacagatcattacaacaggacttgacaatttatcaaacatttcctgaactttgtctacaaactcattttgttttgacttaggtacagctcgagacaaccactgggacgagtcgggaaaatagacaataagtggttgtgtggagtgtaaaacctacaagaacaaaaaaaagaaagaataaattaacgccatttcatgttgtatgttccttggagaaagtgtaagctaaccgcattcaaagtcaagctactctagacttcaaatcttagggaaatgatatcataaatttccagcccaagaacgcagcatacgctgaacaatccatatatgttaagtttcaaatcaaactaaatatcatgagcacttactactgctggataaatgatcagatctgaacttatatataaggccaatgtacaacgttagctgaatggaaacacgaaaacataatgtaacttccacacatacctcacttaaagcctccaaggcgatatagccatcttctgcctgcatatccaaatcatgctttaggtctccaactgcgcagacaatatgtaagttagctgcatttacataagatgtcaatcgtctacaaacagggtatttctccaaatatagagcaatcacacatcaaccatacagaacgccatgaattaaatataccatctatccagtgcatatgtagcttatgagagtgttctgttgatttcttgtcacctccctctgatgatgtatcacctccaatgtcaaatatgactgcaacacgattcccattcacctcatagacctctccacgttgtccactagataatggcctgtaggtatagaaattttggttaaagacaaaccctagggcatttacaatccttcatccataatatttagcatgccatggaagtttataacttccagagcaatgagttcaaaatgtgttcctaaaagatcaaatgttacatttgcaggcatgtcaaattgctgagaaaaccatggatagtgatgataatggtaagcacgcaaaaacaagtcatttagttaagcaaaggtaatgcgagttgcactgttcacaaataaatgaataagtcctatagataacaattgtggcagcagtttcatacacatccaatcctataccagaactactcaaattactactaatatgaataggcagagcaagcagagatcaagtcaaataatatgagacagagtcataaaagatattagagcgtaatattcttcagcaaggttagagaataattatcacacaagtgaatcagtaaactacctgtgctttgcatcagccttcttagaaggtccaacatattttacacgatctcctgcaaaaagcgtaaacacaaatagaaatgaggaaaagtgaaaaaattgaccacacaaagagaacttagcagtctgacaagtagaagaggaaagagtgaaaggctaagatagaaagacaataccaggaaaattatgactagatagaatacaaaattactaaatcaaacttatttagcaaactgatacattcaagtgtacctagcacttgtaatgatgaagatgccttccagagccttgatattgatgattacctttctttgccggtcgcctggctttatcagaatgctcaacagctgctgcttcgcaagcttcaccatgtagttcttctgctactagctgccacaatttagaggaggtaagcaaatttcagcaatttctgaaactcaatttaattggaagttcaaaaaaggaacaatgcaaagagtcgcatgtagaaccaagaaacagcattcaaacggcaggaatggtgaaaccttctaattcatgcatagtaactctaataacaagttcatacaaataagataaatcaagaatcagaaaacttatatgacagggtcccaagatcacattgtccacggggtatcgcaaaaagaaaaagaaataccatggtattaccaactaaattaggaaaagaacaatcagtacagactaaaatttctgaatctcaattaatgcaatcataccttttcgaactcttcaagttttggcacaattttcttgatagcttcctcagaaacctcgagacaagcttcctcactgtcactcccatctgctttcgcttcagaatcctcttcgctctgagcactagaatcttcctcagcatcagactctgtcgtggattcatctgcttccgcttctgcgttctcaccatcagattcagattcttcattgtagtcatcagcaaaatcctgatccagaattaaaaaatattacataaacaccaaaaagaacgaaagaaaaatggtggcatgttataggcaaattactcataagaatctcacatatggggcaagaacgctgctgtcaagaaccaacaggggaacttgtacatctcgagcaagtgctcgtaccaacctctcccggtaaagctcagtacctgaataaaattcaaatttcttattggtcatctaacatttcctcaatatttttacttgataacagaagagcaacatcaaatcctggtctgccatttttattctatagtcaataacaaacctggaacactctggagcaatattcttccacttgaagaatctaaacgggcaccatatatggaagcggcattcttttgtcttatatgtgaggtaacacattccaccaaaatatctttcgtgtggtcgctgtgaaaagataatgagcagaatccataagcagaaatggagaaagaaacacaacaagcgagaaaaaaaaacatgttgtagattattactggatgtagtaagggaaggtctcccaagaaagctgtattttttcccaaggttggattctccgtaagaactcgtttttgaatctttctcgtctattaacgaaaggtgactccttctttttgcattcactagcaagcttctcattattgagccattctatttggtcttgttctccaagttgagcatgagaatccaaatgcccaacaccgttattacttttctccttcccggtttttccatcatctacaccattctctttgttcaaagagatatgtttatcctcactagcattccttccatcaccctcagaactaaaactacgcaactggctattcttcaaaatacttaaatgatttcccgaggcaatagtaccaccgcggggagaaaatgaaccaagtagagactttcttgtcaaattttcactattggttaatttatttgtgaatccacaatatctggaaaccgtatagtcacgaacgactggcctaactaagtacttggcttgctgcaataccaaaccccatctctggttcctctttaatgcccttgtatacatcacaaagtcccttctcttccaatataactacaaaaaaaaaaacagagatcattgatttagaatcactttcagggtccatttcttgtactatccaacctaaatgcattgcaacatgtaattgcaccattaaaaaaaaaaaaaaacgagatcaatatcaacgcaaaacatactatagtaactcggaaagaaacatagattctatacaatttatttcgactagaggaataacaacacacttcagggaattaattgattaagaacagacatcaattaaaatgaacgattatgacgcataacggaaaatccaatgtaacaacgaatatgaggcatcgatatagaaatgatgatatattcagcttttgtcatccataactattacaaaacacgaaccgtttaacagagatggacaacaaaactggttctattcatcccccaagctctaagaatcaggcttggtgcaaagaggagatgtaattaggaacgagatagggtgaagaagagagagaaaatcccgacagaggagagagagataaagaccgatctaaagtctgtaggttcttcttctgaagctgaagctgggttcgaagttcagcttcgttgatgcagtgttgtcgttttgacgcaaaattgctacttgccttcctatggatatgggcctaactataaaggcccactaaacatataagagtcggtattttcctgacaaaaaagccctaacaagttgtcggatttacaatcgtacccctatttttaagccgcgcttatctcgaacctatacctgtagagaggaaataagcatttgggggaaatcaatcgaaaaccctaggagagataaaaacaaaaatctagacggagatttatggcgacagcgaatcctggccgtggaggtggtagaagaggcggtggagctatggatgacgataagttggtcttcgagactaccgatggaattgagcccatcacgagcttcaatgatatgggcattaaggaagatgtgcttcgcggtgtctacgaatatggattcgagaagccttccgcgattcagcagagggctgttatgccgattcttcaaggacgtgatgttattgctcaagctcagtccggtaccgggaagacatctatgattgctctctccgtttgtcaagtcgttgatacttcttctagagagtatgttttctgttcctttagctggattaaacccttcatttcaattttgaactttacttgctttgctcggattgttctctaacctaaatcattaggttttgtttcttatcgatttcacaaatttggtgggatttgtttgtctgacttgtagaatagatgaacgaattatgattcattaatgttcaatcaaaatgacaatgaaaatttgtgatagttattagcttttcggttagagtgattgagtaatactttcttttaggctgcaagatctttttatatgtgtactcatgtatttggtatctcggactgcagggttcaggccttgatattatccccaacaagagagctggctacacaaacagagaagacgatacaagctattggattacatgccaatattcaggcacatgcttgcatcggtgggaatagtgttggagaagacatcaggaagctggagcatggtgttcatgttgtgtctgggacacctggtcgtgtctgtgacatgataaagaggagaagtcttcgtaccagagctattaaacttctgattcttgatgaatcagatgaaatgctgagcagagggttcaaggaccagatctatgatgtttacagatatcttccaccagatcttcaggtgcaatttcactgctcaatattatgtgttggctaacttctagtttctttggatgttattgcattagctttcttattttatggattggcttcttgaactctatgtggattgagagaattataagttgttaaaaaccttttagccactgttaagttgcttgaatgtcttatgtgtagatttggtagctattatctgtattatgaacagctaaattccactctataatagttcaatcctaatacgttttttttgtaggtttgcttggtttctgcaactcttcctcacgagattttggagatgacatccaagtttatgacagaaccagtgaagatacttgtgaagcgtgatgagttgactcttgaagtatgtttcttcttatgcttctgtatgctcgttcatgtttacttttacagtaggttgacactcatattcttcattggctatctttttgtgtacaatcttttcagggaatcaaacaattttttgttgctgttgagaaggaagagtggaaatttgatacactctgtgatctttatgacacgcttactatcactcaagctgttatcttctgcaatactaaacgaaaggtaattgtggttctcatgcaactgtatctcaaacttgttaacattaagcttctagcactgctatctgaacttgatttgcaatcttgtaattgctcaaaaattcatactatcttgtgaatatatgtatttctttatttctaaaagaaattaacaatataagtccactgcgctagagtacttgcaacctgtactcacctgcagatatctattagattgcattggcttttaaaacctttttcaatgtttcttgtaattagggttcttgaattatggttccttttctatattttactcaactctaactccgcatttgttataggtggattatcttagtgagaaaatgagaagtcacaacttcactgtctcatcaatgcatggagacatgcctcagaaggagagagacgccatcatgaatgagtttcggtcaggtgatagtcgtgttttgataacaacagatgtatgggcacgtgggattgatgtgcaacaagtaagtcattacttatccgctatattttgtctagataacaatgcgcggaataaattcaatctctgttattgaggtctcagattatgttccattctcttatggtaaaggtgaattgacatgacaatctttatttaacaggtttctcttgttatcaattatgatctccccaacaaccgtgagctctacatccatcgtattgggcggtctggtcgattcgggcgtaaggtaagaaactttttctaatctctgcttctgagcttaatttcttagcctggagatactagatggatatcttttaaccaattttgcggttatctttctagggtgttgcaatcaactttgttaaaagcgacgacatcaagattctcagagacattgagcagtactacagtacccagattgatgagatgccaatgaatgtagctgatcttatctaaaagagcttgtctgagatttttgtgctttcagcggggaagtgtctggatgaaaaagtattgttgagcgcttctgtcaaattattgcactatcttaacggtgtatttcctttgatgtttctgtgggctcttttgaacaaacttaaactcgcgtgtggtaaatgtttaatgacttgagaagcgatttaggtttagggtttggaccgtttggtttttcgtttcctcgtaattgattctgggggctttgattgtggtttgtgggtcaaaactctcaactatcactacttgtaagacttttgctcgacagttgaaacggttcattgttatcttatttcgtaaagcttggatcattgcaaaaatcaatcatttgcaaaagcaaagcaagttgatgaaattactggacatgacgtcgaggtttttcgtatcgtgtgtttcatttgacggagtcaggtgtcctcgctcgttggttgatgggttgggtgaaattgatgaacgaaacccaaaaccgggttaggaccgaattagattcactaacttaacaacaccaggaccaataaccggaacttaataaataaacgaccgtggttttgtttgtttattggtagtcagcgacacggaactcattaactttactcttctcactggtcaatcgtcggagataatcgggtgatcggcgatggagaatacggacgtcttcttggggctgcatgatttcctggagcggatgcgcaaaccctccgccggcgatttcgtcaaatccattaaaaggtcccatttctccctcttttgatgcagatccggatatatgtgtgtgtttctatgtacgatcttcctcttagcttaagtggatgtgcttcttagcggtttacgtttttaagtccattttcagttgatgatgatactatttgagcaaaattcgtactgatttgagatttctaatcatttatttatgcttcttcaattgctgttactggggaagacaattg

SEQ ID NO: 1037 - DNA, 55161 bp, Arabidopsis thaliana
accgtatacaaaatgtaaccaacgacagtagatttttaaaacggaagccagttttgtattaaaatagaattacataaaactattgtattggttggtttagatttcttcttctctttaaaagaaaaaaaccaaacaaaagccacactcaagtgtaccaaataaaaccaaaaccattttgctatactcttgtaaacaacaactagtaacaaacagattacaaagctatttattttctcattaatcttgaagaagaaactggtgaagcatgtatcgcatcgaccagattttacccagaaacagatcgcacgtatttgacatgtctgcctcacacatgttaccacactcaagtcagaataggtgactttgttatatcctgagagtgcaaaaaaatgtgcatgttttttattgaggaaataaataaaaatagagagttgaggatgttgttgggttcctacttcctagctctactttatatggtgatgcatttttttgtaggtggagattttgggactcgtcatcgaaattttggtggttaacaaatatagtatatcatctaagaaaattcatttataatatagtgcattctaagaataatataaatgcatcatcatattcctaagagtaataaaacaataacaaaatgcaaaaagataaccttgaatctaactggaaacatagaacttagcagctagagctttcataagtgtataattaaagctatctacatcagtttccaaaataggagttatttgcaactcagagcatagaaccaagactgtgtatgagtccagacatttgaggatctccgggtctctatcataatcctaatttcccaaagaaaaaaaaaaagaagaagttagattcatgtcgctggactttttgaacttaataacgtttgcaagtaacaaaaacaagaaacttaataacgtcctcaccttttcagttaccacaatgataggcttgcaattagatttgtgttctagtccctttgctctcctactcatagtttcaacatcctgcacttatcattatgatattgatgaaagccaatttgatttagtaaaaataattttttggcagtgaaacaaattgggaataacacatgaagaatagctatggaattagtaacctctgcttcaaataaatgatgatcactgaaatcaagtctatcaacataatgtgctccagtctgtcaaacatatataacccactagtcagcatagcagaaactgaatatttgttacaaaatcaagtgcgcatggaactaggataataacaacttaccatctcgatgctcttgacaaatgcatcagcggatccaattgcggaaacacatagcacagaggcacagcgcaacgcttctaaagctacatgtgacctagcatttttaacatcgaacaagtatttgggcaccatcttggagtagaaaatcggtatcgactttttgaatccttgtatcatgttctcaatatctctgaggctttgtttagtaatctgcatgatccaaaaccactaacctcaatagtcatcaccaaaaagaaaggaaaaaaacaagtataaacttgtaaacacaccaagtccacatggtgtactacagcaacatctgcccgttcaagcgccagaagaggttctcgtaaaggaccatgaggcatcaaatgaccatttccccatggattcagcccgttaagcatcacaatctcgagatcacgagacaaactccaatgctatgtaccaaacaagagagcacaagtcttcaaaacagcaataaacacaaagaaggtgaaaataatctcataaagctagaattttgtgaatataaactagagaatatacctgcatcccatcatctaatatgatacaaccaattttttcagaaatggtccaaacttgtgctctttcatgaagatcaaagaatgaccttaaactagaagaatctacacaaccatacttatccaaaaacaaagcagcagtagctgcccggttagccccaacgccaatctttaccggtccaccacgaagatgtctttcaagcattttgacttcatctccaccagcataaccctgacaatatgtaagagtctaagtacacacacaagcaaacactccaaaaattcaatggtaactatacatactagttagaagaatgggaattacacgagtgagaataagaggtgtaagtccagaatcaacgaggaattgagaaatgtattccaccattggcgtcttcccattacctccccagctcagattcccaacgctgatcaccggaacgggtaatcttcattcccacagatcaaattaagttccaggaatcgataaaagcattattcaattgatctctctctcgagagagaaaacgcaccggtgtttctgtaagagtgagtagcggtagagagagcggcggatttggagagcgactccgtatagagacgaagcgattgttaggaagggaacgagagaacggtgaagagcaggggaattcgtatggactcgcgtgtaggcgatttcgttcaccaccttcctcagcttctccatatgcaaattctgactctgcaactacttactgtacgagattctgactctgcgatttcaactactgtgtactgtatgtaaatttgttcgttggccaaccgtttttagttcaaattcagtctttcggtttaaccattggtaaaataagcaaactttgtgagatcgatctcatggatcatattcttaaactttatttcagactaaattggatataaaaatctgtgctaacccgtgaaccaagatctctttcaatatgcatttttacacaactgataaaagaaatacaaattatcgcaaggaaacgattgcgaagcttcaagagctacgtaaatgtatttaaccattttgaagtttcggggttgtcttggagcttcttagaacacaaacaccagcgtcgcaggtgtaatctccagatccagaggagtcctttgcgaaacagctgaaaatattagacaagaaacccatcaatctctgattctatatcaactttttcttcacagacgcatgggctttacaggttctctgcatttgcttacattgtctaaatatataagattcacacaccagaggtaaagatagaaaggagtcaatggtggtgtgccaaaacaaatacatatcgtatgtttttttaagactgaaattgaaacacgttgctaatataactaagtcttcctaaagaacacacgttgctaatgaagttgttggtgggttacaataatgtttaactaagacaaataatacatgtgtgaaagagacttaagttcgcagtatcctacctgagttcttacaaggaaacaatggcttcctttcttcaattcttcgcctttttctttggttgtcgtttctttctggacttcttaaacccgactccgttctcctgtggacaataaagttccatgaattagctcacagagaaggtttatgcatataacattatcagatggtatcaaccagcttcagtggatgctgacctttttgtaacatctataagcactttgacctgaaaactcctgtccgcttttagagatatatacctacaaagagcaagaaaattcagagacaacaaatttttagacgttcctgtctatgtgttctttaacaaatagttctcatgcttaaaagatgtgaatgcgtgtgtgtataacacattcatcccagtcattttctatgtatttttagaacagtggaaacagaaacctacctttcttccttctggggatgtgaaccaatgacctgcagagccactgtcagcagatacacgccttttcccagcatcctttggagctgcagctctcgttttaggatttaaccagccttcagaattgtgtgcgctctcttggctctttgaaacctttgactttgttttccctcttctgcagcttttgctgctagagtctccagctttagaactccctttgctgccaaattgattcctacaatggcattcgaaagatgtgtcaatccacaggaagcagaagattgtaagtatcaaaataagaaatagattaggagtaacctacatataatcaacaaggaacacctctcgctggctctccctatcattgacaattcccagaggaaagaagtttggtaaccgctgtcgagctagattccggatccttggatcactatgcaagaagaaacgatgagatggaggagaagggtgggaaaaatcgtggaatagctcagtttgctgaaagccagtcaagttatgatttccgctattgctactacttgccacagcactgctttgtttctgagctgtgctagtcgtcttgatggagataaaatagtcctgacaaacatcatcgaaagctggtgtctgaatcttggaacttgccggggaaaaatctttccacagatctttaatacaggggatagatccaggttcctttctcttcggtttacttgcaatagatggttgattctttgagaatgaatcatgttttttagttgctccgcttaaatctctgctggtggatggatggtcatcttcagaatctgaatctagtagctggaaccttcgtagaggactacgacttgacatctgaaacaacgatgcaacagaactaatcccagaggcagcagatgcttgaacatccgactgctttctttttccccgagagatagaaggttgattagataaaaccccagaaccatgaagtggcacccttgagctgcaactagaaaaatgacttcttgttgaggccggtgcgtctgcatgaagcaacacaagttttataccaagatgaaaccaacacaatatggatgacttaaaatattacactaaagaaatccaaaagaaaccagtttgagtggaatgaagcttaatcaatgtccttataaataacaaattctcagcctgaaggctccaaacccactctagtctacctattagtgtcaacaactgcaatcaagttttcatctttgagccacaacaaactgatcctgatatctaaatagaagagggtttgcatcaggcttcctaaatccatcagttttaagttctctatgataaactaagggatggtctttctatcaatgtgttcacgatccaagacgcctaatgaatgaaagataggctaatcagctcattgacgtttaataagagatctaacaatgctcgattcctattccagcagtttaagtaagacccatattcgaaaagacgaagcagaagctcaaaattgtaattacccgtaggaaaatcctcaggagaagagaactcttcaatgtcatcatcccgatcctctacagctacgcttctatcatctttcacagaacacttgttgggattaatccctcgtcgcaaccgcttgagaaccgggcttgtaaaatctggttcaagctcccgatcggaatctgagacagtaagtcccaactctggctcgttatcgccgtccccgattaattggtcgccggtggagctagggttttgatggatttccgattggagatccgatgcagcatcaagatcaaaccctagcgaaaacgatggtggctcaatcgaatccatgagaatgaatttagggtttggactaggagatgaagagacttcaaagacatggaattggcgccttggtgtgccgaagaagcttgagatttcgtaaaaattccccgcctagcgcacaatccatgattttaaaaaaatttcaagtgattctcaatttctcatgtattaattttcgtcgggatatttaccgccgcagaaaataattattttggaaagaaaaaaaatcagaatgggccgtgaaatttcaaagttggataaagcccataatttaatttggtgaacggtcttcttttttttttttcccggcaaataatttcattgatatcaaactgaaattacaaagtcagtatacagaacattagaaaacaaattattacataagcagatatatgcgccatgtagtgagaaagatgcacaattgggaagtgaatttgacgatgctttccttagagaagccttattcgctaatgaatcattagattcactattttccttctccatttctgatcttcctctaatgcgaaatgtatgcatccatctactctaatgttgttcttaattgtataatcaactaatcttttttttttattcggatttataaattctgatgatgatgacatattgacaacacttttattattcgattacaaatactaatttcaattaattatttacaaaatttcaaaatcatgttaaatattttgtaatgtataaatacattatacatatcgattacaatttttttattattgtttatttctatatctattgcaataatatgttttaagacaaaaattggacatatggaagttcttaattcacgagttattcattacaccgaaaataaatttgattggtgacacgatcacggtattactaatttgacatatgaacacattttatcataattgttcacacttaacgagtgctcgaactcgaattaccaaagacatcattggccttaaaaagtgtaaaataaagatgttttaattacgaatccaatgtcatcttttatttttgtatcttgtttttgttggtcgactttgtcatttatttttgttttatcttcattcattgcttataagttaaggcttgtcctccattttttgtcatttgctctcgtgacagcatctcgattcaccgtttttactttttctctaactttctatttttatttatatcattttacttcttcaactttattttttcatttttttgttagtcattcttggattagtgttttctttcattcttggaccatactaatattcagataatacttcatacattgcaaaaaaacaaaaataaataaaccaaaattcataaggtatcataagaaatcaattataagaaaaaacaaaaatcattggacaagacaacagactgaattatcgttttatccttttaaaatgaaaatcaacacattcatacgagatatggtaaggacaatttagtcatttagacacgtgtcgtgcccgcgtcgcaaaagcctataaagaatccatttaccttttctcactgaatctgaaagaaaaagctcgcagagatggaaaaatgggggattttgctactcgtaacattatcagtgtcaataatctttacttctgcggccgcagatgattacgtccgaccaaaacctcgtgaaaccttgcagtttccatggaaacaaaagtcctcttctgtacccgagcaggtataaattagaattccttaagctctcctctgttttgatgattcttgttccgaaaaaatcatgtttttaattgtctgaaatctttctattcttgtaactgcatgtgggtctctgtttgttttctccgaaagatccgatttttgggtttatgcttactccagagaatcccatttgctagtgtcccgaagtcttctcaacactagttttctaatggataaatctaatgactgtgtagttttgatcaacgccattagtaatcttcactaatcactactttgggtaaaaatggccttttcctaaatgattatttataacaatggagatgaattgtgttgtttcattctgaagaaaacattgatgcttgagtgaaattgtagctatggagtgcatgatacagttgatacttgataatgaacatcaaaggttctgtttttagattcatttggtcctgtttcttatactgagattcttacctgcaggtgcatatctcattggctggagataaacatatgcgagttacttgggttacgaatgacaaatcgtctccttcatttgttgaatatggaacatcgccagggaaatactcttatcttggtcaaggagaaagcacctcctacagctatataatgtatagatcagggaagatacatcataccgtcattgggccattggaagcggatactgtttattattaccgttgtggtggagaaggacctgagttccatttgaaaacaccaccagctcagttcccgattacttttgcagtggcgggggatcttggacaaaccggttggactaagtcgactctagatcatattgatcaatgcaaatatgctgtgcatctacttccaggggatctatcgtatgcggactatatgcagcataagtgggacacgtttggggaactagttcagcctctggcaagtgtaaggccgtggatggtgacacagggaaaccatgagaaagagagtattccttttatagttgatgaatttgtgtctttcaactcgaggtggaagatgccgtatgaggaaagtgggtcaaattcaaatctttattattcctttgaggttgctggtgtccatgcgatcatgcttggctcatacacagattatgatcggtactcagatcaatacagctggttaaaggtaaggattattgcttgacatccatctgttatgtgtatctcccctttattgccacaataggtctaagtagttagtaaaatagtgcttggttgaattaatctttttccgtgagataatcttttaagatcagcagattctgttacacttattggatttaattttggtgttatctatgatatgtgtaggctgatctctcgaaggtggaccgagaaagaactccgtggctaatagtcctcttccatgtaccatggtataacagtaacaatgcccatcaacatgaaggtgatgaaatgatggctgaaatggagcctttgctttatgcgagcggtgttgatattgtatttactggtcatgtccatgcttatgaacgcacggtatgctcagagctgtgttgaatctcaatagaaatatatctcagcttttcttcttgtttccctatgatattaaactggtttattgtgctgttcgacagaaacgtgtcaacaatggtaaatcagatccatgtggtcccgtacacattaccataggtgatggaggaaacagagaaggattggctcgcaagtaatttcctcaaactgattacttctagctttatcaaatcttcattctttctgtgttataagtaaactatgaacaagaattctctgatgtgtccatgccaaacctctgcatcttagtgtctgagattcttgagctaattcaacatattatctacatgaaactaatcacacttacggtgcagttgttatatgatgaaagtagttgatacttatcatgaagggatcgtgtttttttcactttcaggtacaaagatccgtcaccagagtggtcagtcttcagggaagcaagctttggacatggggagcttcagatggtgaattcaacacatgcgctatggacctggcataggaacgatgatgacgaaccaacaaggtctgatgaagtttggttaaactctcttgtgaactccggatgcttgaagaaaaggcctcaagaactcaggaaaatgctcttggaaccttaattatatccataaagtgagaatttcagtaaaatagtccattaaatatagaaatctacaagcttgtaatgttgttagcaatgggactcttaatcacaccattgaagaagattttcaccaactctatagaaatcatagttccaactttaaaattttgtaaacttgcactttgctttgtgttgtttttcccactatttataatcttaaaaaaaaaaatctagaagctaaagtgacatacgttagattttgtcaatgtagatggttcaacgaatgtgacatacaaaacaatgttgaaaactatttccttttgaacattactcacattaggtacaacaactgtcactatcttaaaatgcaatactaaaaaacattcttcatcacattaatataaagttgagatacatataaaattacaaattaattacaattaggccacaaaaatgatggaccgtaagtggaggattagttgtctgaagaccgttgacgaaaaaaggcggaccttttccacgcgctcaccacacaacactttcataaaatcaattcatcgatccatcgtctctatcagatcaattcatcgattgcgatcgctctttcaattttcttcatcaccggtgaaaataatcgaaacccagcacgagaaaaatgcatgatttttgcttcactatcccgtacgggatgcttctcatcggcggaggatttatcgggtacatgaagaaaggaagtataacatctttcgccggaggtgcaggcactggattattactcattctcgctggttatatcagtctcaaagcttttgagaagaagaagaattccactattgctatggttcttcagacaggtttttttcttgcaaatttctttcctttttagcgatctgggtttatatgtctttaacagatatttatgtttaggaagatttattcgtatgattccgttagatgtccatagggaagactttcaattacaagatgtgaatagcttttagtgacttatcacttgagccaaggaattgtttcattttgttttcaatttgttatggttcaatgtgttggatcatgaacttagcttgagagttgatgataggttatgttataaggttaaggatcttattggaccactaacgatctggatctgaataagtgatttgtgtgatgatgctaaacttgctattcaaagataaaaaaaaattaatattttggttgtgtttggatcttcaattgcagcagtatttgaattggtttgctaattttttccactaatgtaatagtgtctctcttggacaagatgctgttttactgcagatgaacattcaatttgagttgttagatgttgtagttgagtagctgtttttaattagtgttcttgccattgattgacaatagaaccaacctcaaagatataacaagcttgcaaaatcgattttcattatctatggtgactgaaactcatctgaatgtttctttttttttcgatacagtcatcgcagctgctctcacactagtcatgggacagcgttacttgctgactggaaagattatgccggctggtttggttgctgggatcaggtaaaaatccttcaacactggctggctagtatctttgtttgcatcaagatttggtatttttaagtttttacaccattgacttaactctagaaccatatctgtattgcagtgctctcatgacctgtttttacgtatacaagatcgctactggtggcaataaatttccagcaaaagctgaatgatggttctgctacatgcagatgatactatccgttgttgaatttgtcgattagaattctttttggtgtacacaatgcggttgtcataacgccttaatagcttgtattagtcaaagaactgcatatggtcttgtgttttcttgtcatcgtgtttttgtaaccacaaactgttttgagctatactactatatatattgagatatatctgccgtttcgatacacacttgggatctggggatgagcacatcgtaaaacaaaatagaagttgatcctcaaaacttctttgtaaccttgtgtcatcacaacaaaaaatcttcaatgtgtttgttctctccttaaagtatatcttgattcatgcagtaacaaaggcaaaactcttttgcaagagtatagaaaccagactcaagctgtgcgatggtgattcttttggagaagttggatttgtgctctgatgtaaagggaaacttaagctaaaaggtccatcaatggaggtgacacatagttttagaaaatgtgcttttctcatgctagaaatgttatggagacccaaaaatgcttttcggaaaaaattctcatgctagtagctaggctctacttaacgaggtgacagctaaaataagttctttttattccattttcagaatagtgacattcttctcacaaatatagaaaaactacaattaatgctactgcagagtctgattacgttttaagctaatttttccatttttaggacgtggtagattgtgtagattattgctaaacagctcatgagttcaataattcacttattcttcactccatcttcagcaaaaaaaaaaaaagtaagaagaaacactgaaagctctccactaccatggcgtgtcctagagtgatttttctgattctgatcacgttcttcattttacagactgctttctcaagttcttggcaaacattgagtggttagagacagagttctctcactttttatgtacgtgaatttttcataaatgttccttacagtttcttgatgtgttttctttagggaaacctccggctgtgattgctcgaggcggattctctggtatgtttccagattccagtattcaagcatatcagttggtgaatataacaacttcaccagacgtaatgctctggtgtgatcttcaactaacaaaggatggtgttggaatctgctttccaaatctgaagcttgacaatggttctaacgtcataagaattgacccacattacaaagaaaggttttctgttgatttcacatggaaggaactctctgatgtgaaatgtaagtccttttaactatatctcgtttctttaaaccctcttcttgtaagtgaaacttcttaaatcaaaatgttcaatcttgtggtatatcaactctgcaaatgttttttcccctcaacagtggcacagggtgttgtctcaagaccatatatattcgatgatgtatcctcgatattggctattgaagaagtagcaaagttgacagcttcaggcctctggttgaacattcaggtataatgtagatactcttttaacgctcagagtcttttctataagaatcataattaagtaatcttcttcctctacttatccgtctctacacttataggacagtgctttctacgcaaaacacaatttgagtatgagaaactctgttgtctctctatcaagacgcctgaaagttaacttcatatcttctccagggatcagtttcctgaagagcatgaaaaacagtgtcaagccgactgtgacaaaactcatctttaggtttctgaaacaagaacacatagaacccttcaccaaccaatcttacggctctcttgccaagaatctaagttatataagaacgttttcttctggaattcttgttccaaaatcttacatatggcccgtagattcagctctttacctacaaccccacacgtcgcttgtaacagatgctcataaagaaggcttacaagttttcgcctcggagtttgccaatgattttgtaattgcttataactacagctatgatccaacggctgagtatctatctttcattgacaacggaaacttctccgttgatggtttcctatcagacttcccggtgactccatatcgagccatcagtaagtaaaaaacacactgtttttctgtttcttcatctagttttgcattgcatatagctacatttatgattcttgttttctttccaagattgcttctctcatgtggaccctaaaagagctaaggagcaaggtaatgcacaagagaaaaccataaacatatgatcactaaatcgtttagttgcattttaacagttatgtcttgcagctaagataactattatctcgaagaatggagcgagtggagatttcccgggctgtactgacttggcgtatcagagagctgcaagcgacggggctgatattcttgattgcaatgtccagatgtctaaagacaagattcccttttgtatgagctcctttgatcttataaacagcactaatgtcatcgaaacaagcttcagaaatctgtcatcagtagtttcagagattaacccacggagaagtggtatctacacttttagcctgaccatgtctcagatacaaaccttgaagcgtaagagccaaaactacaaagcaaaatcaagattcaatataaagacttttaatgaattggctttgtttccctctttattgcagccactatttcgaatcttgaaaaggactctggtttattcagaaacccaagaaacaacaaggctgggaagtttcttacattatccgagttcttgtttcttccaaaccgttacagctctctcttaggcctcttgatagaagtggaggtgggagttctatctgcaaatcttgtgtgtaaataagtacaacacatgactcttttcttgatatagcattttttcgtttcttagaatgcagcttatttagtggaacatcaaggaattagcgtggtcgatgcggtactagatgaattgaagagagctactactcaacaaaacaagacaagtgcaagaacaatactgatccagtctactgataagtctgtcttgatgaagttcaaggagaagaacaaaatgaatcatgacgagctggtctatagagtcgacgacaacatccgtgatgtagcagattcggcgatcaaagacatcaagaatttcgcaggctcgattgtcatcagtaagaaatcagtctttccctacaaagggtttatcatccttgaaaaggagacaaatattgcttcaaagctaaaatcaaacgggcttcgtgtttacgttgaaagatttagcaacgagtgtgtaactcatgcatttgacttttacgatgatccaacgttagagatagactcttttgtccgcgatgtccaaattgatggcatcatcactgacttcccagcaaccactgcaagatacagaagtaagaaagtagtctcatcttctctttatatcttctttaactttccttgagccaatctgagattatgtttgattgcagagaacaagtgttacggcgaatttggtctgactacaaccggtgagctcataactttcgcgaatccaatgcttcttccaccagctgaagctccatatccagcactacttgactcagatgtgacggaaccaccattgcctgaagcaagaagtcagcctcctgcttcttctccatcaaaggcagaggaaaaagcaatagaagttccctttgcatttatagccatggctattcttgtgtgcttcttcatttcagtttagtgataagtgtttgtaaccgacttcgactgcagtatctgcaagtgaaccttatgaataacaatgtctagtactatatcattcttctttttaaggtttcaataagatatctagaattacaaatttagaagagatattaataggaatatggaaatggataaacttaactttaaatccaacaaaaccaaaattagcttatttgatcttttaactctcttccaatggattcttcacccaaatttaaccatccatttatcaggaaaaaaggaaacataaaataaacaatcaaacataagggaaagattctaagtggcaaactcatttttgtttgttccttctttcttttgaggccaaaagagaccagattcatttttggtttcttcaaaggccaaaccttattttcttattttctcagacaaacccttttgccatattacaaaataaaatttattcgtctgagaattatcttgatcccttttggattcgaggttcaagaacattcatgaacttcgagtaaatcaatcatcttcttgtagtaataatccaggaagatacattatcaacacacataaaacagaatgaaaatcaattgcttgttctgttgtatgtcccacagacgatttaacagacgatcatcatcgagacaaagcatcaaagactgcattgatgcaaagaacaatataactacatttgacaacatctcttttaaaacaggtcccattttctaacctttttcattatatgcattctcaaatcccttaaaagcttttctttctaaaagaagcgaggcgtatttgcacatacctgcagatagcagtaggcgaagatacatatccgaggagatagcaaaactcggtaaagggaacatcagtgctcatatttttacattcagagagctttgcgtcgctaccaagaacttcaaccccgataatcagctcggtgaaggcgggtttggaagggtttacaaagggcagatagaaaccccggaacaagtacttataacattctctctcatacaacatcgatccatcatattctgctcagtggtttgattctgattcttgcgtgtttaggttgttgcggttaagcagctagacaggaatggttaccaagggaacagagagtttcttgtggaagtcatgatgttgagtctcttacatcatcaaaaccttgtcaatttggtcggatattgcgcagacggtgatcaacggattcttgtctatgaatacatgcaaaatggctctttagaggatcatcttctaggtaacatatatctaaacaccatcacaacatactttcacttccacacattctaaagatttaccttttttatacttcagaattggcgcggaacaagaagaagccgttggattgggacacaagaatgaaagttgcggcaggagcagctagagggcttgagtatctacacgaaacagcagatcctcctgttatctacagagacttcaaggcctcaaatatattacttgacgaagaattcaacccaaagctttcggatttcggtttagctaaggttggtccgaccggtggagagactcatgtgtcaacgagagtgatgggaacatacggctattgtgcgcctgagtatgctctcacaggacagctcactgtgaaatccgatgtatacagcttcggagtcgtgttcttggagatgatcacaggaagacgagtcattgacacaacaaaaccaactgaagaacagaacttagtcacttgggtacgcaaaagttcttcaatctgaacaaaaccatttgattggttttcttaatttggttttgctaaaatgcgcaggcgagtccattgttcaaagataggagaaagttcacgttaatggcagatccattgcttgaaggaaagtatccaataaaaggattgtatcaagcgcttgcagtagcagcaatgtgtcttcaagaagaagcagcaacgagaccaatgatgagtgatgtagtcactgcgcttgagtacttagccgtgaccaaaaccgaagaagatggacaaactgtagaaggagaagaagaagaagaagaagacgaaagatccaaactttgagcaaatttttttgtttgttttcgtttgtaattttcaaatgatcggttttaggaaatttgataactttacgaattcaccaatgaaaaaagaagattaaatgagagttttcgtgttccccatcgaacattttaaaggatttgctgagaattttgtatctgggtttcaaaaagtttcagacttgactcatcgctgaacaaaaattacagaattaaaaatcccaactttatcggaaaaatgtcttttttttttggtttatgtatttttttttaaaagtgaaatgattaattaaagaagataaaaggggaaaagggtttaagggtttgtcatagagcaatggctaccagctcagctttgtgataaaacgacaaaattggacaacgataaaccctacttttatctctggaagactcaaaattccttcaagctggggagattagcttcacttactacggccatgggggtttctcttcgtcacttgtctccttcctctttctgggtttcgcgtcgtcctcgtgtttcttcttcaattctttcttttcttgtccctcgccgtcgaatcctttgcaccaggttcacagcttttctcatcttatctgttcccttttctcatttttgttcatcgagaattagatttactcattcattagtcaattgctctgttccgtaaagttggttgttagttttatatagtgatgatgattcacgttttgaggttgttgaagaagcaggttaaaaatgtgtgtttgctcaattgctctgtttcgtaagtttgttgttagttatatagtgatgattcgcgttttaagtttgttgaagaagcaggttaaaaatgtgttttgctgcaatttggtttcagtttctcacttagtctaaattgttcctgtgttaaagttatttaggagtctgcttttgattaagcagaagaatgtattttagttgaggtttggttattattctgagtttgaaggtgtttttctttgtgttgatatcattttttggtggttatgatttgcaggaaagtagcaatcataaagggaaatgcgggatattcgactgctactgattgtggtggttctcatgggtttcatcattcaggtcatcaaaggtcatcctctgttgagtttagtggagagtggaaacttaatttgggatctaagacggcgagaatggttccgccaactgtgaaacaagctggagctgtaagtgcttggagggaggaagtcaataataagttaagaggaagaaatagagaatatgctaacaaccaggatgatgcttttggtaatggcagttatattttaaaaggctttgtccccaaaatagatgatgtccattcttatggaaacggccagaactttgattacaatctgaagcctggaactgatattaccacacttggtagagaattgaatggctttatgcaaacgaatagtataagaggatcggtcgtagcattaccaagcaaggatattgaggttggggaaacaacagacgtgactctgaaacctcttaacagtgatacgactcttgacaatgccagctataagaaaacagcaaccatttccaaagtggaaaaatgcaccaacctatcgcaagtccgtgcaaacctcaagaaaatatacaatagagttcgtgttgttgataatgtgtctagtgcaaaggaaaccgtggctctgctcatgaatcaatataggaatcttgtccatgcttgcgatacagaggtattgggtcatgtgtttgctaatacattgttgttcacatggcctagaaatgcttatgttcttgacgtatagacgcttcgtttaattctgcttttactctctgataatctattctgtaggtatccaggattgatgtgaagactgaaacacctgtagaccatggggagatgatttgtttcagtatctattgtggatcagaagcagattttggagatggtaaatcatgtatctgggtagatgtgcttggcgaaaatggaagggatatcctggctgagtttaagccatttttcgaagactcatccataaaaaaagtgagctaaaacgaaaaacaacttgctgcgtttctatttattcagtgataatttggtgttacgaatcttgttgtgtgttttcctgaaaagatgattgactacttcttcaccttggctctcttttgtttagatggaggcactaatgacttctgaatcatgttttaattttgtaaatcatttgaaaatgttttcatgatcaaataacgcttataagcttgacctttccttttacttataggtatggcataactacagctttgataaccacatcatcagaaattatggaatcaagctttctggttttcatggtgatacaatgcacatggcacgattgtgggattcatctagacggatatcgggtggttattcgcttgaagcacttacaagtgacccaaaagttcttgggggaactgagacaaaggaggaagcagaattatttggtaaaatatcaatgaagaagattttcggcaagggaaaattgaaaaaagatggatcagaaggaaaattggtgatcattcctcctgttaaagagctacaaatggaggatcgagaagcttggatttcgtactcagcgttggattcaataagcactctaaagctttatgagagcatgaagaagcaactgcaagcgaagaaatggtttcttgatggaaaactaatttcaaaaaagaacatgtttgatttctaccaagaatattggcaaccttttggtgaacttcttgccaaaatggaatcggaaggaatgcttgtagatagggattatttggcgcagattgagattgtagccaaagcagaacaagaaattgctgtttcgaggttccgtaattgggcttcaaagcattgtccagatgcaaagcatatgaatgttggcagtgacacgcaattgcgacaactcttttttggtggcatttctaacaggtatgcttcttccaagtcttgatttgaactgccttatttttccatgtatctttagaagaaaccatgacattttggtatttgacacgtaccatatcactttattataaagaaaaccaaatgtatgagactctagtttaagaatctggtgaagattgtaatcttttgccttgataaaacacttgcagctctcagatttagtttgtgaatcaaattttcttcccattatgatgcaaaacaggagttacataatttcgtttcttagtgcttatttctgatactaagttttgttcatatctgatacagttgtaatgatgaggatcttccatatgaaaaacttttcaaagttcccaatgtggataaggtgattgaagaaggaaaaaagagagccacaaaattccggaatatcaaactgcataggataagcgacagacctttgcccactgaaaagttcactgcctcaggctggccctctgttagtggagacaccttgaaagccttagctgggaaagtctctgcagaatatgactatatggagggcgttttagatacttgtctagaagaaaacattggagatgatgattgtatttcgctaccagatgaagttgtagaaacacaacacgtcaatacctctgttgaatcagacacatctgcttatggaacagcatttgatgcatttggagggggtgaaagtggaaaggaagcttgccatgctattgctgcattatgtgaagtttgctccattgattccttaatatcaaattttatccttcctttacaggtatgttttttcttttaaaacaatattccctggatttacgagctacttaattatttccattagcatatccttcaggttatttttttatggaatttgttttcctaaatgacagggaagtaacgtgtcaggaaaagatggtcgtgtccactgctccctgaatatcaacactgaaactggacgcttatcggctagaaggccaaatttgcaggtacatggcttgaacttaatttaagagttagcttgaatggagatgcaatcaaataactaagcttctctaatttctctactgataaccttgtaaatttttttgatgttgtggtatgaagagctagtatatgctaatttttggattggtgtgctcaaggtcaatttttagatagaggtataggacatctagaatttgtttgtaaagtattccttttctctgtctagaaccaacctgcattggagaaagatcggtacaaaatccgtcaggccttcatagcatcacctggaaattcacttattgttgctgattatggacaggtgaaatgatattgatatctacttttctgatgactagtaagctaattcacttgttgactgtgaggtgatttttctatcttcagctggaacttaggattctggcacatcttgctagttgcgaaagcatgaaggaagctttcatagctggtggagacttccactcaagaacagccatgaatatgtatcctcatattcgtgaagctgttgaaaatggtgaagtgctccttgaatggcatccacaacctggacaagagaagccgccagtgccattgttgaaggtgaatcctggttaaatgtttttgaaacagggatttttaactcttttattcattttgcttgtaagctaaaagaatagttctattagtgctgaactgcagagcgggactctttcatccctttggcactttaagattgcaacagtcgacttatacagactagggaaactaaactttgttcctgaattcgtctaacagctggcaaaatgttttcttacttattcaggatgcctttgcttctgagagaagaaaagcaaagatgcttaacttctcgattgcgtatgggaagactgctattgggctgtctagagattggaaggtactatcaactaagccgttaagattgatatgaacaagcttgatataagataataagctcacagaagcctgttttccatctttcaggtatcaagagaagaagctcaagatacagttaatctctggtataatgacagacaagaagtccggaaatggcaagaactacgcaagaaagaagctatacaaaaagggtatgtactcactttgttgggaagggctcgtaaattccctgaataccgttcacgtgcccaaaagaaccatatcgagcgagcagcaatcaacactcctgttcaggtttgtttgcactatcatcagatcttaaccatcttgaactctatcgactttaaacctcaatcaccactattaatacagggaagtgcggctgatgttgctatgtgcgctatgctggagatatcaaataatcaacggctaaaagagcttggttggaaattgcttctacaagtaatacttctcacagattctttacataactacaggttagatgattgtttatctaaatgatttcttttgggctacctacaggttcatgatgaagtaatcttggaaggaccaagtgagtcagcggagaacgctaaagacatagttgtgaactgcatgtctgaacccttcaacggcaagaatattctctcagtcgacttatctgttgatgctaagtgtgctcagaactggtatgctggcaaataagaggaaaatagaaaaagatcttgctagtgaaagctaacaatgaggcagtgcttgaggttttttttttttttgtctcattggctctgagaaaatctgttcatatgtgagaaagggtcattttgtttatgctaatgaaagctaattgttgtcatcttctttatgttaaaagatacattgctgtgtaaattagtaggcttgaagagtcggtgtttttaatgagaaaacagagtaatcttatcaaagaaaagtgaacgagtagatgataataattacaatctcgcaagaagcttcgaggcagtatcatggcttccatttcaccatgcatagctcttctgcgagtttattctcctctaccaccaaactcaacaacacttcttctaccccacttagcctctcctctcggtttcttggaactagggttgtgaatctcgggatcagacttatccgactcggaccctccaataggtcagagccactgcctcgtttaagttcggaaagaacggcgtcgatgctgagaatgctggaatctatggcagccagtcacgtgatgattttgacagagacgacgtcgaacaggttcgtgttcacttcaagcttctagagtcaaatatgtcaatctttgttttgttacaagggcgcttataaaagcttccgtacgtggttgtgtctgagtttgtgaatgaagaaaacagaggaaatgttagatttattattgtcgtttctgtgttatttgcagtattttaactacatggggatacttgcggtggaaggtacctaagataagatgcaccatgtcgacatccttttaatgctagcagtctcggagggagacaagcctaaaattgaagagcttctcaaacgctgactacacggttaaggatgctgacggcagaaccactcttgactgagcaagcagggaggagatccgtgacttgatccttgaatccctcactaaaggcttgacaaataagtagttttcaatcgcagagttagctttatcttactaagaaagtgatgtccgttttggtaactctagttgaaatctcagtcgtctccatgtttctacgttaagttaggtcgaaaccctcagggagcgacaattttaaagtagagattgatcttatacagttataccaaaagttaacctttttctcttaccaatcgttcatcatcatttattatataacaagcaagcaaaagatttctaaatgatgtctgagattatcaccagcacggtagaaagcatacatgaagcagctcaaacatctctaaaaaccctgagaaacgcaactatctaatcttgtgatttactcgtttctgcttgactctgatttcattcactcggcagaattctcgtgcaacagtacgtactctcggctgcaaccaaaagaacaaaacatgtcaagaacagaagaaagtagatgttaactgcacagcaagcaaagattaatcacagagaataggcacggggtatgattcataatgggaaaccagaactagaatgtgtcttcattagaatacctgctgttgccaaactttatggtgtctttctcaaaaagctcataatatctttgtggctcaatgggactttcctgaaaaagtaaaagaagttctaatcacaaacgtttgaattaaccatgataaagaagcacataagaaggaatgtaattgagcacttacattgatataagttttgttggtactaccaagatccattatgtaaggcctggaaagtgacattaagggaaattaaaatttagcttaaagccagaagaggtacaaattttaagcaaaatgaaagagcagataggttttacttcacttgcttccccatcataccatctggtttctccttttccatttccctgagaaaagcacattcacagtgacataaatattaaactaaaaaccttattctcattaaatctattgtcatagatattactacttaaaaggagaaatacatgtcagaaccctaccggtactgaatgacagcatgctgcttgctgcaagatgggtgatccgtaggaatgtcggcaatccttctttcacgtccaaagaggtagcagctttggcggtgaaggcagagtggctctgttagtccaacacatttcacatgcacagaaacatacatcaagaaaactgattcagggcattcagaattattaagcaaacagaaatgggaaacaaaatgtaaaatcttatatacaatgttcaggggttcaaagtaagaatgacacgggaagccacagtcacaaacatatcagatcaaaggagctatttttcctctaagagtcattaacattcataataagattcattctaagaaaattgacaagttctaagaagtatcaagctatagtttggctactatcggtaatcacgctgttatctggacactaaaccatcaatgaccacagttttcaagtttacatggctagagtgcatcaaaatttcttgagtatctctttcattgccactacatgctttactgcatattttgtggacaaaaaattgacgttcaccacagtaagatagttaagtgaaatacatagaagacaaatgaaccactacttagacagatggatagagatgtggaagacgtcaaagactcaccattcagtggttcaccatccttaaaaacatacagtctccatcgttcgctgggttttctagcctctgggggctcattgaagaggagtgtgatacctgcaaaggattcactcagtcaaggaagctaagcatgcctatggtgaaatttaatgcgagaaaccaccgtctccattcctaggagcaaaagcggattggcagtcaaaagatatctgctgatagcagatgcttatatattgaagcttctagtctcattagatattgaccaaagaaagcttttacccagtgacagacacgtacgcatacaaaattaagtaaatatgacctgacaacaaaggcagatgtttcgcagttcaaacatgcaatgaaaacactatggcaaaagtttctagcacaaggtaatggtaacaggtgatattcttaaatgaaatggacggatcagaagtttcacctctgtatctgttagtttcttcagcaagtttccctgatagctcaaatgatggttcttcctacaagatatatcaaaattagatttgaagcgttagcatttatgcatggatgagctaagcgagctcaaaatgacattggaaattgaaaatcaatagggcttgatataatacctttttcttcgctgccagagcctcttcaactgctctcattctcgcgactgaatcttcctcgacatttctgttaacgaaaacccataacatggttaaaagaaagactgaaaaattgtaacggctaatctaataagaagaaaactcacggctcctcgctgccccctcttgcattagacccctgaaaagacaaaaggcgataaaaatgactgaagaagtaacaaaaatctgtggctcgcagaaaatgataatttgcagaaagcaaccataatctatataatgagcttttactaaaaagagagaaacatgagaagtgatgttactggacatgctgaagggaaacaaagagactatctttcttaagtcctttagcaacagagtaagcaaaaaatggctggctgcaggttctagttatagactcacgagatggataagctagattacaggattccaattatttattatgtgacgaaacaagcagcagaggctaaccttttctagcatacatcagagctaaacaatttcaatcacatttatcttttcaagcagaatacgaatatgcacaagtaaaacccaaaacaaaaaaaaaaacacttctgagattaagaacatatccaagctaaagaaagaagcagaaatacctcatcatgccttgaggcaatagctctttcaggtgaacgcctactactcctgtgactcctatctgacggtgaagtagacctctcatgtcttcctctagagtatctctcatcatctgttcttgtccttctccttttttcagtatcctctctccctgatcgtcttctcttatccccaacttccctatctctttctccttctccttttctctccctatccctatctcttcctatatctctatccctttccctactgtttctcttctccctttctctaccatcatcttctctctctctacttctcccaatttccttctctcctcgagctcttctcagtctcttcgtacgtggtgaaggagacctagaactaggagccattattggagtcagggtcgttttctctcttctttgcctttggaaagatcacaaattgaaaccagggtcagaaggaaaaggcatgtgagctccagataacacagtaaaccctaattcccaaatgcatagaaactagaaatggagcaaaagccctaaaccaaaaaacgtaagctacagatttcaaatactaaattcagaagttccgggcatagtctagggttgcaagaatcgttaagagaaaaaatcgctgcataacgagaaagaaaaattttacctggtggccggaactgtgactacttcggcggagagaagaggagagagtgaataataataatcgcagagataaaaagaatcagagccaaaacgagaagaatcatttatttggcctcttttgcaaataaatggaaactgaggggttcaatatcaaacaaattgtagacggtatggtaaaacttccattagttgacacgtgtcatatcttgtttggtagaaaggatatgtataattagggcagaagccgcttgtaacgtcgtacccttgtacttccttcgagatttttgtttcttcgtcctagtttgcaacaaagattttataattgatcatcaaacaaatcggtgagcctgtaacaaatcgagtgcaccagctttaccaccaactttgataggatagaagacaaatacaagatcatagatatagttgaggtggatagctaaacgacataaaccatcagaagtgacagtgatcttgttctgattgtaacagagtgcaccaggtttaccaccaactttgatcctctcatgaaggaacttgtggagagaaattttcaacttcgaggaacatatgtcctgaaatcccatctgtagttctccttactaccgatttgtagtcgcaactgttggccttgaagcttatgtggaagacagcattcatagactcgagctttagagacgggtcagtatgagtttctcgggtgatgctttggtttgtcgggtgatggctcatcgaatcccaaatcatgtctccttgtttatttgatgtatctttagtttcatgtatatactagtgtacgccaatattatagacgattaaaaactaattcttgtttacgtatgaacaaaacgatatgtactttgtcattattatattttttgtcaaagattgagaatatttatttttttcgcatcatagacacacaaacaaatgttgtctaatgatctaccagccggcttgtatatctaattcaaatatcggtcatgcatcatgcacttcattagtatcttatgttttgcaaaatactggctagactgtcacatatatcagaatcggtcaccgtcaccttcttcgttattgtcatacggtttcactatgacaaagtccaaattaggtcaaattttaagcgaacatacgtagcctcttacgtcatagattgctgatgaaaaagaggcaaattattataacaaccatcaaagattcggtactaactttacaaattcacacaattcgtatctcacaatctaaaagtgcaatatgtcgtacatgttttgtaagctagacaatagtaaaataattatcctgccggactataaaggttcgagaacgtggaccgactatatttatatatcaattagctatttgtggtgttagcctaatgttgccttcatcacgttttctgtttttttgttgaaggattttcaaatagatgaattgactatcatcaccttgtcacgttataaaccatatatattatcgttaaacacttagtagcagttccccacgaattacatgtctccatcattgacaaatttatatttttgtttgtaagaacactttttccttcctcaacaaattcttgtacttaatacagatatatacttataaatgttacatcaaacgctagataacggagaatataagctaaaatgaaattaatatatcttgtttcagcttctatcgaaattattttcattaatggacaatataaaatttgatccttatctactgtttctgtgaatttgtgattatcatcaggcaaatgtatcattaggcaaatgtttttatctaaattaacacttttattggaaaactaccaaaatacatttaggttcacccatcaaaagtactttatgttgttatgttatatattgtgtgctaactaaaaagattacaatttagcaaatctcaagttgatgtgtacatttataatctccactacaacaagaaggtgatccacttctcttgtatatctttatttgttcttgcacgtacataaagaaatcaaactgttcaactgccatttagaatattaaaaccaacaaaataatattataacaagtaaatacttaaacaataataagaacaaagggccaaaatcgtgccaaacctacaacattcctgacctctgcctcccccactatatagaggtcacatttgagagaattaggcaaataaaaatctaagaaccattttaatagcttctcacatctctctattataatatcaaactactcttcaccagccctcttaattatctaagaaagtctcaatggaaaactcagcactaagcaactgtgtgaggcgaacaaatttctctaatcaacagagaactatgcaagagggtctagaagagagtagttggacaatgtactttgaaacagaagatggattaggccattacgatgattcttcaatgatgtcagacgctgcttctcctatgggttgtgtcgaagaagacaccgcttcatctccttctaacagaaccgaggttagtccaagaataagacaatatatcttactatgttcatgatacatacattgatacacacattacacatacatatataggttagtctaaatggctatgcttgtctcttcagggttacagtggaatggaagacaatacgatagaagaaaaaaccatgaacaatggtaagattgaggtaagaaacttcatgttttctaatatatcttttcataaatgaaagttattttggcggctaacaaaaatattcatacgggatttgtaggagaaaatattgaataaaaatgggataaagattgaagaatactgcgcagaattgaagaagagaggactttgcttagtccctttgtcgatgttatctaactatattggttgaaactttgattactctttcaatcatatacatattctttattgtgattatatatcttcctttctctgattattttctgtaaattatagaatggactagtaaatgtagtgaaagtcaaatcaagggttgcatcatgtatcgcatgtatgtatgtgtaatgggtgtatcaatgtatgtatcatgtttccatgtgtgtaacagtgttaacatgtttccatgtgtgtaacagtgttaacatgtttccatgtgtgtaacagtgttaacatgtttccatgtgtgtaacagtgttttggtacaatcaagtacatatgtattttggaacgcctttgtaatccaatgattgaatgatccggatttagaacacttcattagaattaccaacaacctttagccaagtgggtgtgtcactcctcgtggtctgatctcttgtccttggaagttttttttctttttctctttagagtttggatatatttctatagaaaaatttaaccgactataaatccgtgagattctaacctatgctttactacaagtagatcttttcgtgtctgtgagaaggcttcaatttcttcatcaaagtcaccacaatgaccatcatgttgtccatcgatttattcatgaaagatctttcgatttattgttatctcatatgtgtcaaaatgctacttaaactttgtcttcaacctctcatataatccttgttgatctacattatctatcttgttgtggtattggggaatgtctttatttgttatatcttaaactttggaatctttgaatccttgttaatctttctacttggattcatttgaaggaatgaaatcaagtatgatgcacacaaaaaaaaaagatgtgctttaagatccaaaagaatacattttccattgttggataaatagaaatcttcgcaaaaaaaaataaaaatctttgattcaagtttaatgtaagaaagtcatcaaattatttgaaaaatgctatttacatgaaaaatgttataaaaaaaattattttatttaatttatagagattttaaagaaatatctcaaaattgcattttatcaaaaacatatagattttttcttaagaatgttacctaaatttaagaaagttattaaaatttagatttttttcttattatttgtggtatttttttctttaaaataatattattttacagagtatcagaatatagtattattatcattttaatcaattaatatatatattttttttttaaccaaaaaccaaaaaaaaaaactgatgacaaagaaaaggtaagagatttgaaacgcaaagctttcctaacagagaatcacgaaatcacgaccgcattagagaagaaagagagagagagagcttttcttcttcttcttccgctcactagatctgctccctctcgcagtctcctgggttttggcaaattgcttttgattcttctcgggtggcagctatggtttcctccaccaaactcaaatccgttgatttctacaggtgcgatcctccacatttcctcaattctcgttgcctaattcagtgcattgcttcgatatctgctgctctgatgcatgtttatacatttttgattgtgtgtgatgaattacgcgtttgattgagattattcggaatgttagttaaagtatgcattttcagctgtcgtcgaattctgcgttcgttttcgtatccttgatgatctgtttttctggggtgcctcttttttggttcaggaaaattccgagagatttgacggaggcatctctatcaggcgctgggttatcaattgtagctgctctctttatgatgtttttgtttggaatggtaaaatcctctttgggctctgttgtttatttttccaaatatgatctctttcacctctctctgtttgatcaagtatagtttgagtaaagatatcatctttatcttttttcaggagctgagtagttatttggaagttaacactaccacagctgttatagttgacaagagcagtgatggtgacttcttacgcattgatttcaacatcaggttagatatttctgcagataattggtgaacgggtacttttgttgtttattcttctttttcctctgttgatacaatcataaagatatggttttcttttttgaataattgctgtgatattttttcgaactttattttctttgtcaaatgcttgattgataataaagaaatggaatggttttctttacaagttgactgtttttgtttcttacctatatgtagttttcctgctctttcctgtgaatttgcatccgttgatgtgagcgatgtcttgggaacggtatgtctctctactcacaactctcagtcccactgttagaatgcatttctctataaatgttttgtgattatcattcaaaaagcaataatgcaaaaggaaaggaaaagcttaaatcttgacactttcttcagtatcagagaatgtatctttgcttatgtgatatatgatagactattcgtgttggcatgttgagttggttgtgcaatgatgatatggatttaatccaatgtttactgattccattttattagtaattggcgctatcaaagctaggaaaaacttaataatgctgtccggctgtaatgaaacaagaataaaattgtttggaaagttttaatcatgtagttgaaatttcaaccgtatcacctaatccctgagtccccgtttcagttgtgcagtacatcctatgttttatactaaaagcaagactgagcgcctttaacggagttatgatatatataccctcagaaaactaaatctacttctctgatgtttaatttttcagaataggttgaatataacaaaaacagttcgcaagtttccaattgatccacatttaaggtccaccggcgcagaattccactctggccttgcattacataacataaaccatggagaagaaactaaggaagagtttcctgatggtgctataccattgaccagtgctagttttgaagcattatcacatcagtgagtaggcagcttcttctttttttattgtgcatgcataagagtcctgtctgatggtttgaatatcgattaacaaaaattgaatttctttatgcagctttccaatattggttgttaactttaatgcaccatggtgctactggagtaatcgtctggtaattacttatgcttataatctttccaattttctgaagttttacttttcttctggtatacaagcactaatgatccagttggggatgtactcataataacttgtttttcctgcttgaccgagtgagaaagaatcttcctgaattcgttattgactgttatttgtgaatatattcaatcacgatatgtggaatcatagacatgtcattttatagggaaacttactttcttcatattgcctgttgttttgtgctaaaggggtatagggtttgctattttgtgttacgaattctagatgacaataaactttttgttgaataatacgctcatattatgtagcttttatgggtattgtgtacctcaattcctgtttgacattgaaaaagttgttcatgtttggttatgatgagtttcttttgtattttctactatctgcttcagaaaccttcatgggagaaagcagctaatataataaaacaaaggtttgtgttagaatcttcggcatttttattaagttgtgatattcttaagccgctggctgataatgttctttctgaaacatcttcatgttaatattctgctgcagatatgatcctgaagctgatggccgtgttcttctaggaaatgttgattgcacggaagaacctgcgctatgtaagaggtactacgaagttgatgttttcctccattttcttgtttttcttatttgattaatgagtcgtttccaagaagagaagaatttgtgtttgcacctttttaattcctgctgttcaaggatgcaattccaaggggagcagtgaatgtcgtttgacttaacataaatcgtggaatgtgttttcaggaatcacatacaaggctatccatctattcgtattttccgcaaaggcagtgaccttaggtgagaaaacatctgatatgatgtttcttagttatacacaattcgtcatttcttctacttaaccttatgtatccatgtggcgacaaattcgagtttatgtctcctaattgtgttctcggtacagtcaaatgttgacacatgtgaagtcatcaccgtaaatttgttcaaaatcttaaatttttgcttttcgtcttttcctctctaacttcctttaggttaatagaccatatatctgttggtgtaaataattttatgaaagtgtacctgtttcaatgtttccagagaggaccatggacaccacgaacatgaatcttactatggagatcgggacacagacagtatagttaaggtagacaaatccaaatttcgtttcagtatcaggaataaatgagccaacattcacatttatgtgtatgtggtgtattagtcacttagttattgaaaaacgtctagtttgtctatggattaaatattatatacatgcacagcatatctttgtgctacgttttgagtcaacagaaagcagtctaaaagttcatataagattttctttcttccagatggtggagggactggtcgcacctatccacccggagactcacaaggtggctttggatggaaaatccaatgatactgtaaaacatcttaaaaagggaccagttacaggaggttgtagagttgaaggttatgtacgtgtaaagaaggtaaacctcggactgaaaagtgaacactgaatgaatgtcctgtaattgatttgtggcatgtactgaaatttgtcttttgtatgtttcaggttccaggaaatctcgtgatctcagctcattcaggagctcattcatttgattcttctcaaatgaacatgtcgcatgttgtttctcatttttcgtttgggaggatgatttctcctaggctgctgaccgatatgaagcgattgttgccatatcttggcctaagccatgacaggctggatggaaaggcattcataaatcaacatgagtttggtgccaatgtcactgtaagtcccagaaaccttcataggaatttagagtcttgaacaatcgtcaaattttcttttactggctctcatctaactgttttcaacatgctttctacagatcgaacactaccttcaaacagtcaaaacagaggtcattacaagaagatccggtcaagaacattcactgatagaggaatatgaatacaccgctcacagcagcgtggctcagacttactacttacccgttgcgaagtttcactttgagctctctcctatgcaggttcagtcctcatttacacaaacaagagattatctctcgaaaatgtcacaatatatatactttcctctttataattactccttggttggtctgtttttgcagatcttaataaccgaaaacccgaagtccttctcacacttcatcacaaatctgtgtgccattattggtggtgttttcacggttagtaatttctcagttaccttgcgtcttcatacccgcatggattcaatggtcatttctgattttacatgtggattttttcaggttgccggaatactagattcgatttttcacaatacagtaagactggtaaaaaaggtcgaacttgggaaaaacatttgatcgtccactggaggttagaattttccattaatatataaaaccatagaagaacctcagactgtttactttgaatagctgatctacacagaaaaactcaaaaaaagagagaatttttgtttgacacaatcttagtttctttatggttcttgttctattaaaatccgcctggtttttcttatccttccattactatatacatatgacatcagtaaaatacacacgagtagaacttttattcatatacatgaaaaacaaatggggtaaaaaatcaaacaacaaacaccaattgacacaaacttggatgaagagggaaagggaaaagactcgatacagaatgaaaagggaagacaaaagagaaacttcttagtgtaggaatagagtggaagctagagcagccccaagaagagcagcgacaaatgataaggaagaagctgcgctgtttggagtgtcttcagaagtagtaggcgtcggtgctggggtcatctcaaaggttcccgagacaggtggagaaggagcggattctcctgagggagctggggctggggacggcggtgatgatgcggtgtttttgttgccgcttctatcagccatgacgatgaccacaagcttctcgtttttcttgcagttgtctttgtttccactaatgaaatagtatggcccagagtggttcagcgtgacagaagttttgccatcggcgaatttagcggttggtgagtccgtgttgcagctgtcgtaagcgtctcttgtgacttggagcactgaatcttggtttgattggtagacgaacactgcattgtataaatttgtgtcatatgcgaagaaactaagattgcagttaacgaatcaaatagtatcaatacagtgtgaaaaacttacacagagagtcaccaatttggaatctgctctgttctgcccattgactgtacacttgagaaccagaagggacggtccaacctgttgcaccaccgaccgtaaactctctagcgtaggctcggtcaacgatcataagaaaacacaagagaccaaacccacaaagcatcatgctctttaggtttcgtgccatttcgtaagctaaataacagagattttagaaaggtgaaggtgaatctagtgtggtatagggtttgatatgagatgatgaaaggcaaatgggtttatataaaggtgatgctttttgattttgaggaaatgttgcagagaagctttttattgtcttttttcaaattctaagcaaagcataaatgccagaagtgtttcagttttggaatctcatgtgacttgcttcttctgtcaatggcttttgttctttgcttcagaatctttgtgttatattttattattacttttcggataaagatcttcaagaacgaagagagatttcacaaaaacatcaaatcaaagtactaagatcttcttcatgccaaaaaaaaggccaacactaatctgagattttgggattactagagaacaacatacactttaatacttttatagaccaaacaaaagtattaatacaacattgtcaatatttttccaacttagatcaatcatataacaatctgctccttttgatccttcctctgttcagcaacatcatcaaaacaccaatcttaagaatttgaagatcaaaaaaactgatcaagaatggtaagtatagttatctcctcagtaattaatccatcattagtgcaaaagccgcgattgttgcgaaaacaaaggacattgagacactgataccgcgtctatgccctgagctcttcttagggaaatgttttggaagcgcacattcttctccattgaagaaaagctttgttgggaaaccgtcgccttcgggaatattcagtcctttgatgtttttcttggtgaaggagatgacagattgttgctttccgggcacgggagggtctcttaatggatttgttccattaacttgacctacaagatagttcataccaggcaagccttggaagataacggttcgattgcttggtggaacacgtgttccattaaaggagtaaacgttttcatatcctggacctgcctttcccatatcaatcgccacaaaccaatcctcaaacgcgaaatctctccaattaaaaacggttaaccttgcggtccaaccatttttgtaatccgtgctaacgtgccagttaatgctgactccgcagttatctggacaaggaagtttctttggtactggcatgtgattttgtttagcccaagctttagcttttaaggttcggttatcgaacggaacaaggagagcgtcaggagggaggaggagcgggttactgttagcattgcaagtgtcggtatcgatgtcattgcatccgcaagcacaagtgttgcaaggaactgcagagttgttgtaaaatgcagagaaagagacacaacatcttgaggcttgggctttaggcttggttatgttgcagaccacttgccagctggagatggcgtaggttacagccagtagaccgctaggatcagggaattgagacgggtcaacacgaaccggtggcccgcatttgtactgaggattgagaacaccgtcgattttccaatgctgaggtgggtatagagctgttctgtttaggtcaggaggcaacttgaaaacctaacaaattgagagaaaacaaaaacttcaaaacccgaagatttctacgatctcataacatattttaaacgaaagagatgatttacctgcaattgaaacatagatctagatttcgaaggatccataataggtggcaagagagttccgtttttgcaacagaaaggtaactttcctgtcatgttatcttccttcttctcaggaggcaaatcggaaatggctggttttctctgacaattcatgacctgggagaaatctaagtctttgtaatactgtccagctttgctataaaggcattccgatggatctttcttatgagtgtaagctcctcgcatagtgtttataaactctcctcgcatccattcaaaagtcaggttccaacggtctaaccgcccgagaggattatcattgtcgatggtcacttgggctaagtagttgctgtcgaatgattgcagaacatcgtagactatgttcaggtcaccgtaccttctcggtgcaaactttgtctttagtccgatcttgttcttgatcttagggtttctcttgcaacacacgtgcatactacctcctgcgcaagataacaaaacacaccgttttgaatatcacattcaccacatcttttttatttttgtttgacaattatattagggagtgtaaatatttaatgatttaacctaaattgattcataaactgcaaatgcaaacgcaattttttttttacgttttgcattgcgttcataatttccctataaataatattttgatgataaaaaatataaattagttgcgtttgaaacgatttgagtattgatctaaccttttcttttagcggcgggacattcccaaccatcgttggtgagcttaatagttcttggcatgggcgtgaccgcttttgaaaccccaaaaagagttcctgtgatctcgatattcgcagatatctgagtgaaatcaccggctgtttcaatagaggtttttaaatccatgtttggcgatccaacgaacgtggttccattgctcgcgtctagaggataatctccgtccataggagtcgcaccagtcgcggaaacgatcagttctttgtgacggaaccctatgaacatttgccatcccttaagctcttccctacccgcgtttacaatcatcgcagtcgatttaaacgcccatgattgggcggttacattcttcacgtgcgggtactctctttcacggctaccaaagttgtagctcatgaaaataccgttacaatgtgccatctccggcggtggctcagctcctcctcctccatcctcgcccggcattccataatcttggccgttggaaagaaaaagaattgatgataagaaaataaatagacttaatgaatagcgtacgtcccaaggtatcttcatccccgttttaacgtcaatagccctcatcgttatcaatctttttcttcttccccaccgccttgtgattactggaaccgcaaggcagcgagagagaaaaaaaaactaggaatcaaccaagccttttaaacaaagacgaagattgatcaacgaataaggtttaatgtgaaaaatctgtaaaaaagtatcaaaatccaaaagtttaatgcaaagaaacgaagatggttggaaaagaagatgtcttaatatgagcctctggtttaatttggtggtcacgcggagagacatttaagaatgtgtgttaaggcaattgctaattttggacacaagagtttcatatttgttgcttaacttttttttttttttttttttgagcaaatttgtttcctaactaaataaccaccgcttcgattattttcgatatgaaacaaactctggtcataaatttactcggtgggttccagaataatttggatactagttctttgttttcagttcagagtttttgagctttcttgaataaagcgaatatggatgtagtattatcaatttagtaaattttcagttttttttttgtttttcttacataaattttcttactgatttttattttatttacagtttatgtggtaacagtttttaaaatattttataagacaagttgttcaatttacctggaaacttctagattgaattggccaaacaacttttacatacatatgacggataattttgttcatgatatcaaaaactaagatttaacttgcggtatatagggagataattttgatttcacataattttgattatatcaatctgttttgatatgtataatattggtaatgttaacaaagtaaaataatgaagattaaacccatattaaagtatctgatcaatgatattttaaatttttaattatctattttaaaaaaatccgccatataactcatttcgatataaatatatctcgtgttattaaactttctattaactttaaaatttgaaagtttaaaatttactatcagaaaactgaaatcgtaaaccattgatatatttttataaaattgacgaagaagtcaacaaaaatgacatgcatgctccatagaaaaaggttcgatgtacaatatttcggggttgatatcttaactttcaagttcaatatttaaccaattgtatcgctaactgtgctaaatattttggtatgactttgccagtcagttggtctattaaatatcattttctttgggtcataaaaactataacgatcttcttcagctttcaggcaaaaataccaaaaccatgacaaaaatagatccagaagaagaacttggtcgaaaatgttgtacctgcttcttcaagttcatcttcacaactcgtctcggcgctcttatcttatggcttagtctccgtgccaagaaacccaaatgctcaatccaaaacttttacattcctgccctcagcaaaaacctaagctcacgagacaataccactctaaatttcatggttcgttgtgacaatccgaataaagacaaaggaatctactacgacgatgtccaccttactttctccaccatcaacacgaccacgaccaattcatctgatcttgtcttagtcgctaactacacagtgcctaagttctatcaaggacacaagaagaaggccaagaagtggggtcaagtttggccgctaaacaaccagacggttttacgagctgttttgcctaatggatcggcggttttcaggctggatctcaagactcatgtgagattcaagattgttttttggaaaactaaatggtataggagaattaaagttggtgctgatgttgaagtcaacggtgatggagttaaagctaatgagaaagagattaagatggagaaatctaatttttggaaaactcatggatattggagtgaatttggttttgacgatgatgttgaactcaccggtgatggagctcaaaagaaaggaagtaagacgaagaaatcggattcttctttaccattaagaagctcttttccgatttttgttttgatgaatttgctcgtattctttgctattcgttaacttgattagtggtgtttgatttcaacttttgcttttgtttttgttgatcttgattattgactctttcatgagttttgttctgtcctagttccattttcttcatagtttctaaattcgaccaagtactcattgcattcccttgttgtttttgttttaactatgtactagtttccatcaataaaattatatttgaaaattaattatccatattttgtatatgtacaattatatcattatctatctgtggtttcaaaatcaaggaacaaagaacataccaccaaaaagaaagtatatatataccaatataaccgttcaaatacggaaataattttttttttaagtccataaatgactaagggaacaatgatgaataaattccaaaaacaattactaaaatttgatattattattgcaataacgaataaatttatttacttctctatcacaaaattgaaaccgtaagcattgctaaatttttataaaattgacaacaagtcaagaaaaatgacatgcatgctccatagaagaaggttcgatatttggggtagttatcttaactttcaagatcgatactaaccaattgaatattgtattgttaactgtgcaaaatattttagtacgactttgcgagtcagtttagtctgttaaaaattattttgtttgggtcataaaaactatctatatctttgcatgaaacagcactacagtctacatcagatttataatttaaaaagacgcggtagtattttaaaacattttgtttcgtttattcatttattgtgaaagttgacatcgattacatcaaacaataatcttttctagatcattttcctaacgaatctattcagtgaaccatgtgacacaatttacattggttggtagtaatataagaatttcacatgtggtatattataaaataattttagtttcacataattttaatcaaagaaatttaatttgatatgtttaatattaataatgttaaaaatataaaataaatattaaagcttagagttaataatattttaaacttttactatagttgacacttttaaaaatctaatataaactatacctggtaaaactaaatagtttaactaaaaaatgaatcaaacaatataagagatattcaaagcagtttaacaatatctagtcttagatttactcatgcggattccagaataatttggatactagttctctgtttcagttcagagttattgcattttcataaataaagcgaatatgaatttagttttatcaatctagtagattttcagttttttatttatcaaacaattatttcagtttcttttttcaggttttatcaatctagtagattttcagttttttgtttatcaaacaattatttcagtttcttttttcagtttatgttcgataacaatgttttagatatacgataatcaagtagttcgaattaccttgacatttctagattgaattttccaaacaaagtttacatatatatatatatatatatatatagcggattgctcattgccattggttgtgaaatcaagaattaatgtggatggtaagatgtaaacttcttacaaaaagtctatttaggagaacgaaaacgtgtgaaggtcttgttttcctaaggtttcgttttgggtctcttttattttgtaccttgtaattctcttggccctttagccaactaagcacattttgggattgaatatatatttaaaaaaatatatatatatatatatatattaagaaaattacttttgaaatttgtattttgattagtgttgctaattatggtttaagcatgagagtccatccaattcgacccgagtcctatatacagtatggttcagcaaaagggtttgggcctggccatagttttttatggcaacaagctatatgaaaccatatataataaatacaatttcgtattttgatacagtcagtatgagactagaaaaactagccactaggccactgaccaaaaaataaaataagaaaaaaactaatctttatctcaccatatttttagatctttgaaattccaaaaacataattagagtttctctttccttagtttcttgtgtagtttgtatgtttcagtagggtttttttccttattttatgtaaataaatggaataagattcagttttctgttatgggacatccctcgttaattcttgttttggttctttttgataacccaaagtttatataggtttttttttaatttatcttcttacgtccattaatttgtttttgttttgttatgtatttggctaaacgcgtgtgtgcgtgtgtgtcctactgagtcgtctcttttgagtcaacttgaaatatcaaccaatcagcaaaccaaaatcttataacatcatcttcttcatctttccgacaaaaataccaaattcttgaaaacaaaaaaaaaatgaataatcaaaatgaagacacagaaggtggtcgaaactgttgtacttgctgcttaagcttcatcttcacagctggtctcacctctcttttcttatggcttagtctccgtgcggacaaacccaaatgctcaatccaaaactttttcattcctgccctcggaaaagacccaaattcacgagacaataccactctaaatttcatggttcgttgtgacaatccgaataaagacaaaggaatctactacgacgatgtccaccttaatttttccaccatcaacacgaccaagatcaattcatctgctcttgtcttagttggtaactacacagtgcctaagttctatcaaggacacaagaagaaggccaagaagtggggtcaagtaaagccgctaaacaaccagacggttttacgagcggttttgcctaatggatcggctgttttcaggttggatctcaagactcaagttagattcaagattgttttttggaaaactaagaggtatggggttgaagttggagctgatgttgaagtcaacggtgatggagttaaagctcagaagaaaggaattaagatgaagaaatctgattcttcttttccattaagaagctcttttccgattagtgttttgatgaatttactcgtattctttgctattcgttaacttcattaatggtgttgattttcaggtttttcatttcttggttttgttgattttgattattgactatttcatgagttttgttgtgatccttagttccattttcttcattgcataatttatcccttattttttttgttttaactatgtattagtttccatcaacaaaattctatttgaaaatcattttatccattttttatatgtacaagaaacaattatatgttgggtttcaaatcaaggaacaaagaaacataacatatataccaccaaaaagaagtacataattatataacagtgaatataaccgttcaaatggggaaaagaaacttataaaaactccataaatgaataatctaaaaggaccattagtttatgatttttaagcaattattccaaataaaattactaaattctatatttattgcaataacaaataaatttgattactactctatcacagaattgaaaccgtccctaaaccattgatatatttttataaaattgatcgacaaataagtcaacaaaaatgacatgattcatagaagaaggttggatattcgataataaaaaaatttggggttgttatttttcttgtccgtacgacaatatcttaacgttcaagttcaataattaaccaaccacatattgtagaatataaagtaattaagtgtgctagatatttaatttaagtatgactttgccttgagaatagtcgctagttgttctattacatatcattttggtagggtcatgaaaatgaaaactatatagctttttcacaaaacaacaggactttttaaaacatttttgtttcgattatcgtgaaagttgccatcggttactattacatagaccttaaaattatttagcagaaaaaacactaacccaagttgttttgcagctaaaacaaactcaagattagcaacatgaacatatcaaaatagacaaataagaataaagaagatagactatactatttccatttggttccggttattgtaccatgcctagtaattttctaatttcaagtcacattcaaaattaaggaagctttcttttcattaattttttaaatgtccattgaattggttattttgttgttgttgttgttaaatagtcgtgttcccaagttaacttgaaatatcatatcagctatattggaatagtgaaagcaaaaaaaaaatccatggatcgagatgatgcatgggaatggtttgttacaatcgtaggcagtctaatgactctcctctatgtatcgtttctcctggctttatgtctctggttatctactttggtccaccacatacctagatgctcaatccattacttttacattcctgccctaaacaaatccctcatttcatcagacaacaccactctcaacttcatggttcgtcttaaaaacatcaacgctaaacaaggaatctattacgaagaccttcacttatctttctccacacgtatcaacaactcctctcttcttgtggctaactacacagtgccaagattctatcaaggacacgagaagaaggccaagaagtggggacaggccttgccttttaacaaccagacggttattcaagcggttttacctaatggctcggcgatttttcgtgtggatttgaagatgcaggtgaaatacaaagtcatgtcctggaaaacaaagaggtacaaattaaaggctagtgtgaatcttgaagtcaacgaggatggagccactaaagtcaaggacaaagaggatgggattaagatgaagatatcagattcgtctccacaacgactaacatttttccaagtttgcttttcgattatttgtgttttgatgaattggctcatcttcttggctattcgttaaatgacgatgagagtgattttcattttccataggacttttccttttgactatttcttctgtttgaatattattacatgttttttgtttagattgtattagtgtagtgtagctttggtttgatgcatgtgtattaaccgtttttatccccttgtatataattaaggtcagttccaacgctttctatacaggtgtgggactgaatgccagaaaaatatatataggcttgggactggttagatatcgaataattagatatcggaatttttttttatttaattagatgtttcgaaaaataatcataaaatgttaaataaactgatctcatgatagttgcaaaaaaaaaaaaaaaaaactgatctcatgacaattgtttttaaaaaaaagttgtttttaacatatctacatagcaaaattgtttttaagaaataaatgaaaacttgaaaagttaatgaatatattaattgatagaaatagtgaaattaaaatttgaaaacctgaaaaacagtattcaatcactaaatatgttttttctgcatccaaaaaatataatgaattagtgagagattttattttctacttttttggattagctactttattattgtttattttttaaaaggtcatgaatcttgagatatttttctccaaatataggtgaatagagataatattttaattttgatagttggaacactcttattagagataatattttctatttctacatatagttttccaaaaataggttaattctcttctgaaaatagataactttaattattacattttttcaaatatagatagggtattaatgtcgttatatgtacttggcccaaaatgatcacaattttcgaaagtggataattaagattgttcagtatagatagtcaaagttctatatatggataattgattagatagttttcagtatgaagcgtaaaaatttgccaacatttcgtacaaatttgcattgttcatactaactaaggttgttttgtgccgaaggcagaaaacaaaatcagcaacacaaacatatcaaataacacacaacaggtgaatcatagcataagaacattaatggtttttataacattaaaactttgtccagagacaaagcaaccacagcttatttagtttcaatgaagtcttaaaataagaaaatgcataaaccaagttgaaaatcttaaaaagagacaaaaactgactgtagaaaaatagtcctaaaacagaaaccaatatgaaagttcctaagagaaacacatagcctgaccaattcaacaatctccgcatcacatcgatactcttgcggtttccttctactgtttcacaccgccgttacctgatttagcaaacagattacgtggattagaaagcaaacaaaagaaaagaacattgtatccatacatatatataaacaatacttacaaggaagaacgctttcggtgaatgggagcacaacaggattcctaaatccagtacgagggctctttcttctcttccacttttcagtctccatatcatatatacgccaatgtgtttcattcacacatatgatcttgttatctaatgcagttacggctaaaatcaattcatcatcttttattggaacaacatctttaaattgaaaaacccaactatatctctcgccgtcgtgtttccaaacccagacatccatgttctctggatgtagaacgagcaacccaagagaacctttcaggtttatcaaatgactagcttctgtaatctgctcgtcttctcttagtccatctgcatatgcaggcaagtttataacctcgaatttcccttccaaatctactgagagaatcttacctggcgcatctaaagaaacgagccagtaaacttttcctccgacaaaaatatgtccagttcttctgtatggcctaagactacaactcataggaagacaaggcacggtgccaatgtttttccaagaacccgtgctggacgaataaacctcgcattcataggctaaagagtgaccgtattttgtaaaaaaccgaccttcttgaacataaaatccctctgcaggtcctctttcttcaggaattatcttcccagtgcaaaaaatacggtaaactttgtagtcacttacatcagagccataagccactcctatactaggctcaaactcaaatgagggtgttccttggggaagaaggagagtctcctttgtaatggggttgcatatccatatctggagatcacagaacttgttttctacgtcttcatcataaatcatattcacacagcagatgatcccgttataggatgatatcatgtacatgaacacctcaggggttctttgagatggatcaatagtactgaggagggaaagtttacatctctttgcatccatcgaatacaacttcattgttttccccatactaggacagactaccaatgatgaattctttccagattctgctaactgtagctttgcaaggtgcttactaactgtcttacaataccgggcagatttgaccgagatctgagaccggatgcaaagtgcatctacaacactcatccgcttgatacgctgagcacgagttttgaccattttctgtttgctttctgttgctaaggctctgcatcaacaaaaacaacggttagcacagaaaagggactcaagcacagatatttatgcaacatgaatgcgtatttatatgactgtaacaggctacatcccgaaggagcacagaactgctaactactaatacagaaacgcattagtaccattcaaggtaaaggccaaaaatactgctaagaagcaccaggcaaccatcagaactaagcaaaagggtttgaaaatgaaagaaaaatgcatcacaatcgttcatgtagaagagtacttctatctgcatgtagaagagcacagaactgctaactactaatacagaaacgcattagtaccattcaaggtaaagaccaaaaatactgctaaaaagcacgaggcaaccatcagaactaagcaaaagggtttgaaaatgaaaagaaaatgcatcacaatcattcatgtagaagagtacttctatctgcatgtaccatatacacgagatcaacactgaattgatccaaagaacaaattgtgaaggatacaaaatctaaagtacctagaaacattgatcagaaatcagaataatcaaggcgatagttacgaagacagatcgaaatagagaaaacattatgcacctacacgaaatcaaggatttgtaaccaaaacaaaaaaattgttcctcagtcgtgttacatatctacacaggatctgaattgtattaaagtaattatgcaaaagcctaatcaaaaggcaacaaatcaagaaactgaagggaaatttataaatgcaggagttgatgaaatcatcgagatatgagatacttttgcgcgatcgggaatcaaaactttctcgatcgccggagaggactcacaattcgatcttcacgcgtgacggctagggtaggatagatgaaccgaaagggtgaaaccaactctttatatataatagcttctatcacttttcatctaattacaaagggacatatgtaagaatctcatctcgctgctaataacagttatgtataacatttagtcatatatcatgaatcaaaatctagcagcatagtaaaatttagtcgcacaccacgaataactacattaaaacatttctcatatacacagtcaacgtacaatagtctcataccataattaacttactatataatttgactagagagcatgcctgcaagtctgtttagagacagtccaaaaagatttactcttgtcaacagtacacatatcgacagttttatgatataagaaataatatactaatcaaaacatgcactaactttaaaggaaatccttggacactcattacaaagatgttagaattcatcactgtgaccattcatatatctagatacttaatacagaacagggaagaaaacgaacagaaacaacttttctgaagaaattgagttccaaaatgtgtgctttcagaaaatgcagtttgtatgtgtgtaacaatgactagctcaaacaaattcgcatctcaagtgcaaacatgaggaaaaagctaaaagaaatgaaagcatatgaaaccaatagttcctaggttagatggctaatcataggtccacttacatctgatgaaaattgtctatttaaattcaaaagggaagactttccagggaatcaaagggaaaaagtctgtttcatctcgtatggaactgcaaaccccactatgcacccatgaacaacagatgatagtcattctatcttagagatacaactacaagcagtctaaacttgtaaagaccaccaaacaagaatttgagctaaaggaacttctttcaactgtggaaaatgttcactgcttgtggaagaaacaagagaaatggacggacatatgaaaataacaaggaatagcaaaaatagtgtagatatgaaaaacatttctagttgctggtttcacactcttctatattcatttactttagcaaacttagcaatgttttgtctacttgttaaatgtcagtgagaaataccaaatgcaaacagagaaagaggctgaaaccaacctgtaacagaagcttgctgattcaccaactctcaaaacttcaatcacaatgatccatgaaatcagtagtgcctctttgattaccctttgaaaggaaaattcataaaaatgagtcttcaatttttataataaaagcaacaaatccaacaaaacctaaaccaaaatttcacataaaattcaattctatatggtctcagtatttcaccataaatccctaaaacatcgtataacgctttgaaaatggattcccaaatcaataaaagagtaaagaacagcatctgtttttcgttacctgataagcagacgataacggcaagagattccgattagacgcaattaaaacacccataaacggaaacaatttcatgattctattatcgggattttataatttttagtatcttctttttctgtttgtgggaatcgagaataatatgagcgaatttgaagaacacgtgtttggagaagaagaaacaattcgtgttatttctcttcgagattataatgatggccagtgttaactatataacaaattagcccactttttgatcttaaaaactaattaaaagatctccaatttcagtgtatcccgagattaaatattttaatcaacagtttttctgctaatgtaaaaaaaaacacttatgattccccttttatatcttcatttttcataaatctaagcaccaatgatgccaaaactgaaggaaaagctcaaaacttttatccaaaagaaaaaaaaaaaaaactgaaagtagttgagaactgaggaggcaaattaaaaagacagcgaatgatgtttagcttctaaacgggtcttaaaatttgtgacgaagttccacagataaaatcatcaagtgaaccaaatttactaatccacatgtaagattttggaaccgaaactagtcacatgggtcacctcaatccaaatgttaaaaaccctatcgaccttaaaagtttctatttaaaaaaaaaaggattagtttttgtctctgtaactggctccatcgaatcaatcaagccgctgaaagaagtagacataacccatgtctttaggaggatcagtcgagataccaactttgtcgtcattgaaaattacccagcggccttctttcaatatgtgagccacgtaatgaccacagtgcactgatgttcccatgtgacttactattccaaacagcttgtattctgcatttaagatcaatcttgagttagagttttattcatactgctttgtggaaaaaacgaaacactaacatttgttttgcaaaatgagatagaaagactcaaaagagggtttaagaaactaactccctcctccatctggtaatccactttgagccggagtctgcgctgaattgctagaggatacatccatgtctgaaacagatgcattagggttgttgaatacccagtctgttgctttctcaatgtctcctccctgattaaagacaaaaaaaacaaaaccgatttcagtaatgagtaaagaaaaaacagcctcgcagaaatgtaactaatttgctcaaaagtgttataccgaggcttttagtgccttccgagcaacatcttcagcaaaaccaaaggagagtaaggtatcaacgcttgattgatcaatgtcagatgtctggtgggagattggtgcatcgatgtctatgaaacataatgcctcatcatattagaaatcggtctcgagtcgtaatttagttgagcctcaactaaagacttgtggaactattttcaattacctggatcatccatgtgagaaagtaaccagttcattgcctcttcaaccccagcattggaagtatttatggcagctttctggcagtgaagctggctaaatcccattgagactagctgtgcaactatctcctcatttgccacgggctgcgctgattccatcacttcttctggaactgtatacagaaaaatccaatagccaacagaattataaggagactgagtgccataaagaaaccgtttaagggatgctgatactttttaatgattaggaaactgagtgctaattccaaaggctagtagtcatgacaccagaaaagataccacgagtttgaaacaatcaataaatggagtcaatcaatcattatttatgtgaattatgaacacaccactcctgtgataaatataacaacataccgccatctggcaacagttcttccccaggttggagtcctttgctacgcatgtggctgatatcaataacatccggaacatcaatgtatacatctgccacagtaaatcaagaaaggataataagtatttatatacagggacaataggggaacattataaggatcattgtttcagaaagaaagagaccaagtttctttggcacccagccttcctccataacaaatttccgcatgtgcaagaccaaataatctgggaaagatgtcaaaccagttgtcctgcataaaatgggaaccaaaagtcaagccttgctttcattctaatcttggttgcaaaagaattcactcggtaaaaaacaatatcttacttgatagctgttgtcattcccttcaaagcagagctatagtagtcttcaatcggctctgatgatgcaaaatttgctagacaggcttctaaaggaactcgtgggcgtactatttcatcacttgacctcctgaaaataaacaaaaaaatcttagataagcagtgaaactatgaaacagatttaaacttaagtccattgactcacatatcattctcttccaatccttttcctgctttttgcttgtgaaaggcttctaattcatcttgatcaccaaacattaagcaaaattaagaaacacgccaaacgataaaggaagaggaacatagacagacgaacaggatatacctttattagttgcctcatgtagcggaatgttcaaagaaagaatacagtcttccctcttattatatccaacctttccagacggacaaaggatcttctcttctattccaaacttgaagctcctcgaggggtctaaatctggtgtcgtgttgctagcacgctcaaccttgcctaccagatggaggaaaaagtcgagagcatcctacaagacagattggtgctagttagtatgaaaacataaaataatttcgttaactgatgccgaaaaggagtatcgttccaatacaagttaaaaaataaacaaaactccgaacattaaaaaagacatggttttcacctgctgtctcatagaagagaattctgcgtggctcgcggcaattacgtttttgaacatgcgaggaggtattccttcttgtctctattatcgattaaaaaacgaaacaagatgtaaagtcatcagaaatcaacacaagtggggtatgcaaaaaaaaaagtgtggccatccgcatacatatatttattcaaaagttaaacacaggacttcaaataaaaatcttacaggatctccagttgtagcatccttctgcaatcagaagaaaggcgaaatcaatgtactgaggctctaaaaggtggtttagatcatatacatatatatatgcatacaagcaaaaatatttcctactatagttatacctgagttgcaggcattgagtacttcccagatagtaagccgtgtccaagctttgttctacaaccaacagtgcaaggagtatgaaataaatatgcaaattaccatgcaattattcctcatggaaatcagattagttagaaaaagtgcacagcatatcaaaccaaacggagagaaaaacagaaactaaagcacgtgcatgcagatacagagtatgcacaaatataatcttaaaaccctttcatcataacgatgccaagatttcaatcacatgatttcagaaagtccagagcataaacttagtaacattttttctaacaataactcacaattgcatattgaggtccaaagttggatcagcaggagccatctcaaaagccatctttaagctctgatgtgaaaagtatctgcaacaatctcagaaccaaaagttactacagttgaatcaaagagcaaaagctt

SEQ ID NO: 1038 - DNA, 58510 bp, Arabidopsis thaliana
taaacttatcgtttattctataaaccctagctagaatctacatgcaaattccattggggtaagttaagtacgtacgtttcagtctacgcgttaattttttttgtagtgtttatcacaattagactcgagttgacttattaaaccgacatggtcggtttctttcaattttggtacattggatcggtccatgaccgtgggaagtcaaattcgtcaattaatttgagaagttgttctcgaccgacatttttggttcccgattgaggtgtgagaattagttaatactgatttgagaatttttgttttttatgggtctcccaattaatatacgttttggtattattcaaaaaaaaaaattggagttcacatatatggacaaaataaggtctctttcgttgtgagtatcctaaggatgtcaacaactgtgaatgtgatgttgatcttcatttacccattttcttctacatagaccattaattatggttatatgatttaatgcaaaatgaatcccattatgctatccttaagtatttctatatatatatatatatatgatttacatattaatttgacatttttagaataattattctgaaatgaagatatatacatttctattaaaatgttaaatattgtagaacactaggtacgtagattggtattacacattttaagtctcaacattggactaacgagtttgatcatctaatctatatttacaaagtgtatacaagtagaaattcaataaaaatggtgaggtcggtagattggtagtatgaggagattaaattaggtaattgactatgtatttttttcttttctttttgcaaataaaaaagttttgaaaattaaaaatagattgttattcttctaattattcttgccatatatttagtgcattattcatatactctaaaaactagtaattaagactgtagtggagatttctgttggtaatgatttaaagtgcttttacagttgttatttagggttttagaattttatagctacaagtatttcatctataacatgttattacatttttttttaataatctgtatgttcttgttcttcagtgaatattgtttatagaattattttggttaattcgttataaagtttatggattgattggtgattacagagctcagttgtatgacctagccactatgataaatccaccaacattcgaaagtagaacgtagaaggtaagtgaaaatcatgatataaattacaaagttgacaattataaaagaaaaataaaaattgaatgagctgtgggattatggtagacatgtggttgggcagagaggtcatgtcgccttctttgctctctctttctctccgttctaccgattgcgatgttttgtataattaccctcaaaccaaagctcttcttttattcccgcactgatgttgctatattttcatagccccacaaaatttccatataattttggtctcaattaatgatagaaaatccttaagttttattttttctttctttcatgagatcataaaataaacaaactacagtattgtcaaacatcatttacgaagaaaaactagttaataattaccaacaaatttgtagtaactataaccgattaatttgacattgccaaacatcaaaaaaaaaaaattgttaactttaagatgatcttttactattatagacggatcaccgacttatgtgacggttaaactactaatggattagtgtggattagtgacgactttgaataaaaataggaactagaaagttatcaatattgtaaaagaatgttcaaaatttacaattagtatctcaaattataaatactactacaaattgttcttacatagtaaagatataagttcatacaaatatacaataaaactatattggcgttattggtttaggttctcgaatgttggttatttcaagcctaaggaggaacgacttgggaaataagaagcgactaataatgtacttctctactggtatatggaaattacaaagttttcgaaaactactccaaaaagtgttccacatcgattatatatgatatcatgattatatataatcaaataaatccacaaaaagagtgtttggtatttttatataacacgttctagccaaaagaaatgaagataaactatacaagaaagtgttgctagatagatcgagatgaggatattgatcattattgactgatgatgatagcgaaaaggtaaattaaacaaacacatagaaaagaataagaaaatggtatagataatagaatcatgaattacttttacagcttgatcatttttaaaataaaatatacaatcaacattaatctgttattcaccaaaaaataaaagatccaaaacctaaaactttctttcgatctctcccttaaagttttcagttcgcacgacgctaaaaggattgtcagtcctttttctctgctcaagcactcgtagatttttaattacatatcccttttcagtattcatcaagtgcataatcatatagtctatgatttttatcaagtattatatctattttctagggtttcaaaaaaagatgctcttcgattgcagaaactattatgcacaccaacctcatttaaataaatatataattcaatcgtctagattattttctatattttaatacaaatcattcggttagctttaggttaatgaatcagtgatctcacttttctctttgcgcgtgtgacattatttttgaccatgaaaaattaaataattttggattaagaaattattaaataatccggtttaggagatgttttaagtttagattcgggagtgttgtaaactctaacgtttagtttcggtgacaacttttaaattcaattttgatagtcgtgtatctattatccaacaaaatctcacttagagatatcagatatatcgcaaaattaatcgagatcaacttcaatagtttcatcttctacgaaagtaaagttgtcgccgccggcgtcttcaatttaacgtgtcgataacgttccatattcgagtttgcatatgcatgtcactggaaataatagttaaatcatctaaatcgcatccattaatgatttgatcatcataaaatttggtaaaaaaattacctaactcaaaagtaaaatataaaaattaatcgtttgagtagttaattagtttaccggtatactagttaaaagtttttttcctttgacggcgctcatatatatgttttaaagtatatcaaaatagggatttaattcttaaagttacactaatcctaattcttaaagttaaccatccataccaatttacagaagtacagaactagtgcttgatacagaggaacaattgatctcatcgaaagttgggacctttttaaaaataatactattatatatatataataaatatacaaatatatttaatatttattctatatataaatatgtgcataataacaaatctgagtatgaatagtaggaggggtgtatagggctttcaagtcttttcttacagaaactatctataactctagcagagagctcattatagaacagaacagaaacagagctttctaagtctacagcacagaaataaacctcatttacagactgttttactttctttcctttttgagcatttcttctttctgtttctttcctctgttttctctttctttccctttttgggtgtcatctctttaagacagaagaaacgtttctcagagtttcctgtgaactcatctgtttgttctcttcttccggtttcactttttcatgtcctgccgttattacaacgaggttggtttaaagatcagcttttatcatttttccctgcatgtaacaagaaatatttaggtttcatgtctgtttacaaatatgctctgtttctaagtatgcctctcacatttgtctttgttttgggtgtttttaggattgtgtttgatccgatggaaggattggaatctgtgtacgctcaagctatgtatggaatgacacgagagagcaaaatcatggagcatcaaggatcagatttgatttggggaggaaatgagctaatggctcgagaactctgttcttcttcttcttatcaccaccaactcattaatccgaatcttagcagctgtttcatgtctgatcttggagtcttaggtgagattcaacagcagcaacatgttggcaacagagctagctcgatagatccatcatcactcgattgtttgttatctgcgacgtcgaatagcaacaacacctcgacggaggacgatgaaggaatatctgtgcttttctcagattgtcagactctttggagctttggtggagtctcatctgcagagtctgagaacagagagatcactactgagacgacaacaacgataaagcctaagcctttgaagagaaacagaggaggagatggaggaactactgagactacaacaacaacaacaaaacctaagtctttgaagagaaacagaggagacgagacaggaagtcactttagtcttgttcatcctcaagatgattcggagaaaggaggtttcaagcttatatacgatgagaatcaatcgaaatcaaagaaaccaagaacagagaaagaacgaggcggttcttcgaacattagtttccaacattcaacttgtttgtctgacaatgtcgagcccgatgctgaggcgattgcacaaatgaaggagatgatatacagagcggctgcatttagaccggtgaatttcgggttagagattgtggagaagcctaagaggaagaacgtcaagatatcgacggatcctcaaacggttgcagcgagacagagaagggagaggataagtgagaagattagggttttacaaacattggttccaggtgggacgaagatggatactgcatcaatgcttgatgaagctgctaattatctcaagttccttagagcacaagtaaaagctttagaaaacttgagacccaagcttgaccaaaccaatctctctttctcttctgctcctacatcgtttccattattccacccatcttttcttccattgcaaaatcctaatcaaatccatcatccagagtgttgacagattataaacttttgagtttcatcatcatcaacagaatcatggcgtcttgattgttttagcagttctcaagaaaggcaacttctgtgacaagggtggtgtcgggcagtgttgtttacactttccagtctttgttttgcatttctttttatataaagtttgtattttatatagaatctgtggaattcgagggttgaaatattgtgaaaaacagagccgcaagaggttaattacagtctctgcaatattttcaaccttttattactttattagagtaaagatagcgtaagataattgcaattatgaagcgatgattatcaacaaaagtgtttagaaagtgcctccatctctctctacttaaaaaagtttagctttacttgaagaactcttttggagtactaaaatataaaattaatattcatcctctttttttggtactcaataaactctgtctgtctctgtaaaatatgtataaatttcgtatatctataatgcaaggttatttaatttgtgttacttatccatataaaaaaacgattttagtggaagaacttattattgtcttataattttattttcacataagtgtttttttgtctggctcaaatacaaaacatagtttggatggagtttagtaagagttaagaatgttgaaggcgtgcaccttgagaatataacttcacctgactcgtacaccctaaaatgctcaccacatgcttctctatctcactctccatctttttattcttcttttttgtcttttggtttttgtcttatttcgtccctaaatctccttaatcacattctctttcgtttaatagtattttatgaagttcttttgatggatgtgtttttttgacttgggtacattgactatcaactttttatttattcgcaataacacttacttaattgctattttcaaaataacatgctattttgttctaagcttggtttacattaagaaagtaacatgctcttgagctggcttgttaattatccgcgtatttcaccaaacccaattaaatgaatgttcaaaacataaaacatgttatttgaatatgaaaatgtgaacattggtactctatacaaggaactatatttttgtaatgtgtttaattccgtattttaaaatgtttgtgcctattgcgtcgccaaaagaacacacaaacatataacaattttaattttgttttccgcatgtaagtatatagggcaggaatggtttttcttggagcatgcctatatttctgttttattatttgattgtctatgaaaatctttgtagaacgtgaactccatagaagagaagaaaacggtttaattaaactaaaccaagtttccatttggaagagtctcataaggcctattgcaaccagctattggaaagaattaaaatccatcttgtaatataataccatagtagtcattttttgtgttcttaaaattaaattagttatcaacccaatgaagcaatcgaagatgcaaccgactaggtctggacgtttggtagtttcttatgaaaagaaaggtaacaatgtcgactaacaacatttgaagtcaaaatgattaagtagataaaatataattccgttatttaatatcataaaatcatatattcaagttgactccaaattacaaacagaaaactctaaaaagcaattatgtagtatgtaaaagtttagtatataataatcaaaagaaaaagtcaggattcgatgggtgttgcaagctggggagataagagagattgatcattcatgttgacttttttaattgaacggttatggccttttgtttgtttccatgtaacattttagacaaagatgtcccttcgaagcaacctatttttagaaagttttgacataacctaaatcactctttatatcacaataaatccgacgtttttggtcctactaatcataagagaaatcctccaaagttctaatatggtccgcaaatcaaaccaacaaccttattagcacacacatgtccatttattaaacacatataatcaagaaaaagtatcttctcaaatcagaggataatacattttggtgacgaaagctggatatttttgatttcatcaacttggcaacttcttcacttatattggaaaaaacaacatccagttgtccacaatcatcaaatgatatggtatacctctctagtctctattatcatcctcatttgactttattattcatcaacttgttcttccttcagaaaatgaaatccatttcaacttttttttttactttaaaaaaaatatattttttctttctctttaattattccacatacaacaatacactgataatctttacgttaaatttattatgcactaaattagaatgctactagatatcaactttgactacatcgtaaattttggtggacaaatatgatatatagttaaaataaactaaaaatggaagttgttgtataaaatgtacgtgtataaatcatttgtaatgtcttattttggaactatcatattacaaataaataactgagtcagttagaaaaaccatacagagcaataggcccaggatgagtcaaatatgatttaacgtacagaacaagtcacttttatatcaaacaatgacgtgaactgagatagaagatggtcgtagcgagcaattggcaggtgcgcgcttcttcccctcgatcatatttgagtcatcccgggcctattgctatatatctagagcttcgaaactttgatcacaagaaacgtataaacatgtctcatcatttgctttgtttattccactaagattacatccatttctactacgttttcattctgcaaaataaattaaagagagttatgattggactttatcctctttttttaaccgtagatcgagtctatgctgctaatcttgattccaataaatcacattcattaatgacataaattcattacaaaacttttaaaattttcctttgaaaataacaaaaatccactcaagaaaacaaagataaaatgactcttgcagtctaacgagcatcaggggtagctccaatatcaaagttcatgctgacttctattgaactctctgagttcatgttttgactcgttcctcctcttgcgttttcatatgacaaacattcgtttaattcgataacaacttgagacattgttggtcttctagctgaagaaggatttagacatgacattgctagttcaactgctctccagacagaaccagagtcataatcaccataaagttttggatccataatgttttgaatgtctccttttgtaagcattaaccccacccattctgctatatgtggtttttcacgactttgattgatcacaagttggtttgtgatgatctctaatagtacaattccaaagctataaacatcacttttctcgttcaaccaatttgttcggtaatatctgcaaaatcaatatttatcctattaaaaataaaaaatatatatgatatcctatcaagtgatgatactcatgatagatgaaaactagcaattacccttaaaataaaatttaaaagaaaatcattgcccaacaattatgaaacttactctggatcaaggtatccaggagttccagcaacaactgttgacacatgagtttctccttcaattggaaaagatctcgaaagcccaaaatcagctagcttagcatggaggtgttcattcaacaatatatttgtggttttaacatccctatgaaccattggtggtttgcatccattatgcaagtattccaaacctatgcaacaaatttcattttcatcaagggttaagcaaatgaatagaggatacaagcaaaaattatattaaaactcatatcaaaccttgggcagactcgacaactatttttagtctagtttcccaatttagaatagatccacctcgctttcctacatttgaatcaacatataaatatgtgaaaacaccacaacaaatatgtatttgtagcaactataaatacttacctgacatatgttctctcaagtctccgttagccatgtactcgtagataagagccaagttttctccttcatcacaatatccaacgaggccaaccaaatttttgtggtgaactctgagaagaagttccacctagaggagtggaagagcaatacatcaaaatttgacatgttactctaataaaacgatagtgtttctacaaacgtttcttaataaccttgctaaaacttacctctgctttgaattctttatatccttgagaagatgagtgtgaaagcattttaacggctacttgttcagtattatttacagttccatgataaaccattccaaatcctcctttaccaagaactctttcaaagttatttgtcattgttacaacctccgaatatgtaaatcttctgttcttagtcattattgccgactctgaagatctgattgttctaacttctgatacttgagtatatgaagatggacctaaatctaatgttacaatgcaacagtataatgagactttttatacatagtgaacatatgtattgcagtattcaaggcaatttaaaggttctttttgtgtataccttgactgtttgatgtctttttctttttgaaaataaaaaagaacgccaatgcagatccaagaacaaccacaaacgcaactgatgcaacaatcggtattacaacattcattttcttggcaccaccattgccagctttgtttacacataatccatccggacaaatcagattggcgtttccttcaagactatgagttaccaatgttgaggaaaaaaagaaatttaccagtcatttaggagacttgagcacaaattttatatagtcatgaaaatattatatgagaaaagcttacattagctttagtcctttcttctgtaaaaggatttgaggaatagagccattaaaattgttcccacttaaatttctgttaagatagacacaatgttagaaacataggcaatcttgtagtgcgaagaggctaatagattataaaaaattgtcttgtttaaaacgactcacattactaagagtgattttatgtcagcaagaaattcgggtattcctcccgtcaaattgttatttgacaagtctctacataagcatttgtaagtacaaaaatatgttataaacaagatacaattaaggtgaacaaatagttttcattatgctcagttttgaaatacgaaatacttacagttcttgtaggtgtgtcagattctgaatgccttgcgcgatgatccccgttaaatgacttgacgataagtttctaaagacatatttatgcatgcacacatttcatttacagatgataaaatcatgtgacataactaatacaataatttaagattgatcttacaaggaagtgacaataggcggcgtggagttatctagattattgcagtttaaaccctcccacaaaaactgtttaggaacgcatggatctccttgccagctgattttacttaatccataagtgctttggatactcttgatagcagcaactagaataaagttattgttgcatcaaaaaacaacccatgaaattatatttatagaggaaattgattgaaacatatagacttaccatcatctggatttgtttccatctgtggaaaatcgatcacggtgaaaacctcaagagcgttcatgagaggaggaagagtagacttaggtgttttcgtcaactccaagaggcatgtcccatcttcacattgttgtggtgtcgaatagaaaatggtttcggtggctaacgttttagggctgtagcgttcataagcaagttttccattcaacgtcactttgaattctcgggtatcgagggaccgtagagtttgaatctcggcaaaatgcatgtacacataaaattgggttgtggaagatggcaataaccatgagaagttccatgttccaaaagtacttataggcgttgaggctgacgccatcacaacttctggtggtgcataaccattagaactgtttatattcagattggttgttaactctgtccactcttttgcatcaaagaatggataccatttacgatcattgacatcatcagggtacctatcaaaaatatttttgtcatgtattaaagactaacattttacttaaaaacaaacttactgaaacaaatcaaaatccatattaataaaccaagatgctagaaaaatgtctataccaaatgaacccaatccgagttttgtgcaaccaaaaacctaataagtaattataatctttaaacttcaatatatacactaaatttattaaaggtttaaaacaaataatcttcgttaaaaagtttatcctaaacggatcaaacagaaccagaaaccaaattttgttcatgattaagtgaaagggcgtgattcataccgtatgttttggcctgaaccgctgaaataatatcggaagaaatacttcagagagccactctgagtattgtaagtattgtttttaagtggtcgtagctctaacgtattaatcataggtgagcttgttcctgtcttaacaagacagacctggagagacttagatatggtcttgtggataatctcctggatagtaccattggtccgtccattcatatcaaccgttacccatagattcggaccaaggtaaagatcgaaactcgggggattgttaagaccatcgtagttaccatacacaaatacagctttgatcagatagtttgtgtcttgcgtgacattcaaggtatagcagtttcggaatccgtccgggaagtatctaagcttcaaagacggtttactgaagatcgactcgaacgctttctggattcttccagttttgccactctgcacgaaaccatcgtccgtcgagtatgttaatccggttgaaggatcgttgtaaggaggctcatttggcaatgacccgcaatccaaactaatgaatcctagtaacacaagcgaacaaaatgtatcagaaaactaagtaagaacataatttcgacgaaacattatcaaaaacaacaaagaaatgtgtatatgtatatacctttttggtcttgtgcttcaacgaggtgtaaaagagcatagaaagagatgaagatcaacgcacataacctaattgcttgaggatggtactccattattcttctatgaaacaaaagagagagacatttacaaaaagaaaaagcagaggtttgagatatctaggcaataatggaaattattgaaaactaataagcacgacgttatttttgtaggtcaacttatgaaaaaaaatatgtatacaagagtcggttgtctcgaacctaaataaaactaaactaatatgtttgatttgattaacattctataaagatttaaaaattaacgatccaataatcttccaatgccgtttagttgatgtcaatgtcctgttttttaacgttgtattcgtacgtatgcataatgcactaatatatcttattttcgactaaataaatcaaattgaagtaaataatataacttggtttttgctttttgtattcaattcagttttggttaggcgcgtttgttaggtttttgatttttttttcttttcttttagtttatatacatagaatccatattgaacaatatcttggtttggtttggttcgacacactttagttttaatttgaattccaatttccagaaactgccatccatattccatggtaagaaacaaaaaaaaaaaaaatccaattcaatggcaaatgaatagccaaataggtaagctacaacgtggaagactaattttacattgtttaaaaagaagcaaagattgtgaggatcaaaatggttccaaaggcccaacaatcacaacaaactttgataaaaaaaagaagtaaacgtagcaattggcttcgctagctggaagctggtccagggaggatacgtgcatggaacacacaacaaaaccttcttatgatttaaatggtcgttgacttttgacccttgtggttttttggacaaaaccctgtgtttttatttcatttctataaaaaagatttatctgcctttgttatgttttcttcttattaattaagttatcatcggacaaagttcaattactagttattaaaaaaaaaggttctatagttattataagtttgtaacaaaaaaaaaaatgttgtcagaatcagttgataacacatttgtctaattccttcaattttgggccaatgaaattcgaaagcccaaattacataatgggccgaaccatattattctctctctcgctctctttctttctctgtgctcttctccttcacggcgaagtgactcacttccatggattcctctctgctctcggcggctacggccgataccttcaacggcaatgcggcggatcaaattcctcctccgttacagcctccgggaacggatatgactggaatttccttcagggatcagctctggatcaattcataccctcttgatcgtaactacatcttcgattacttcgctttgtctcctttctacgatacaacttgcaacaatgagattcttcggagaagatccattcaccctctcgatctctctcacctctcgtaagctcctcctcactgctctacagatagggttatgttgaaactcataaaggtttcaactttaggtcgaattagggtttggtctcacctgggatactgttagagaaatggagatagatttaggtggagaatttagtgacaatgtttgattgaaaccattgtgattatattatgtaggaagatgacaggtctagaatatatgttaactgatgctactgaaccaaacctgttcgtctttcgtaagcaaaagagagatggtcctgagaaagtcacaccgatgctaacatattatatcttggatggttctatttaccaagctcctcagctttgtagtgtcttcgcagctcgagttgtaagtttcttcctcttttgatttgtgtgttgctgatgatagttgtctgttttagtttctgaaacgttttgttttcttctctttctcattttgtatgtttgaatcagagtcggactatttataatatatccaaggctttcactgatgctgcatcgaaattggagaccattagacaaggtaaggtttcgttctcttccaaaagatcgatggctttgtatgaaactggacgaaatatatatgttgtttgtatgaactatttgtagacttgcaagtgtgcttagttgcaatagtcttaagtttatcagttaacttaggaagctactttttgttgattttcaagctcatggccaatggtgaacaagtttatggctttaacaagttcttgtgtaacagttgccctttgctgcaacttgaggtagataaattacttcatcagtattgtgattttttatctatatgttctagttgatactgaaaaccagaacgaacctgctgagtcgaagcctgctagtgagacagttgatctaaaggaaatgaagcgagtcgatgtcattcttacctcattatatcgcaaggtacatttgtatttgtgaaaaaatctacttactgtatcactaaagatctcttgttggcatgacgaatgttactgactctacttcttatacttctcttctgattgtgagacttgcttttttgtgttgcgttgtgcagttagcgccaccacctccacccccaccctttcctgaaggttatgttagccaagaagcattaggagaaaaggaagagcttggaacacagggaggagagtcacaaccgcctcaagttgatccaattatcgatcaaggtcctgctaaaagaatgaagttctaagctcatcaaaattgtttcttcatctatgcatgtatagaatttttaggtactagcaaaggctcttctactttttcgcattgtttaatctgaactccttacacaattgttgacatgattacttctcataaagtttcgcatatgaaagtcatctcaccgcaactacctcaaggtcaactaagcaataattgcagcatgtatttatttcagtatctatcatgtagatggcttattttggtcaacggtaactagatttgatcttcttggccaacttgttcagtttacttcctctctcttccccggctatatagtcatcttcacaccatggtttcaagtttcaacagcagctaatcggtttcgttcactcacattttcatattcatacatcttaaagctgcgatgaaaaccgggtcagcaaggtctaccatcctcctatatgttttatttctcgcactggtcttgtctccaacacttccatgtcaagcagctagtgtccctctaggaggtaagctaattaatctctgaaatttctcccatctactatcactctctctgttttggtttttcatagggagaaattgatttattaatggaaaagtgaagggcgtaagatgatggcgccaccaccacctattctcatgtgtacacagtgtgcatgttgtgcaccggctccacccggttcttgctgccgttgtggctgttctggtggtccctgaagactctgacttatgctatccaatgtgctatccaaggtccttaattccttataatatgtatgaacacgtaaacaaaaagtgtattctgtgttttgaataataaaacctttgggttctgctcagtacttatatgtttataagttagttttgatgtcctccttggagagttgatgaactactgtaaaaaattaaaaatgtcgaaatcctagagttcacaacaatgtcgaagttaatctttcgggttatgaatgtaaaaccatgtttacaatacatgcatctttgtttgaagtttataaaagtcagctaaaaatggtacaaggttatttcttcatctatgcttgtacagaatttttaggtgctagcaaaggctcttctatcatcgtttaatatgaactcgttacacaaagtcatctcatgcaaactacctcaaggtcaactaatcgcaatagttgcaacatgtatttattgcaatatctatcaggtagatggtgatatcagaagatagtgtatatcaattaccgtgtgaaatcaaaatatagctgcatcatcaaaactaatggcttattttggtcaatagtaactagatttaatctcttaaatattttattgctaagtcctcttcttgaccaaacgtcccggctatataatcatcctctcaccatggttccaagtttcaacagcaaattggtttagttcaataagattttcacattcacacatcttaaagctgcaatgaaaaccgggtcagcaaaatccaacatcctcctatatgtttttgttctctcacttgtcttgtctccaatacttccatgtcaagccgctagtgtgcttctaggaggtaagctagttatctatgaatatcctccactatactgtatgtatgactctctctctctttcagttttttagagggattaatgattttatttttcactgaaaaggtggagggcgtaagctgatggcgccgtcaccaccaattcgcatgtgtccacagtgtgtatgttgtgcaccggctccacctgattcttgctgcccatgtcgttgtccaggcggcgcctgaagactgacgtttgctctcaatcaaatgggttattttgatgtgttaaatatgtgtaatctttataatatgtatatataagtaaataaaaagtgtaatctttgtattgtgaataaaataaccttgggttatgttgaatagttttactataagctagttttgatagtaacacacttttatacattgttttcttagttggtgataatgggatcacaaaagatttgatattatttggaaagaatgtttgacaaaaaatattaagaataaatgattcttgtttttagaaaatcgtgtgaaaaaccctcttcattatcccataaccgatacgtatcatttcaatcttcatcttcgtcacttacttacgaaatctcaaatgaccttttcccattattttatgttttaattgatttgcatatttgttgtgttgtgcatgtatatatagacttgactataagcatttgaatgtaataaccaatactcacttgtacatgaatttttttttatagttcttcaagatgacgagtaaacatgtttatttttgtaaaagtccactttgtacagtaacacgcagccaaacagcgcatgagaaaaaagaagtaaaaatgtattttccatcgttcatagttcaaagtagagtgtagagatgtgcctcttccggtcctatcactggttttgaagctacaagtaagagataacaaactttcatgagtgttactacagcgccgtcattcatccgaaactgagatgtgagtgacaaataagattgatgaaaccaccaaagtggtgtcgtggaggaaggtcttagctctaccactaagccaagcaagatagtcgaaacttcacataaacgagttaatccggttgcgatgacacttttttctaagagaatttgctaaaactcaaagtattactgcaattaattgtcttctacactacaagactatatgaagtgtaaagtctcttgattgagtgaaaaagttaaaacttgaaaaattaaatttttcttcggaccaatcctgaaaacgtgtttgcgaaatgttaatacatacgtgagatcacacctagttttgtagaaaatatatcaactatattttttctgtgacaaaaagttttatattatattaatttggatttccaagtagatatgcaactttgactaaaaaaaaatataatttgattaagaatataatttgcaactcgaatatgcattattataaagagttcctattatcaacaattggaaaaattcgctatgagtcacatgacaagatcacaagatagcatacttcgagccttcaattactacagacaaaagtatttaatagtatcgtacctttgactttaaacatcctttgtatgttaacaatattactgacgtcttaagataattcaagagtggcaaaaaatccatgcacaaaagctttaactacattatctcaaattaaaaacaggattcaaacaacaacaaaagttgaacaaaaagagtaaaagaccatgggaaaatgtattattttcgtcaattcttatctccttattttatctactaacattctataaatacacacttagacatataagcttatagaaaccaaaaaccatactcaagactcattatgactagctctatgaagaaaatgattcttatcattttcatcacaaccatggttttatctccgacaagttttatctcttgtctcgcaggtaagtaaactgcttagttaactgatttaatttgagaatttacctatcaatttagagttttttttatgtatctctattcgcatatgaagatgttcatgctactgaaagtcccaccgaaccagcaggcaagaacattgacaaacctcatcactaaataatcagaacattaatgagagcattttcaatattaatttatcttatttgtaaacattttttaatgattattttgtagcctctcacgttactggaggtgataaagtagcatgtcctgcttgccgctgctgtgaaggcccaaaacctccaccgggaacttgttgccgttgttgttaaatgttaattaagctcaaaaatcaacttcctcgtaaactttagttaagcctcttaattactattagggttcaatatctacttatgttgttgtagtgttgtgtattcgtacttgtcttgaccaaataaaagtgtagctagccgcttaaatccatccgttgttaggatggtgctttggccaaagtgattcgaatataccttttatacacaaatacatgtttagaatgatgtgttattgtgttacacttttaattggtctttaattttcacacaaacatgcatgaataaatattctaacatatcatagagagtgttccacatcaaaaccaatttatagtggttcatggtaaaaaaaaatcatgagtctggtataaaaaaaacttaccataacatcatgagtatgttgtgtgatagtgacatcaaagagattgtgaaaatactaagattagaaaataatttgagaaaacatcagaaaaaaaatggcggaactgttgttggtggaaactccaatcccacagcaaaagcactacgaatccaaaccattcccggcggtgatatcaccaccgtctgcttcgattccaattcctgctctgtctctcccactattcactcaaactatcaaaactcagaaacactatctcgattctctcttgcacgaatccggagcagtgctattcagaggttttccggtgaattccgccgatgatttcaacgacgtcgttgaagctttcggtttcgatgagcttccttacgtcggaggcgctgctcctcgcactagcgtcgtcggtcgtgtcttcactgctaatgaatctcctcctgatcagaagattccttttcaccacgagatggctcaggtattgatcaaaatcagatttgggtttatgtgaatttgattttttacatctaaagttttgagctttattgaatttgattgatggtgtttgttaggttcgtgagtttccatcaaagttgttcttttactgtgagattgagcctaagtgtggtggagagactccaattgtgttgagtcatgttgtgtatgagagaatgaaagataaacatccagagtttgttcagagattagaggaacatggtttgctttatgttagggttttaggtgaagatgatgatccttcatctcccattggacgtggttggaaatctacattcttaacccatgacaagaaccttgctgagcaaaggtacttcatcatcacttgtagattctcacagtgtatgttcgttgagggggcttcttgataacattgatgaaacttgctttgatagggcggttgatttgggaatgaaactggaatggacagaggatggtggagccaagacggtaatgggtccgattccggctatcaaatatgacgagtcgagaaaccgtaaagtatggtttaacagcatggtagctgcttatacgggatgggaggataagcggaatgatccaagaaaggctgtgacttttggggatggaaagcctttacctgcggatatagtccatgattgtcttaggattcttgaagaggaatgtgttgctgttccgtggcagagaggagatgttttgcttatagataactgggcggttcttcattctcgaagaccgtttgatcctcctcgtcgagttcttgcatcactctgcaaatagattatgttgtctttcatgcataaatcaaagctttggatttcgaatttagaggcaacaacaacactgtacatattttggatacatatatgtgggtacatagtaacccatttccttattctaaacatgtcttaactacactgcagcagaaactatacaacataagaagaaaccaaagacaaactcgtcgtccttcttttattgtccgcgggattgaagcttttgctttaagatcttgcaaagaaactcgactcagagctcctcgtgtagctttgaggacttagatggtttcaggcctggtttgaggaattcagaaagccattttgcggattctttctccatacgagtcaagttgttcttgaagtctatgtagtaaactccgaacctagctgtgtacccgtcttgccactcgaagttgtccattaaagaccacaagaaatacgatgtaacattcaccttgtcttcactgcaagatacaaaaaattgaatctaaatggaaaaaaacatttgtacttaaaagatcaaagcttacaacaaagtgaggaactgatctcaccatatagcttcattcagtgccaaaagatgcctctggagatagtatttcctgttgtggtcgttgagagcaacgctaagatctgtatctttatcgccaaggtcctccccgtagcctataaaaataagattccgaaaatcaacaaaagtagaaaaacggtatattataataaaagaagattttgaattctttagtaaccattctcagtgattatgatctcagggctgttgtatctgtccttaatgtatttcatgagcttcctcaaacccttagcgtagacagccatcttagcagtgttgggctacaagaaatgatagttgtaaagtaattaaatcataaattaaaaaaaaaaaaactttttggttaaggaaagttgtttacctggctaccaattttaatggatccatccacagtcttcgctgaaaatgtttttaagaatttagttttagtagattactaaagttttggttttgctagttatgttaacacattgacatatagcataatatatcatttaacatgatgtactattgtattaggtaaggaataacgaaataaacgaatcttacgttcaaattcgactagagcatctgtagcccaagtcgggttccgactatcaaccttctggtcagcctttgcaaagaaggaagtgtaatagtttattcccacgaagtctgtcgaatctttcagttttgccttttgggctttggtaaatcttggcaaccgagatccaaccgcgtctttcatagactgaggatagtccccgaacgtggtaggatccaaatgcctaaagaaaaagaaaaacacaatgttgcaattatgtatatatataatcaagaataacattaaaatatatcaagagttgatgatttgtgtttttaaccagccaatgacgaaatcaagcacacggtttacagtcgcttgacctccttccacatcttcgggttcaaaccaagctggactatgagcgattccgattttaccacctttgcactttttcaaaaaaccgaaaaattaataagtaaaacttttaaaaaagttggtttatatgtcactgtggagaaacgaatgtgattaaatagggtattctgtttttaccttttcgcattttcggaaagcatcaacagcttcagcatgacccacgagtaaattgtgactgacaacataaggttcgaatcctgaccgtccatcttgacaaagctttccaaactctttgacgtaaggagaacaacgtcctggtgctttcttcccaacgtcgtagcccgaacggctaaagacccatggctcgttgaacgtaatccagtttttcactttgtccccatactcgtggaacgtgaagtttgcatactccacaaaatcaggcctatatattcacattttaaagtaagcaattatactttgatattacgtatagtagaaaaattactattgtacgaaacaacttaaaaacaataatcaaatgtgaagatatgacatgtacacttacacaatacgttcgcttaaaaagccaccgtattcatcttccaaatcggcgggagtatcccaatgaaaaaccgttactaatggtgttatgtctgaaaaacaataatttagtgagagttagttttttgcagttactatatgttactacgataaataaataaaaatgtagatataattgtggatatatagagttagagagagtctatgaccatttttaaggagctcatcaataagatcgtggtaaaattgaactccttctttgcttattcctttctccatcctcccatctgttatattattcagtaaccagctcttgttggaaaccaatagtaattctaaaattctcgtggcctatttttatttgttgaggaactcatgaatggtttaacttacgaggaaatattcttggccacgaaatagaaagtctaaaaccatcagtgttcagctttttcatcaactggatatcctcctgttgatttagataggcatacgaaacattagttataaaattaagtaattaacatgacttcgtagagcccatgaatctaacgattcactatgaaaattctaatcgataaaacttaataaaataaataactataaaaactgaaccttatgatgcactttatcctaagtgttatatagttaccaacttttacaagattaacttagttctttttttatttaactattcatcttgtgttgttccaaattattctttatacagttttgataaaatgttttcccgaaattaattatctggactacttcaatcatcttttagttgttcgaactacacgtgagaaaatgatactatcaatgatcaaacgtttaaaaagagaatctagaagctaataccttgtagcgatggtagaaatcgacggcctcgtcagcattgtgattcttaactctatctgcagtttaaatatagtacaaaatgttatttattatcaccagatatctggttcgctacacagttacttactataatactggtcgttaacaactctttataatacctcttggaatcaaattcataataacacacgagtgatgaatgcatgttttaaaaaaaccgacaactaataagtggacatatatatgcttcgtggtcgaaataaatagaaaagaaaagagacagacgtggaaatttcttggtgtagatgtcccacaggcttggacctctgcaaccttcatttactgcaccttccacctattttaaccatataaatacataaatcattttcattgttccatttcccaacatattcttagcttcacccaatgttttgtaagtgttttaatatcaccatttctatggatattttatctattttgtatacatatacatgtacctgaaaggctgcggttgcggtaccaaacataaagccctccggaaaacttgcacggctaagagtttcggtcttcgggcaaacaggtccttcttcagcccttgtcggagagccgacaagacttattagtaaaagtaaccccaagagaggaatcttcattgttgatttttttttataagctcacgagtgtgtttttggtcaaaaagttcaaaacaaagtggaagactatgttgatttgaaaggagaaatatcgttatatatttatagatatatacatgcatatatgcatgtacgtgacaccgatcaggtgatgaatttcaaagcccaaattgtatttggaggccgccaagtgtatttacactattacatgcagattgatcagttcttgaaggccaagtgtctttttgtcactctcactattgcatgcacattgtcaattttctgttatagtctcctcgttttaaggcgtgatattcgcatgtgtttgtaatattcgcatgtgttacacattatgtgtacgtcaaataaatctcacatctggatgttaagattgagtgtacgattctgtagaagcacaagtggatattgagaccaagtgtttgatatttgaagggtcataagcggattagaattttaataagtggaacaattatcatatagagtaacgtgtgatctttagatccacaagtttgggtttgagtcagtcgctatctaaataagtctccatgtctatataaaaacgcacttgcatgcatcagtcatcaccacaccaactctctcatctctttttgtcaacaaaaaaaaaacacagaagtacgtacgtagcctctctttcttaatggttcacttcattatttgcatttattatagcgttacaagaagttacaactacaaaaggaaaacttaattctcttcacccttttgtatatattatttttcagttatcttacaagtataatgaaaatgttataaatttatctgaaaaatgaaaaatgcatagccgtttttgttttttttaatgaaaagtttaacaaccggtaagatatgatcagatacaatggcggccgcaacgatgtcttgggacgacgggaagcacatgaaggtgaagagggtgcagattacatatgaagatgttatcaactccatagaggctgaatacgacggagacactcataaccctcaccatcacggcactcctggcaagaaatctgacggcgtaagggtttaacaatgttgtaaaacctaacttttcacataaaagatatttacatgagtagcaaaaaaaataatctgacggcgttagctagtactcttcacgaccttctccatatatactacatctttcaatttatggatgttgcaatgggtttagtttggtcggtctcggtcttgtggtcttgactcttgacgggttgccttagtttgattaactgacacttaattactaaatgaaaagaaaaaatgatgggtcctgctaggtctaataatagcatataaaaatgaattagggctaggaaaattttggtctactatatttttgtttataatgatttatttattgtatactttgatcgaactaatgtaatatatttgtttttgtaggtgagcttgagcccagacgagtacataacagatgttactggctactacaaaactacaggggctgaagatgctatagcagcattggcttttaagaccaacaaaactgaatatggtccttacggaaacaaaacaaggaaccaattctccattcatgctcctaaagataatcagatagctggtttccaaggaattagcagcaatgttctcaactctattgacgtccactttgctcccttaccttcctcttcgtcgtcatcgtccagtttgagtcaagccaacaaagttgatgctcaaggtgggaaaggaggaacatcatgggacgatggtgctcatgatcatgtaagacgagtgtacattggacaaggtgattctggtgtcacttatgtcaagttcgagtacgagaaggacgataagaaggaatcacgcgaacacggaaagaagacccttctaggagcagaagtggtgagtatgtttagttcctttcctatattataactagaaagttcaaatccgttgtactttagttatattatgaccgatcttgccaaagaattaacttatttgaaatctctgtatagtttgaggttgatccagacgactacatcacatcagtggaagtgcaatctgacaggatatttgggcaagacacggaagttatcacctccttaatcttcaaaacatccaaagggaaattctcaccgccctttggactcgagggttcacagaaatatgaactcaaggacaagaatggtggtaaactcgttgggttccatgggcgagtaggcggcgaacttcttaatgctctgggagcttatttcgctccttcatccggtcgtggtaccccttcagccactcagccacctggatcagctcaaccaactggatcagctggtgctaagaaactagaagcaaaaggtggtaacgtgggaaatccatgggacgatggtcctcatgaaggtgtgaggaaagtgtatataggtcagggtgattctggtgtatcatacgtcaagtttgtctacgacaaggactctaaggaggtccccggaaatgatcatgggaaaagaacactacttgcacctgaagaggtcaaatatgtatacacatagaagaaccagcatataacctcatttctaaattattgtttcatattagattttttttttgttttttttttttgcagttccttcttgaatatccaaacgaatatataacatcggtggagcttaactatgacaaaatatttggaactgaaggtgaaatcataacgatgcttaggttcacaacgaacaagcgaacctctccaccttttggacttgaaggtgccaaaagcgtcctactcaaagaagacggccacaagatagttggcttccatggcaaagcgggtgctgacataattcaccaagttggagtccatgtcaagcctatttccaagtgaagtttgtaatattttctcaagtcccggtctaataaaaatgagctatcaaaaaatctctgttctagaaattgtcattgtacttgtgtaaatggtaataaggtctttgacaatatgctacttgtgtgtttgtttgtgtttcaatgtctccttatactgtactggattggagtctgtaacactgtttcaacggtttctaagacgtatatataaaatcttggttacgttgattcatataatcatatatctaatttgcaaagtggacagttgtgggttgtggcaaacgtggttgtggcggtcgacgaatcatccattggagaagactagtggcataacacatcactaattctctctttcttatccatggttattactttcgctctacttttaaaaactatatgatccaaaagatcatatatgatttgttaccctgcaatttaatttgaaaaccttttatctaaaaaagagatttatttcttataatatgattctgttttggcatgaaatggatcaaaattaaaataacgcatacaaatttcattttcttattattgaaaattaatggataagaatcttcataaattttaaataatttcattttataatatttataaaaaaatattctaatggtttgatgcataatggattaaaatattccatttatcctattttataaaattggttaaaatcatatattaagaaataagaaatatttttcatttatgaatattcagtcaataaaagaaaaagaatactgcccaattcatcataaactattaaattaacataaattatgtataaaactagagaaaaccttatgaaatagaataaaaataaaagcctaaaacatcttatatattataaaagccttaagtataaagctaaagagaaactgcaaatttgaggtcaatacttttacaacctttttgtgtagaaccacaaattttaaagtttttgtttttatagtgttattgctttcttattagacctttttttttctttgttacggattgttcttcttcttcagagcacacaagctctgagatcccatcaataaatggcggtaacagagtcctctgtttatttactctaacaagtcctttaaggttttaataacccagtttcatgggggttacttccttgtatctagccctgtacgttcctcttctttcatttacttatctaatcacgacgaacactttccccaatttcccaaaaatctcatcttttacaatcgatttctctacattgtaattcttccacatagtttctctggatagtttcattaaagtttgagtttttattgtttttcaattagtttatctgtgacatttattcttcttgcgagcaacatcgactgattcttacctgtatgtttcgatttcacatagacacacgagagaacgctaatttctagtcctctgttttcgtggatcagtctgttttttctatgcaattgtgtgttcttgatgttgttgacacaatgatttcaggttatagcaaggagctcgtgatcatgagtggtacagagttagatgagcctggaaagttaaaacgtgctgtcattgatgcttctgctggtggtgttgctggtgcgatttcacgtatggttacctctccccttgatgttatcaagattagatttcaggtaagtaaagagtcctagttcattggtttttgtggatttggattatgcacatatgtgtttgtgactcaagaaaatttcttggcatgttaaacatctttgctttgagaaagtaagagcaaaaggaatggttattgaagtgaaagtattgaaattttcaggttcagttggagcctacagctacatgggctctgaaagattctcagctgaaaccgaagtacaatggtttgtttcgaacaacgaaggatatctttagagaggaaggtttatcggtaagtcgttgcctagataatgttcttttgaaggtgttaactgttgtattttgttatgctgagtcatttaccaatgttgtcatcgatgcaaagtgttcacaccaattcttttcttggcaaatgatttttcatcatctctaatggtaagcttagttttgttgagttggaatgtgaagtgttataaatatcttgattacgatgcagcctcgttgatttagacttgtctgatgtttgagaatctccacggttatgatacatgatattcaactgcagattttgagcactcatagatagcctttttctctctacaattttgtggacactgataactcaatgaatgaccttattctagactgctttaggaattgatttcttatggctaatagacactttctgaattttaaatcaagttgcttatggcagggtttctggcgtggaaatgttccagctttacttatggttgtgccttatacatccatacaatttgcagtcttacataaggtgaagtcttttgccgctggttcatcaaaggccggtacatcactaactttgaataaatctgttagtgacatgtattatatatccaaggtgtgatctgtacactttaaaacgcttaggttcatgtaaatttaactcctttaaatgagctgtttatggcgacatgacttggctttatataattcatctacatatcaaaccccttgaaaattacacaaaccacaaaagagagaacattccacaatgtttcagaaagttaaaagatagattttagcatgttgtttttgacaggaattctgaattctgatcttctgcagaaaatcatgctcaactgagcccttatctttcttacatcagtggggcactagcagggtgtgcagcaacagttggatcgtatccgtttgacctattgcggactgtattggcgtcccagggtgagccaaaggtacaatatttcttcagtaaaagaatgtgatgacatagttatgggttctctgtaacgtttactcctgtaaaatcaacaatatagtttgagaaagaaaggaaaaggataaagttttgagaatgcgttgacataaataaagtcattttttgagaaagcgtgaaacccatctatggagttctctgatattcatagaaatttttattatttcactgatgtcttagttaaccatgaatttattatcagctattgacgattgatatatcgaaatttttgggttaggtgtatccaaatatgaggtcagcatttctgagtatagtgcaaactcgtggaatcaaagggttgtatgcaggattgtcccctactctgatcgagatcattccttatgctggtctgcagtttggcacctatgacacatttaaacgctggagtatggtaagctatagcttcatgaatgttctcaatttttttttcctttggaatatataacatagatacacaccattgcctccaccacaactttgtgttctaagcagcagattatcttgaagcggtatctggagttctcatctcactgttggtatacattttgcgctaggtatataataagcgataccgatcttcttcatcaagctcaacgaatccaagtgatagtctttctagctttcagcttttcctttgcggtttagcttcgggcactgtttctaaactagtctgtcatccgcttgatgttgtcaagaaaagattccaggttagttttttgccatcttgtgttttagctatgtgttcttaatgttttaccaccgaagtccatgttaccagaagcctaaagtgattttacaaagcattttagatcaaacatcaaggtttgatacaagaatgtttgtcgctgcaggtcgaaggtctgcaacgtcacccaaaatatggagcccgagtagagctgaatgcttacaagaacatgtttgacggtttagggcagatattaagatctgaaggttggcacgggctttataaaggcattgttccatcaaccattaaagctgcacctgctggtgctgtaacatttgtggcctatgaacttgcatccgattggtttgaggcaaatttgacctgaacttgtaaaattcttcaattctatttgtaaatcttattctattttgcttttgagtaataagtaatataagattccatccttctctgaacagagaccaataatgcaaactctttcttactaggaacggtagattttcactaaatctattcattcatatcagcaaagtgtgttactgctgcagttttcaaaaagaatcatggcttggttgaaaaaagctttgtattcttagctacacagttttacattattgctcagcgaaaactaaaatttaaagtcaatgtcatctttggttctgtgttactcatcgaggcacaaaactttctaaaaactggcaaggacaaaagaaaccaaccagttctgattacttctgaatatgaacgaacagagcctttacttttttattcatattgtttcttctgcttatcagtaatctcttgaggtaaagacaggaactgagtgatcttctgaacctgagagacatcaatccggtatttttcagctatctcgttaacacccattggaccatggtgatcctgagattttccctgaaagagaagcatgatgtgtcgcacttgtgctacgttcaacgttccttgaggcaccgggttttcctcatatcttgttgattcaggagttgtgttccggagctttgggagtggccttttcgatgtctcaactactgatgcctatataaatcacaagtcttatcagtttagtcagatagatatatgtcttcatggatttatacacaggaaagaccaaaacccgcaactatatggcccttttgcattatctacatttctacatttcatctcttatcctaaacttaatttacaccatcaatcactgtcagctttaagattaccagcagaagaatgagacaaaatctgttcacttcttagttatgctaactatttcattggtgtgacacaaaacgctatcaaaggttttctaatctggttacgctacattaaacagttactctaaaatgtgaacttgttcagtccaatataaaattctagattgttgccagagactctggggcaaaaaccttaacatatattccagagcagaattagaaagcaacccagcattgttcatgaaaccttttgaacccatcttatctctaataccttaaaatcaaccagtaacgaaaccttttgaacccatcttatctctaataccttaaaatcaaccagtaacgaaacctttacatgactaatgacaaaaactccacaagatgtgactaagaggcaagacaaagggttcatataccattctcaacagctacataactaagataagcaccaactatcaatgcaggtaatcaggtggatctatattaaacatccaaaagtcacatacttgtcctgatgagaggacgagaatcgaatcaatgcatcaaatcaaacaagagataaacaaagcttaaggaaacaacactacaaacctctcccatctcagctttgcctccaggtttagcttttattctcccaaccatttggttcaacattgtatcatacttggggtctcgttcctctaaaacattatcctcactggttcttcgacctttatctaacaacagatacatacccaaattcagatcaaaaacgaacaaaaatttggaaacggttaagaagcagcccatcaatctaaatgtttataacggtgaaaactttcgaatacccaaatgcgagagatttagggtttataccagaaactccatcaacggcggcagtagacggagacgatttcacggcactgagctcctccgtaggaagcgatctccgatcaatggagactcttgatggtgatgatctctcaacttctttgattttcccaacagctcgacgcaattgctgacccatcaccgcaaaaacacacactctctttcagaaacagaaagagtccaatggattacgaaaagaatcgaaatttgtaggtatttttctgctgcatccgatgattacaatgggggagaattcgaattggaatcaaagggtagtggaagtagcttcatcagctgtgttcttcttcatgtattgaatggggcagagagaagaagaacgtgttcgtgttgaaagagttacacgcgctcgctttgagagcttgaaataagtgaataatattaagtcagtactacgtcgttttgaattaccagatagtactatgttgttaacacatggaccaaaaatcaaaacatttcttgaactttcgaaccggaggatcataacatagattacatgacctttcacatgactaattaacaaaacgttgaaaaaactttaaacttttattctggtgtattatcctccgatgatggaaccggaacaagacttggaagatatgtatagccggagataaaaggccaactaaaacctagttggtgttgttctatctcatcttggcttttgatctcatcctctccaataacgtagatgttgacggctacgtttcttttatctgccaatacttcctcacaacatactacgatcctattattcttatcaatgaaatgcaccggataagaaagattctcaaaagccagcaataccgggagatcaggtcttgtcacactaaataacttggtccataagatactcactccgttcttaaccttgttagtaacccatacatcgatctttgatgtttctttgctttggtgtaacaaagaaagattgtctcctttgaaagctgataaagctacaacattatgtacatcatacctaacgggaagagagcacaagggctcaaatgtctctgtagagaagttaaagctttggatgaagatgtcgggtttacggttccatttagcaatccaatacatgtttcctttgagtgacaaacctttacaacgcaaaaccacatgccaatccaaagaaactttaaaagttttccaagaattagactttaattcataaatatcaacctctggtttgtaagagcccgtatttgcatactcgtttttggtaaaaacaccgtttacgaacctcaagattttgtagctatcccgagataaaccgtcatatccaatgccgtagcaactacaaccccggaaagaaggattcaggagaaagatccatctaacctggttcaaacatgggttccaaactgccattgaacctgtttcgaaaatgcataacaataacccgtcgcagggaaccatagtataaatctcacctttcacttgaaacttgttaggaagtgaaaaagatgagcaagctccaactaccgggttgatgatcttaaccatttgattggtccttatgatatgttcccgaacaagagctaagtgcttgtaaatgaatctcttgtcgttgaaaagagcgagccatcgtttgcacgtcaacttgagtcgtaaaagagatttagttggaaccctacaaagtatttcttcaaataactcaaaaggcaacaatgaacattctttggaatccatggccatggagaggtatggcttctggatctttgtgaatagatttatgcatgaagctatatataatttaacatgttggaaccacgccatcttataaagattgttttaaaagagaatctgattcaaatatttggaaataaagatggtgtggcgtggatcaacatttgtcaacttaattatctaattttacaaaactaaaatagatggataaagcaattaaagtaagtaaaataaagaaaaaatctgaaatatatattttccctcaaaagttccagtcaatttcctattgttccctatgagattttattccatataaactaatattagcatttggtgaactataaatatgatttgttaagatattcttaaatcaaaactttttaaaaactatattattatatagttatagcaaaagattgcgtggaccagcattccaacttgtctagttaagaaaacttaaatatatatatatatataccaattaaagcaaaatgaattagattttgtaatatatatataccaattaaagcaaaatgaattagattttgtaatatatatatattcccataaaagctccggtcaaatttcctagcgttcaaataaattttattttaatctttcatttaacatagttattttgtgttgcccacaataagatgccccaaaaagcccaaatgaaactagtcaataagatacaccaaaaggaagaagcccaacactaaggccatgattgaaacaactaaaacttgaatgagttagcttccaatttaaggagatgatgcgaatatcgttgaagaagagatattactacttgtagttcatttccactgatcgcaagccaaaaaagtagttaggttctggtggtgaggaaaagtgtaaaaatgataaataagattgagaggttctgcttagtttaattaaagtagcatttccaaaatactttttttttgctcgagtcagtagtaatagtcttttgtgttttcttcattagacataatcatgataccaaaccaaacacattcctctttcttcggaataactattattttctattttatttttgtttttttctcctcccacagattgtaacctttatcgtcaagttgtaattaaaaagattcctctaaacaattcgtcaaaaagctgaaaagattcctctaaaaaaaatttcactacacttctagattgtctttagactagtacaatctcctgtgttgacctaaatgcacaatagattgttaatttaaaatgaagaaatgcgaaaacatttttaatctaagtttgtggttggtgagtcgaatgttatgaataaaactcatgacttttatgttaaatacgtatgaaaattactatgaagaaaagtaacaagaaaaatagtgaaaagaaagaaaaagagaagaaggcacaatgtgggaaggaagtgcgacgagaagatcactagatttggtcggcacatcactttctctcttaaactcataaacacaaagcatggcccctaccttaacgtacccactttcttcttttcaaccccacaatttctaatatcctcaagctcaccctctccacatttagtgtgctctttttctttttcttgttcttttacaaataaataaataaattattctaatttattttgtacttttgttccccattggattgcaagtctacttagatcttcaatcttcgtggtcgagaggttgagagagagagagagacgtacaagtttcaagtatgagtaaagacttccaaattaagacattggtttgcaagttgaaattcagtcaccactacttcatcatatactttttgtaacccttctctttcaatacacgtatatacttgatcagtctgttctcatcaaaatatatacattgattacaaaaataatttcaattgatgtgttaatttttagatatattggccttaatcgaacatgaaaaatggacactttgaatacagccaaagttgtgtgttggtaattgtaaggaaacatcgatagtgattaacactaccctaagaccgttgaaagaaatcaaaagaatgaaccctctttgaaaaatttaggagacactttagagaacttatgaatagtttaaaaaaaaaaaaactctattattcatttggttctacttgttcaacttggttaaaaatggaggaaagatgaactatgtatagaatccaaaactacaaaatatctaacaatatttatcctaatctagaaaacattcaaccataatatctagatttttctctgcaaatatatctagatttttcgacatgtatatcaagataatcaaagaataggattcttaaaacacttaaagaggtgatgatattttatgatgtttctagagaagctctagaatttgaatttggtccaataaaggataatcggataatgaaccaataattaagtttgactcaaaaattaattcagtttcagtaacactatttgttgtggtcttgtggacacaaacaatgagatctatacaactatgggtgatatgaatcccaagtaacaaataaaaagggcaatgaactgatagtgatttgagttgaaaattcataaaagttaatatggtgatagaagttaaacatacattggcctttaccgactaactcgaactgaaatcaatctaacaaaaaataggttcgattgattcgattggaattttgtcaagaataagaaccattatcttgaatttgtgtgttagcaatgctacatcaagagtaagatagaaattagagactatggattcgagttagatgtcaataaaccttaacaatatggatttttttctccgattaatctaactaattggcacgttaggtgaatttcaactataattggtctccgtttgcttttgggaaagagagaaaaaaaaaaaaaaaaaaaaggcaaactttaggaaaactgaattttcaagaaacttgacttttaatttgtaagcattgtctcgtttcgtataccgaccgtcaataaagtgtaacttaacgaatctctttttgctggattttcctaaaacactgatcctatgacactcttacatattattttatcttttaaatgtaataaaagcaagaaaacatacataatattaatatatgttcatactatggttcatacaggaaaattcgtatcataacattttttcatcatttatttgttccatagagaggctaaagtagggataaaacgtcacctcttattcacttttcttttatttcgtttaccaataaaaataaataatatatgaaagtaacatggtagtataattggagtgaatatgtaagaacattaattggaatacaaatttactacaccaaaaactatttttaaccaaatatgtcaccaaattcaatagaatttacactaatttttattgggaacacatgttcccatcatggcctctttcctcctccactggttattactgataaaataataacattagacacttaacaacggttgattctctggtattaatgaaaaaagaatttcgaaagtgcacaaaatggaccccaaactccacaaaacctgcaacacactcaattatacgcacaacatgcaaacaataataaacatcactgaccatccaagtatttcttctatatatgtagactctcactcttttacgactcaaagagcaaagagctaaagtccaaaaccaaacacaaaaacaaaaatctaaatttctttcttggtctgctttcaatatggctcctctacctatttcttcgattagagttgggaaaatagatgatgttcaagaactcataaaatccaaaccaaacaaagttccagagagattcattagagaagagtatgagagaggagtcgttgtgtcgtctcttaagactcatcatcttcatcatcagattcctgttattgatctctctaagctctctaaacccgacaatgatgattttttctttgagattcttaagctctcacaagcttgtgaagactggggatttttccaggtattattatgttatttcaactaggaaattttcttttatcaaagtaatatctaataatctagtttcgacattggacacttcatattttcttttaatagttgggttcactaggccatataataaattttagaaaaatgaatctcatgatttggttgttgactgcaagataggttataaatcatgggatagaagtggaggttgtggaagatatagaggaagtggcttcagagttctttgatatgccattggaggagaagaagaagtatccaatggagccaggtaccgtacaaggttatggtcaagctttcatattctccgaagatcagaaacttgattggtgcaacatgtttgcccttggtgttcatcctccacaaattcgcaaccccaaactatggccctctaaaccggcccggttcaggtcttttttcttttctttctagacttgttttggttacttcttcattttaactactctttcttaagtgatcatatatataggaatagtgtagttaatttgcgagcatatgacacgtaaattcaaatagtttatactaataagtgtcatctgcgttcgaaataagggttcaagttttaaaaagctttagtggatggatcatagcttagatatatatataattttttctgaacaacgtttgagtaaattactattattattttctctatctatagtgaaagtcttgaaggttactcaaaagagataagggaactatgcaaaaggttgttgaagtatatagcaataagcttgggtctaaaagaagagagatttgaggaaatgtttggggaggcagtgcaagcagtgaggatgaattattaccctccatgttcaagtcctgatcttgtcttaggacttagtccacattctgatggaagtgctctcactgttcttcaacagagcaagaacagttgtgttggccttcagatcctcaaagacaacacttgggtccctgttaaacctcttcccaatgcccttgtcatcaacattggtgataccattgaggtattaattttaccatatcaatttcctataattattatatcacaatttaaatgaagtattttaatttgtgtaaattatatatatatatatatatatatatatgtaggtgctaagtaatgggaaatacaagagtgtagagcatagggcagtaacaaacagggaaaaggagaggcttacaatagtgacattctatgcaccaaactatgaggttgaaatagaaccaatgagtgagttggttgatgatgagaccaacccatgcaagtatagaagctacaatcatggtgactatagttatcactatgtctccaacaagctccaaggcaagaagtcccttgattttgccaagattctcaattaaactattattaatttcaccccatcaaatctccattaactagttaccacttaatttgctttctttaataagaaaaattatttgttgaacttttgtgtgtataatgtataggaatgttccccacctagggtttttaatgtcatgattaaattccccaatgtgaatacaacttgtaatattttatatgtatgtgtgtgtgtgggtggaattaggtgtgtgttttatgtatataccgaaaaggaacaacaacaaaaaaaaagatgaaaaaactaacatttcatccaattttttatgttgattatattcttgcatttagtttcattaatttgtatcattataaaaatattccaaagattatcttcttaagtctcgaatctcaatctaaataattagtctctaagagggatatacttaggacttgagtgaaatcaaatcttggtcttttattttatccttcacgggatgtgaagtagaatgctcaaagatttatttggacaatttggatttcggaagataacatcataagaaaacaagacaaaataaagaaaaagggtccattattattttatttgttttgccaaacgccaaaaggcttccattacacgacaaagaacaaaatattaaactctttttgattattagttaataatgcccccattaatagttacatcagaaatgcattgtgggttcttaattatttgtcctcattgtcccaaatgcattcactaggatgatgtggttacacgtcaggttaatggtggaaccatatactatgatagtatgatataacaaaatatcatatcaaaatgatttaacctaagattacgacttaatcattctcgtatcgaatcaaattgttcactttgttagaaaagccacttgttcagaaaattttgttgcacatgcagccattttattctcaccactttaggctctccgtatatacgaattacgagtcacttcaacggtggaaactctttcgtttttctaactctttgttgacgtgttaataaggacaaaacccctaagtcgactttatctgaccccaaaacaggaccggaccaatttagagggagtcagactgagccaaaccaaacatcttctatcccgaaatgggacataaagggaccgggctggaccaatcgacaagtcttatccactcagggctctgcttgcagtccaaaacaagaaatgtctacattacatattgttgaattcaagtcactttcaagcaaaatattttcctaattataaaaatctaaacaaaaccagaaacactggaaagtttttgatttgaagacaactatacataatgaaagcaagaatgaaatttattcaaacacgataaggaatggaactagttagtacctaataagacaatgacaatggaccgtgacgcagtcccgtctaacaaatgatgtgttacatataaataaatgtgaaatcgagaaactgttgtgagtcactccaaataaatggggtatataaaaggattttctataaggagatattgattttacaaagagaaacaagcattatgaagagacacaaaggttaagttatggttttaggattcttactttaggagggtacgagggctagaatctggtttcttatgattcccatgcacttctgaatctctgtatagatcggaaggttctgcgagcagcaaggctgtaaactcgccactgccgagtctagaacctgggctacttcacttggtgggaattgcctctctgtacatttctgcattgtgtttttattcacaaaattgctgtgttaggatcacaaactatgaacaaaagaagaaccccaatacaagatgactaatgcagcaaccacagagtgagagcataaagaacagcaataagggcttaactttttctaatatctaaatctatgaagagaaaggtagagcctaataatataattgggcagatggctctcagtacgaacattactgagtgggtttaagattttaacctgaatcataagcaatgtagcgatacatcgggacacaagatcggacgggacttgcaggtcattttgatcgggttggtttaggtgggaatcattggcaggagttgagctaggtggatttggtgtagagggaagacgctgatcctggccaccttgtgtttgctggactgatgatccttctgtttgatctattgagagctgattatttacaaaatcaatggcttcttccatatttacattattattttcgtcttttctcagtaactccaatgcctgcaccagaaacagagacaaaatcattacgtagccgaaactgttgaacttagaccttgcgaagcgcaaccaatgatgagtaaattatccactcagaagctttttcatatgtgaatcccaaacatagaaacaggtgaactcgttatacacacacctgtacagctctgtataccattttccgtgcttttattctagaactttcgacgatctcagacacatggaatccattagtgtctgatgcattattgtcttcgtatgtcaactgaccatcaggttcccctgatttactcatgcgtcttattgatgaatatggtacattctcctggtaagtatttcgttgcctcaagccaagaagtgccaatgaaacctgtgcatagcaagacacaaaatgcgatacatcagaagctgtatgtagtaaagacaacaagatgactcatatagttccttcataaactcatgcctgctcattgatttcgcttagctgaaagagaactgctgcatattgtttcttaaaagattcagaatcctttagggcattattatgtccatctttctgactttccacaacctcgtcgttcatgcattttagctccctcaaaactagctcctgtagtgttgtagatcaacaattagttgaaatggaaaccataatgtcgaaagagcatgaaaaacatggaagacatgcatgaacgagaaggaaactatatacaaatggagtgaataaacataccgaacctcaaaattttatgagtccattaaagcattagtaatatttatgatttcatattttcttattagtcaattagaaacttttattctattcaaccacatcctaatgaaatctctactataatgtgaaggaaacaaaaaaattaacgatagcacgcctgttatgaatatggaaagatataaaatgcaacccggccatagaaaaagaaaatataagagagttaaaattgtatagaagactgagaattaagaacggaaacatatcacatatgtatagactgagaattaactggccaaaccttcttgtcaagcgcacgcgttagttcagaaagagcttggacatcagcttctcttgcctggatttgtccaatacttgagggctgagaattaaacaattgtaaagcaagagcctcatcaactccgtcttgagcttgtggatttgaacttgagatatctacctgcaaatttaaggaaaagttgtatatgattgaaatatatctagcaagatttaatttagctgtagctaagatgactgtagtcaaatgctaaacaaagcattactagaaaaattggacgcacgtctcagaaagaactgtaatagaacattcacattgtattttgtataagattagtaagagacttgaattatcaaactagctctctaggtaaatctcccagggtagactgatgctagttacaattattggtccacaacttcaggcagagaaattccaaatattgaataccttagacggaaatccatcgatatttaagaaactggtaaactaagcctagttcctccaggtatgcagaaaaatgaacttccataaagaatgtagaatatagaaaagctgaatatgaggcatggtatgatagtcagaaataccaaccttttcctgctttagtgaattgctaatgttataatttggagaggacaagagatggcctgtctcacacgaaagtttgggatatccttccagcatgctttcctttgcccgttcatgcattttctcctcaatgggattctgaatgtgataatttgagaaagcatagtgccttgccagcgatgctggcatgttttctagaggattcagtggcatgcattcagtatccttcaccaaaagagagatttaaatgttatctaaaggttatgaacattcaaattcgttctaattttcaagtcatgaacttttaaattgatcaactatcaagtgctcaattacagttgtaggaaattcagtagcgattctattcaccaaaactattcgagactttggtcaaattcacaaatgtgcagtgaactgctacgattagttatcctttcgtttactttcgttttcaatagtcacagtaatttttcagaaaacgtttgagtgtaaggaagagtaccttaacaaattctacccctaattcagggttgtcaaactgaatccggtacctacagtgatcaacagttaggacattgccgtcatgaatctctcttgactttggatgcaggcaaatgactctctgtgaaacatttagaggccgggccaaatccattggaagtccttccctcatgcccgtgtttagttcatcataatgttttcttacagagtccctgtataggtatagcttttctttttcctccttcaaaaactgttcagaaaatcgccttggtttcccaagagaactgcaccaacaaagtatgattaagggaacatccatatacacacgaagaaaagtagaaaattaacagcattttagttagtcataacctccttatgacaccccattcaacgcgagttaatctaggaacatgacccaaccctacatgatccaaatactcaacaaactcttgtctggcaaaccatggatagtcaattgcactgtagaaccactcaaaaatacaccatctccgtgctcggaaactagaaatgcaatgcgaaaacttctcctgcagaataataggatatggtataaatataatcagggaactcacagactaaattccatagaaattaaagatcttaagattgaaagatgtatcactgcggtttctttatcatttgggaataaagtctgagtatcagaaagttcactcactatagtctcagaaattttcccgtcatcaatagttagaggtttctcagttactatctttcttctgctcctaactttagttggcaagttaacttgttttttaatgactgcatttgatggagctgactcatcttcttctactatgttgttacttgacgaagtatgatcatgagatttggcagatttcttttcatgtgagtttcgaatacttgcggaccgtttacctctcccaacaggcttatattcctcacctattccctacaacatcataatcagtcctaagataaaagctacaaaaggaaatcttcgatgaaaaaaagggaaataatcaaaaaatttggttgccaatgatataatacattccaaagaggacgccgatgggtactgtgtggaatactgtataaatcatacgagttgtattgtacaagaagacacataccttgctattacaaggctctatgacttgtgagcttgcagcaagctcatctttaagaacctgcaggaagagaacagcttcaacatgatcatgaattctgacaacagaacagtaatggcaagtctgtctttgctaaatatatacattttctcttactttagctggtaatgctttctgccgtctcttttggattaaagaactacttggactttttctctcgagttcagggttacaaaggtcattgctgccgtatcttctctgtttggagtttctaagagaactacttttagacatggatgccggatcagtccctttaaaatctgaaacataagcttctccagctttcttttcctcagcttgaactgatgactctgaaattaaatcaagattagattgagaaagtagataaccaatatgaattttcatgaaagtaaatcagactctgaacttaattccatatcagtgtaattatatgctatggccaataacattaacaagcttaagacactcgttcaaaattataaatgtgtattgattataggtcaaacatatgatcccaccagtatcagtggcagtttcaggcatcatcagcgatagatctgccagcgtatggagagcatcacatgctgtgtcttcatctgcagaaagcatttaaaaagaaaaagaagttgaagggacgatataaatagtaaaaaatgaaacatggcaacactaccatgaatacacgcaaagaatggctacaattattagttcaaatgaatgtcatgagttgaattccaaacaatcacaaaggagcttctatagtttgccatcgctaagaagattcttcaggaagaatgaaatcataatccattaaggatttggtttatttcaaagctcagtagcgagctcgtcttagattaacagaaacaggcagtagttactcccaaagtttatcaagaccaaaaaactgtcatggaacagaaatttaaagttgacaaacacaagacagagtgaccaccaaatacactagtaagtcaaattatgatttttcaatatactttatataataagtgtatcagctagttgagatgaagtcttatttctttaactggataactggactataactgatgttttcctaagtttaggcatgtcttcatctgcatttctaggtgtgctttgaataaaggaattgaagtttttagtaattccgttttctcctacttggatatgcattgcaaataggtttatttagacagagaagtgagagactagaacacacctgcagtaaaaagactttttttactttttctccttgaaactttatatgtgaatttcaaagccttcccttccctttcttgttcaaatttctcatcgggagcgcctaagcttggtgcttcatctgtaccactgcaggcttcttttgcatcttcttctttaatgcctactctcctcctatagtatgttcttcctttttgctgcttttccacggcactagaaccttctccatgtgtcaagtcatttctacctccagaataatccgcattatcagcttcagtgcttcctaagcttggttcacagcggacatcttccatatcagtggcatgaagcttggcaatcgccaagtcaatatcggcacgctgaatatcataatctatcagtccatattactataaaacagttcctacttacgcaaaacggtttatttccttctactttgattttgcaataggctatcatgtagggaaaccgagataagtttccttaaaatatcttcctatagtgcagactagcagcacacattttaataatcacaagcttcatgaagagagtacatgaatcataataagtaatagtagaggagattaccattctttcaccctttttatcaggggggtacatctttgcttttctatttggtgtgtgggagttctttgtagagccacctcgttgtgaagcctcagccaatgctaatgctatctcatgttccatatcatcatcagtatcatcccccttctgatttaaacctctcttaacaggtgataaatatctttccctagtatccttctcaagggtgtatgagataggaattctaggagtcctttttccaacagcacgaggcatagtctcttggcacatgcaaattacgattaatagaaaagttagcaactattagatcgtttccattagacagatagttaatgatccaataaaattccgggagggaagatcatttttatcccactatatacatttagggagggtactaacttgagttgcatcatctcaagatactgttttcaataaatttagtgtacaagataggtgctagtaaaataaaggaaagagcagttctatctaagctgattctgcaaggcatcaacaacatgcaacaccagcaagactgcaatagttgagaaaaacaaaatttgcacgaagcaaagactcatgcatatatataactgtatgtgctcacgcaactcatgcttgtgaaatggggaacagattttgaggcaaagagaaacagagaacactaccagtacgtctcttcttcagcgatggcatgaagcctgaggaggacctaaattgtaagcggtcagacagaccctctagtcctatagagggatgatctgaggattttactctagagcgcttaggggctgacctcggagtttcaatgccttcattattttcctgctcactgtcacttcctccatgctagagaagagatagactcgttacataataatatgaaaccaaaccccatactaccaaattatattccttcgcaacagaaatggaaatacttaactaacaaggctcaacaacaatcaacgtcactaacgtccgcaaaaaatcacaaagttagctggccatgtttctaagatatgcataatgcttaacaaagaaacactaaaccaaacgaatgttagaatttatctttcctgagctaaactatattttcaagtgaaaaaatctgaacaaacaagagtgctaaacccctaggtggaacaaacttaagttggcagatgttccatagaaacgggtggaagacatgtacaattgttttgagtttcaaatggaagtaagtatgctgaactggaccaagtgcgtgttagttataacatatttgaacggtttcaaacttttaccagaacagagtagtgatccgtcatcattgcagttaggccaaccacagatgcagtgccttccggaagagacaagtaagcctaaagtacagatggcataatataagtggaaaatgtttagacaaagatcacaatacaaatcaaggaggagaacatgctgaccttattcatagtgtataaggcctctaccatttctgcagaacggctatgtacaaatccagcaacctacaaccatagatgaaaaaacaccataaatattgctggttctgcaaaccaaagtgattataaaaatgacattcccatacccataacatttggcggaaactatggcagcaatttattacccttcttttggaataatgtaatgttttactacaaatcatataccaaatcgtaaataatgtctattttgctaattgaactaacctttttccattcttttccgaatttgcggtatccttcataaaagcgctctaactcttccttgctccactgaggacctaacatgtccgacaacttcctcttctgcaagtaaggagcactataagatatgcttggagaccagctgataaaattggtcgcagaataacaacaaacaaatttgctcgcacattggagacaagggtaaaacaatgtctcctccttgaaataggaattgaaacaaaaacaacaacttaaacgtagaaaatatttgagtaaatgttgaaacaagaacaaagaaaggttattacttggatcaatcaagaaacaaaaagtctagcaaataactaggtatatccttctacagcgaaactatgctaaatttcccaatcaaatctcaggctgagcaatacataaccctacctaaagttgaggtcatccagtaaaacattaggaaaaaagcttacccgttgtttagttttgctcatactttcttcgtctttgtgaggagaaacagctttagcacgaggcttcttcttgtacttagatttctttgatcttgagggcgccataagttaaagctcttctgttacctgaaacattcccaaaattgaacccaagtttagattttaccaagatacaacaaacacaataaatcataagctcaatccttgatagatacatctatttatcagttaatcatctccaaagaaactgactaccagtactaatgaaactaaagtctacatgcaaaacccacctcataccaaaaaagtgtgctcattatcagtatcaaccctactttcgctcaatagaatatgaaacccagagaagtttaagaaacaacttgtccaaattagaaaatcaatctccttaagcaactccagctagtgaaatttatgcgaattcaaatcacaagacctgacacccatcgattttgagcttcgaatttcaaaatccaaagctcaataatcagtgcgcagattccccagaaccaaattttaaactcacaaacttcgcacctaatccaaaaaactttcctaccgaataaaaaacgaaaattgcaggacgaacgattaaaaaagctcaaattatttgaaaattcgatgagaacaaatcagaattaaaaaaaaaaaaaaaaagagaagattgaaagagcttacctacacaaatccaaaatcactcggaagccatcgccgggacttgaagaagaaattacagagagaaattagagaaatccggtaagagatcggaatatgaacagatcagagcttcttcgggttttttgagcgatcgaaagagagattgaggaagatgaagaagcagcaaaaacaagagattgaaacaatttttggggatataaccgcgaaaactttaaaataaaaagaaaaataaatattagaagaatccgataaaatgtaatttttcgttatacaacttttgttgcagagagtctctctatataaataatttgcgaagattcaatcatttttttaaaacaaacctacaaattaaatccaattcggttcggttcgcctttataaattggatttggattggttaaaccaaatttaaaccacacagttcgaatccaatgcggtttaattctggtttgtaatagtcaagttgaattttattatagtcctttataggggttttcgaaatagactgaagcaacaacaccatgtctttcgcttactcaatggttatgttaaaaagctcacttcctagagaaacctcatggttctcactgatgacattaaggtaaatcgtctcaagctcggtcacgaccacatccatctttgggcgatttatcgggggatattccaagcattccgacgtaattatcagataagcttggaacgatggtctcgtgaatgtttctgcaggtatattcttatcccaaaatgtgtttgtaaaaagtctcggacttatctacaaatcacaaataaatttccaaacaatatatttttaagtacatacaattaacaaacaaaaaaaagttgtaaatggagaaagagagggtttttttttctattacgtacccattgtaaaacttcatagtctgattgtaacagtccagggttttgacaggtgataagctctagaaggaacaacccgaagctatacacatcaattgtctcctctgaaccacctctatagaaaatattcataagaacatatttgttaggactttgaaggaatgatgtaacttatatgatcataagtgaattaattaataccttggattagcgagatgaatatcacttgcttgaagcagtcccaacattgccccatctgataccttggcattgaggttggcatcgagcaaaactttactcgccgtaaatctcttgtgttgtactggaggatctaagttgtgcaagtgtagtaaccctgaattgaaaaacagagagactttaatattagtttttagaacaatcaatgtgagttttggatcatccattttgatttacctttggctgcatcaagagctatagatattcttttcttgaacgttaagtcgctagactctactcaataaccaaaaagagagatgatcacataaaaatgatgtatggatcaaatttcaagagtttactataatgcattacttaccacctagataatctcggacgctaccgttgaccatatactcaaagacgagcgattggttctcgtcgtcgcaacaataaccgagcagattaaccaaatttttatgttggatgtaagaaacctgagacacatacaacaatatgtcacaaatacataaattattttcaatgaaatcaccaattttttgtttgtgtgtacctcatccaagaatctaggttggggactacaccactcccttttgatcacaacgggcatgtccttgatcagcccagtgtaaactgttccgtgacttccatgcccaatagtattatccatgtcaaaattgttcgttgcttgccttaattcctccatcgagtactcgatcaggcgttgtggcgtcacttgtagacgtgaattacaagagcatcaaaagatgtaattactttcatgatcagcacattaactaatatgtttaaattaaataataaacccaataaaacttaatatttgtatatagaaaagacacatttaaaagacttgtaaaaaacttttctttgtctttttattacatcaaatgtattaaaaacactaagtgtggttataatgtcaagattagacttaccggttgaactcttgagggagtttttgccacacagtaatatggaaatccagaaaagagcgattagaatcgctatgatcgcaattggtgcagcaatgtaaataaccaacattttgttatgcgtcaacatcgaggagaatctgttggtgtttccagaccaaaaaaaagaaaaaagacaacattatgaatataaatgatcattaaattatgtttgtttcagtgcaatcaatgtcggaaacaacatagatattagtcagataaaatctgtaaggtcaaaatcaaatctaacaaccttcccagtcattttcacttgacaattagaattttgtggtgaagcgaaggtgacactagtgcgaaactgaaaatcgcatttgcattcatttgaaactaaaattcgttggtgaaacgacagctatactagtgagaaaatcacagtcatatattatcatctactcgtgagaaaaaaaaaatcacatacctttttcaatagatttgaaatcaaaagcgttggtgatcccgttgtagtatatctcttcggataagataatatatagagaacatagattcgataatcgtttgtcgttcaatttatattctatacatgtaatcttatttggaaaagttgtttaaatggtaaaatcaaactaactaagaaatgtttgacgacattgaaaagttattgttaggaaaaatatctgaccaactggactataccaaatatcgaaaaaatctccaatattaaattggtattggaaataatcttcactacaaattagaactggtaatagtgtgtttaaactgcttcaatccagctcattacaaacacattgttataaaggaaggttggtacatgaacacctctttatggattaatttgtctaccatatatgctctaccattattcaaacctcaagagcttgcaaaattttttcaaatactaaatttaactatttgtaatatctcaattatctatccagacatatatatatacaaagtacaaacttctattttgccatctaaaatgattaatatggagaatacaagcttacaaagccttaactaattgggcttaccaaaagaaaaacagcccaagaatttataacataggatgtcactaagaaagagatggaaagaaactatctagatcatatacatttgtattgaaccttaacaaaaactaagactccgaatggatttcgaacctcacagtgtggtgtggttccaacagtaacaaaaaaatatatatatatgtgtgtgtgtatgaatatattttggtactattagaccatctttattgcacaaaaaacatagtgtctttaaattttttttaaaaatgaaaaactaaaataaaatgttatttaatgcttttaggaggaagacccgtgtcttccatgtctctgcaaagacattttcttacttttaaagacatcacacttgactaataaatgacttaaaattaaaataatgttaacttttacaataaactatagtaaagacatctctaaaaagtcaccaatgaggatgctcttagaaccgcttcgaattttatccgtagttgaattgcacgttttcattcataacctaggtgtgcaacatgtgttagaggaaaacagtatgggcttccatcagttattaccgtctaagtaccttaaatctacaaatagccttaaaattgtagatcagttaaagccaagagaagaaatcgacaaatgaaagacaaacaagttataagagacggaagattagctggaaagttgtcgccaagaaccttcgcttgtggattaaaatggcataaacttgttatgatcatgagtttgattcaatcgtttgcaaagaggtatttggtcacttagagaaagttgcatgtatttttgacttgtgaattaatttgtaaggagtaggaaataaaacagaggtttatgcgacctcgcccataatgggttatagttaatcattaaatcaacctccacatagacatatttaattactctcaatacaaagtagttcctcttcacatatgctttaattaaacgtacataaagtgaagagactttcaaaggtcaaagtaaagatcaaacgagtgctaaagccacaaagcaccagcctccttgagcaatattttcaatgatccattgagatgaagagtcatgacagtattggccgttcctacgaatttccctccaacaaaaaccgcaggaaccgtagggctacagcctaatcgggccaaggcccactcgatatctttcccatacatgtcttggtcgatctctacaattgccgggctcacaccttgctcgtaaaacaaccgtttaattgcatgagacatgcaacacgtactcttgctgaatatcaccaccgctctttgcgacgctaatcttgctaccacatccatttgtatagtaatactcttttggtatgtatattattttctttgaagtgattggagatttaatgttgttttgatgagtttgttttggagaggtgagtcttggaactctatatatacacatatactcgcatgtaatctttatgaatagaggtatcttggtataatgatggagcaacgctaaagggagaatcttattttgtggggagatagattgtggataagagaagctgatgatatgatgctcgagagttgacaaattgtgagtaagaggatagagattgatatgcatatagtagtaacttgtgatcatgatgatgtatgaagagaaaaaattccaatatttggggatcaatattacgtgttaagggaatgtcaactttgttgattctcgtcgatcatcacttttcttgccgcaaggggatttacgttgccatttatgacaagtactgaactagacagaaactcaaattccaaagtagattaaatggattgcttctttttattaagttaaaccatagtagagttctcacactccatgcacgctctcagttttgtaattgcatttttttttctttgttttggttaaagttttgtaattgcatgttgggtttactatgtaaaacagttcatattcttagtatttaagatgatgggacatagaattcgtagtgactcttgagatatcaaagaagccataatccaaaaacaaagaaccgtacggcaatgcaagtggcgagatgaccattgtacttaaggcataattaaccacgtcatcagcaaaattcctcaactagctagctactattggtttagtgtgtcatcgtcattgtcggtaagatttggactcatcatcattagtgattttaatctcctgttgatattgttcgaaagaatgtttgatgtaatcaccaaatataatataactgcaacaattgatgattaattggctaaaatattatctatttggccatatgatgatcgacaaaaacgttaggaaccaattaagcaccttagctacgacggattcttctgaatacgaaagtggtttgcgctattagtttcggacccgtagttagaaatcttcctttcaagttgaagttcattcactttcttttttttcaaatctttggttttttaattacattcattataaaacagttttttttggtgaatacaattttatatttatacaaaaaaattggctaaaaaatggcttgaaggacagagatctctgtcacaacgagcaatctaagtatgctttgatgattaagtaaacacatgattagtttttattttatgtacttaattagttttaccttttgtactaccatagttatttttggaatttgaagtactacactgttctgactttgattctcgaaacgtgtaatctgaatttgataccaacctagatgcaacgatatgtctgttggtgattaattggctcaaaacactatatacttaattctctttaccatcctaactttgaatcgaaactaaagctgatgtaatcacaaaatcggatgtaaccgaaaccgttgatgattagcaatattctaataagatcagtcagataaatcacgctataatactagtggacgatctttggaattggacctcctgaagcatatatcgtcatatatatgagcattggcgcatctagctagatatatagatatattcttgatatactatgttcacctactagaaaattctatatccatttctcatattttttttgaaaacaaattataattttggagttgacattttgcaatttgaaattcacttgtttgggaccaatattttaaatataaaatctcctgaaatttattgtttctccaacaccatagatgtaagattcttcattataacataggaaacaatgttgttaacattgtcttaacatctttaacattcttacacaaatccatatcattgtcctgaatagcgccaaaatgatgtattaatatggaaaaaagttgatgcataatatgtattatgtatgtatcgagctttattcatttaactaaaaataaaaattataaaagatgtaatatatgcatggaataggatcaagggaatatgatgacagattgagagtaacgtgatcattcatgaatgggcctgttggataaagctatcgattctcccaaagataaacatatatcaccacttgttacaatctcattaccgacttgccgtccctaaaaccaaaccaattaatacgtgtcaatatcctacttacaccattctcattcaacaatttttctgtttttcatggtctgaaaaaaaaccttaatactaaatttgaagacaccttaacaaatgaggataagagcatattcatcatgaaaaattcaaaaattctaccgagcgtcgttagctcaattggtaaaattcctagacgaatcttagaggttgccggttcgagtgacgcttgggacgaaactaatattatatgcggtggttttgggcctggagggattacaagattcggcccaaaacctcctgatattcaaaaaaaaaaaaaaaaaaaaaattcaaaagttctttcaaacaaaaaaattattagatgtttttgaattttatataactaaattatagttattaaaataaaatcaaaccaatgtacaagagaaaaaaaaagtgtggtgtggtgtatatggtggagagaaaaaaaaagtgtggtgtatatgtccagcgagaactaacggggtcatttattgatgaataacaagtttctggggtgttttatgaaaatactattttttatggggcaaaatccgtaaaccctaaaaatacagagttcttgcgtcaaagagactgatttgttcttgtgacactgaaccattggagttgactgatcccgatatcatgcaatatctatcgcactctcgtagaatcgctcgggctttgaaaccactagctctcgtcgagaccgatgtgagatttgtatccaatgctccttctcatgttgttcatcgatctctttcccactctgtatttccaggtactatcttcttcatttttcacactttgtttgtttcgtcgttgaagctttgaaaaatgggaactttttggtttataggaaaaatggatacttgtaatcagttatatgctcaatcacctatgacggggttgatgatgttgagagctaacttctcctctgaagcaaaacatgttgagaatcctacaggttgctaaattttgactctttagttagaaatggaatggcttttgacacttagttagaatgtttcctgatcgaatttagctgtgtgtgttgcagaggctgtcaaggaattacatagtaaaatacttgattctgtgaatgtcaagagatcgatgcctccaaatgcttggttgtggtcattgattgacaactgtcggaacgaggatgacattagttttctgtttgatgttctgcagaatctacggagatttgtgagtgctttatttcttctcccttctgtgtcccttgttctgttagagaattctcactaccgagtctgaggtttagtttctaactgacgcttttacatgttggattgtagagattgtccaatcttcgtattcatgacaactttaattgcaatctatgccagcaagttgctaagacttgtgtacgtgtgggggcaattaaccatggtaataatccaaaccttatagttttaggagttagttttgcttcacttttgttcccacaaactgtcaaggctaatatattttaatttggaccacaggtaaaagggctctttggaaacataacgttcatggtttgactcctagtgttgcatctgcacaccatttactggtattgcgagccataagttggttggttttttctttggtgcacagattttttaaggttgtttgatggttcgttgtagtcatacgcattaaagcataaggacgccaaactgatggatgaagttatgaaactcctgaagatgaataacctgcctttacaacctgggacagcggatttagttttcaggtgtgtaggagatcagtttgttgctcatttttcagcagatttagtgctctgatttccatggcttattaattcaaagagctttagtatcatgcaatgaacttccactgaatgtttgcaggatctgtcatgatacagataactgggatctattagttaagtactcgaagaaattctgcaaagctggagtcaagctcaggaagaccacatttgatgtctggatggaatttgctgccaaaagaggtacattttgtgtagttggtttccttagtcttacttccaacgattctttggtcgatagaggagcttgttacaaccattccgtaatttgaacttgtgaagtggtcttgagatatgtctacgtaaacatcagacaaagatattaacctatcatatcaaaacagatatgccaacataactgttagcaaaaca

SEQ ID NO: 1039 - DNA, 6184 bp, Arabidopsis thaliana
tttctaatcccaaatcacctaaaatcactcaaatttgagctgaatcataacattaagtaattagtttcatcaatttgaagatcaatttgtcaaaaattggattcacttcccaccaacgaaaaaccacaattcacaccagatccgatacagaaacgttgtaaatagagagagagatcgagaaaggaaccagatttcgaatcgatgtagtggagaaaaggcttgacattttgaaagcaacgtaagcgcttaaacgcttaatcaaccgaacgatctcttcagtaggcgacggcgacgacgattccgccattaatttcacctttccttcaaagccaatttcaaatacgtcgtcggtttaaacacgaacgtccagattcttagcttcagctttcagatatggggcactgttctcgagcctcctccctgaactaagagagaaaagaggaattttacttttccattagaacacaactaggcaaagtcaatttgtttggacacgtgtcttgttaaacacgtggtggtggatgagcgtgtgagaccattgttttttatcatagggtgcgatggatctgatctgtacgaaacggtgcgttttgctcttatgtaaaggaaattttacacgataaaccgaagacgattggaggagtaagaaaactaggaaactagaattggattttggtttgttgttgttggatacttaagtcatcatggagtatcattttacagtgaaaagaagaaaatagagagatgaacctgaagaacaaaacaacatgtgcaaaatgtaggaaaaaatagcttatatcatttagttgaaatctacaaactatttaacttaacagatttacattgtaaaatctctagtatacatagtttgagatttcaattatttttctctagcaaaaatttgagataatttcttcaaaatataaataaaatttcgatagttagtgcgtaaactttttctgtcaaccaaacgcgttcagttaaaagttatattaaaaaaattcatatacatatatcaaacatataaagatgataaagtagatgctggagagagactttcttgcattggttgaatatctttgagggaagaaacggcgtcgtttagttgcatctctttttcgaggtgaaagcaatagctctcgaaaactctaaaactcacagtaactctaaagtcaagaagaaagagaagctccaactccattttgttcaagtctgcattgcttacgcctccaacccgagcatagaactcgttgttgtagtgcctgtgaatatgaaatttgttagaaaaaacgaaaacctctcttatctcatccaatacatgttgaaaccttgaaatcaataacttaaaaggggcacttaacatacatataggtacaaagtttgtcctcattttatattggttagatataaaatgtatctttcattttgttaatcaattaagatacaactatgatctatagtttcatgattagtctaatttcaagatattatagaaattcaagaaaggcttacttacacgtcatctagtatcttggcagcaatcatgacacaagtgacgaggagtctatgaacattcaaggagacaaccaaagaaccaggatgcttatgagccaaccggtctatgtacacatacccaacaacgaaacatgccgggctacattttgtgtacttatatatcctctcaaggtatttagctatacttatgctcggcgctctcacgccgtgaaacgcctccaagctcttcccaaatcccttagtttgcttagctaaccactcgtttcgtgccacgagcttctccatcacatgggagattatagtcagcactcttggagtggctgcttccgttgccgattctggtcccacgaccgggtccagttcatcgtctccggctgcggttaacatgggttctcttcagttttcgttaatgggccatgttgtatagttcgttttgggtatatatggcttgtagattgggtggttgagatacgatgagcttaagatgttacgtggggatgttatcatgtttcgtctgactttggacgagtgtgagatggttttgacacgtgtcacttcgcgagaagataggattccgatgatttttgtataccttgagcaatgaaattagttatcatttatcaaacaaataactttattttccacttaattttctgcatattactagcattattacccaaaattaagtttccgggtcttggtccataattttctcgtccggtacaatttcctttgaaaagtctcacagtacacaaattttactacatacgctggaatatattcttgatgtaaatactatatatagatgtaaattaatgttagatacattatttgaaaaaaggcatacgcgttgccggtcactgcatacatgtttaatgttttgataaggagagtttatgcataggtcatataatgttatgtggccattttttcttatctctgttttgaagttcatttatctttgtttacgttaatagttatcatgtttcttacttttatctatcaaatctatatatcattttctttgcataaggcatttttttcttaaattgtatccttttaaatagttaggttggtgtgcaacttcttaaaaagaaaagttagttctttgaggattatatcaaaagataattactagttcaaattttacaattttcttttagaaacaaattttttacgaaatagctgacaacattttttaggttaggaatcccaaaatttgagggtagcctgatcaaaaagttagaaatgctaacaacttatttctattcaagagtcaactgcatagccattatacatgcatgtacattaaactgatgataatatagaagttgatgtggcctagtctatttcaaatgaaatgactcaatgatctcacatctatatatcaaatgttagagataccaaaagacatcacacaattcagaaaaactgataactctttcaaactagttgagaacatattttcgaaaaagaaacgtacgtggctcaatattcaagtaaattacgacatgtattacacgtataaacgatatcaataaatttattgggaaccacaagtaagtaacactagtaatagctagtatcgacccgaaacaacgagttttaaggtttgccacagagcacaaaatctatcgagcaagaaaaaaatcagatagtactatcttgacaagcgatataatcacaattacctatgcatgtcttcataataaatcacgtcaaggctcataattacgccacgtggattttaaccgcgtggacacacgttttcacaaggtataaaagaagcaaccctacctctctttcttctacgtgattcgcacaccactgtaaaagtgtaaaaaaactctttttttgttcttcttcacatttcattcgattcaaaaaatattctgttcttagattgtaatctgtttttttttctgtaatctcccattattgggttttgaatttctcgtcattttacgaaaaaggttgtgaatcggcctaatcgatctcggtcgtcataagtgagtgcttcttcctccgtattagctctcaaaaacatttgtgtttctatttgaaacgtaacaatttacgatatttttcctcacaaattaatgtaattgaaacacaaaaccctatcatgcatgatgcacccatatattaccatctttaattccaaaatcatcattttccttccatgatttgtatctgaaatggtcatgcatctatgttgcgcaggatcttacgtgtgttttactaatcgtgaaacaatatcaacgtcagattcttctctatacacttttctttaagtttacccaatcatcatgtctccaagtatggagccaaagtgtgaccattgtgcaacctcgcaagcattgatttactgcaaatccgatttggctaaactatgcctaaactgcgacgtccatgtacactctgcgaatcctctgtctcacaggcacatacgctctttgatctgcgagaaatgcttctcacagccagccgcaatccgctgtctcgacgagaaggtttcatactgccaaggatgtcattggcacgaaagcaactgttcggagttaggacacagagttcagagcttgaatcctttctctggttgtccttctcctacagattttaacagaatgtggtcttcaattcttgaacctcctgtctccggcttgcttagtccgttcgttggttcttttcccttgaatgatctcaacaataccatgttcgataccgcttattccatggtaccacacaacatcagttacactcagaatttcagtgataatttgtctttcttttccacggaatctaaggtaataattaaaggagtgaaaagtgttccttataagttcttgatgaaaaatacagttcttatttgtgtgtatgttccagggatatcctgatatggttcttaaacttgaagaaggagaagaagatctatgtgaagggcttaacttggatgatgcaccattaaactttgacgtaggagatgatattatcggatgttcatcagaagtacacatagaaccggaccatacggtaccaaattgcctattgattgacaagactaacacatccagctttaccggctccaactttactgtagacaaggctctagaggtctctttcgcttttttgttgtcgttgttgtagtttctagtacctcaagaaagtttctaatataaattgtgttattctgtttccaggcatcgccaccaggtcagcaaatgaacatcaacactggacttcagcttcctctatcacctgtcttgttcggacaaatccatccatctcttaacatcactggtgaaaacaatgcagctgattaccaggattgtgggatgtctccagggtttataatgagtgaagcgccatgggaaacgaattttgaagttagttgtccacaagcaagaaacgaggctaagttgagatacaaggagaagaaattaaagcgctcgtaagtttattactaatcattacaaaacagagtttataccaacttggatcaggtttaatggtgtttttctttttttttaattgtagttttgggaaacagattcgatatgcatctcgcaaagcaagagctgacacgaggaaaagagtgaaaggaagatttgtgaaagctggtgacagttatgattatgatccatcatcaccgacgacgaacaattgaaatttacaaaaataatgtacagtcttctttcccaaacagacttaaaccatgcttcatgatgatgataaaggttggtaaaaacagtttcttgtcgggaaagtaatgtattgtttgtcttattgtgtatagtttttgtgaatcgaagaaatcaacatgttgaggcatgggaacgttggagaactaaataaagttggtggaaagccaaaatggtgaaaattatttagtaacttcttttatttacagaatctcttttgtttttgattatttttaagttgggtttttccttttataggacaaatcctaatttatctctttataaataaatttcctagctgtttttttttttattaataataaagtagcagtgattacaatctgctccattacagagctcgcgtttaacgtgtttcaagagaacaattctctacttattaagcattgcattatgaagatgtttcacttgcaaaaagtttagttattaccccactggtttagaaccaattggttcttagttttgaatcttaaccttattttaaattaaaatgttgtttttactaagttaagaaaagttaggaggaagtttaactaatttctatttcaatggttaagaactattggattcttaaaaaacaacaattcaaaaatgtctatccactcaaaatacaacacatatactcttcttagttttaagaaaacatcttaattaagatgtttatcttagctaaggtttgttgtttcattaaatttaatcacttttattgctaagaatacaaggctggagttgcttttatgtacctttaaattaaggaaaatgacaagtccaaagaagtagtgagaaagatttactacactaaaataaatatctaacaaaataccaaacagagagtttggtgagttaatttttttttacagcagttttatggaactttttgtttgttggttacaaacattgcttagtagaaaaaagcaaaagattcgaagaataactcaataacaacaaac

SEQ ID NO: 1040 - DNA, 82348 bp, Arabidopsis thaliana
gatccttgtttcttccctttctattgcagatattttttgctatttttagtcactacccatttcttaaaattcttttttttttttcattacacatttcttaaaattctaagcttcataaaattaaaattttcagatttttcttaaaagaaaattgcataaaaaccctagaatatttatagcttacaccaaaaaaatctaataatcagagaaaaacaaacggaacctcatgattatcttgttcacttctattctccacggtggtttctccgaccgtcgtcaccgacggtaaaacaacgtggaagtcatgatctccgacgaggcaccggcgcgtgagtttctgacaagaagtgcatagcacgcgccttacgtgtctccaagctagaaaattcgctccatgaacccaccggtcacattttctacagaggaacgccgagtccgcttcacagaacacggaggcgtctccgtcgcaaagctcacaccttaccggaacactcggtctcgtgcagagactccggcaacctcctccgtcacttcttctgctctcttcattattcaagcctctacacatttttctcaatctctttcttgatctgtttcactttctctttcttctgggtgatattgaggaaagaagatttgggaataggagaaacgtttatacatttatataggaatcttatttctttaaaactaatgatgtgtttgtgttgtgttgttgttggacacgtggatgaatcttgccctgttattttgacgtaaatgcccttatgagggcaaaatcgttaatttcaaaattaaaaacgcttctcctccaagcgatctctcgacctcatattggacgcacaactttaaaattttcgaaacaaactccgtttttttttttttgcaaatcgaaacaaacctctagtacgacttcttttggtttatatcacccaccacttcaatgtgaatcattgttttttttgttttttgtacgatatgatgttatatgtatcttattgtaatgtgattacggtgtacgataaaccaaactattgagaatttaaaattttaatagatgcaccgaaaggttaacaaacaatcgattctataaacaaatatgaatgattgcgaatttagttaattacgatggagtttccttgtccaaagcgaaaacatatatagtcgtgtagtttatctctttttttccaaggtataaattttgagacatttacatgatatttaaggttctagaactagttggataaaaaaaaccggcatatattatcattcgtttcttagcacaccttcattttcctattgaaatttgtgacagaattttctaaaataattaagggattgtttagagaaaaaaattaaagatactacaagtgattagtggaggatagggggtacgcataagaaacggctagaatttagggtgatatcaagtatcgttgttattggttgtctttgggacattgtgtggttgttagtcagtcaactcttaattaattatataagcttactatcagaacaagcaaagaggacttcacttgtatggttcacatttaaagatttttttttgggttgatttattagtcatttatttgtttaatattagtgaaagctaccccacgaattacgaataatatcagttaattaaaaaggtttgattattttgaattgctatacattgcgtgtgattgcttagtagtacgtatataagtaatcgaaaagcattttaatgtcacaatattcgattttgtagttagcatcacattattcgtaaacagtgtttgtaaaatagtgaattcatttagtaagtgtcttaatctattgttaaagcaacctaataagattaattacatactacagttcggacgaaataaaataaagtaattagcaaaatatgttattgaatctctttaaccaaaattataatatagttattcgttgttgctaaaatatatcgtatcggttaaaacatagcagcacatcatatctatcgccatcgtttagacatgtaatgatcggagtcatacatttcgttaacttaaattctactaatagtacaaaatttacgtgaagatagagataattataaagcattaaatgatcaaaaatatcttcaatgatgttattagattttttaactgcatatatatgtttaatattgaagattaattagaccaaattaaaaccttgacattatgtaatatataatttgagtaggtattttccattttggacgttcaactagagttgttgttctttatgcctccaatcttgcttcgattcggatataatgcagaaagttatactgaatcaaaggtaggttacaaatatgtttatgtgaagaaaaaaatttcagtttttgaaagaaatataaaagcttgagaaatagaaagactagagtatatatgtacatctcattatataatcggtacataaccaactggtttctgttaaaccacaacctgtaacactctgtctctaatacaagtaagatcgggtattggcggactctactcagaatagaaaatacacatattgtcttataccattttatgaagactatatatctaactttttacatacacaaagtatatatataacaaaaaaaaaacccacgacatttctctacaaaatttaagataaagtagtgggtcgtatggattattgactgatcaaaaatacgcacacttattagacggactgaaataataatgagacgaaaatattattatatttgtatgtttgatacgttatggaaaaaaaaagtgatgttgttgttgtccacaagttgattcagtgttgatgcataagtccacttgtgtggatcatattggttcaaaaatccaaaagctttttattttctaattttgtcctcagatttttctgtctgttctttattgttgcctgttggtacgagaccttagccgtccaatctttccaaaagtatgtgaccattatttttttgcaattttaatattcagatttttttttagttggtacgtaggacatattatcacatttacgcatgtatacgcgtaactataaccctggctagtttataaaatatctttttatagttttgatcgaagttgaagaaacttggacggtgatatgaatatgatatcttatgctaaatcattttgttgtctaaacgatttgcgttagtaaaaacgattgtccaagaaaaatataagctatatatgagcctatatagtatgtaatgaaacaaactatttaacataaaagtatatatagactaaaaaaaaagagtatatatagagttcggggtatgttgtaaaaaggccattgtaataacttatttatcatcaacaaaatccaaaaagctaatagatctttgaattagaattagtaacttaaataaatactatcattgtcttgaaatcaaaacagtgtgtatataaatatatgatcacaagtttgggagaaacatcgttaaggtaaagtggatacgagagattgcaattttaagagaaacattagttggatacatgaagaaacttatatcaaaaattcatcttcaaaaatgatgaaacaaaaggtgtgtatggaagaaccagatggtcaacttgacacatattccactgatattaataactgtttaatctatgactttggaagagcaatgattcttttttcctatagaagtgagagaatgttcatattagagagaaaaaaaatctttgataacaaaacaaaatcccttgtctagttgtggtctcaagtagaaatttttgtttcactcacttccaacttgtctaagacattatatgttcccaagcgtttaaaccactgaaaaacttccattcattaaataaagcttataggaaaagatgcaacaagtgtatgacgttaatgtctacacacccaccttacctagactgttgttagaacactagtttaatatttttccttggctaggttattttactcaaacttacctttaataaaaaaaatttaattattggatagttccgcttaagggtttgaacccaaatacttatcggaaaaccgatcgaatggattcaatttttctatatccgatgaaccaattccgaatccaaaccgaaaaagagaaaaaattgatgtagaaagtttctttgtaaattaagaatatatttgaccaaaacctgaatccgaaccgaaatcaactgtaccaaaccatctattttagattacattttcagtttgaaaccattattcatataccaaacatataaaaacccgaaccggattggaaaagcgcattagccaatcagtaggcctaatttatcagtccccgtaggcccaaattatttaataacgtaacatcaaaactcaattactggaggccatatgcaggcccaaattagtgtttcgcttgctagggctttaaagtaaggttatggattcttgtttgtaggatcttctcttgcttagccaaggcaactatactctattactagatgagtatccgtactacgtgcgagtttatgtattattatttacaaattgttttatataatgtatgttcatataaagtaaagttgaatgcatcggttttgaaacataaatataatttgtaattgtttttgaaaagtcctactatattagttcatctgaaaaacgaatgtgcttgagttattttttattgttgttttaaattctcaggttttttttaatttatatatccttgttttttggttctaagtgtagattgtgagacggtgaaattttagaaaatttatttcttacactaaaaatataacatgtctttattaaccatgtctctgcatattcaatctaagcttattcaacttgatgttcttgaaaagtttagttaaaatcttgtcataatcttatatctcacgttttagttataaggatagctcatcaaacatctttcaaattacttgttttcttagcataaatctcgaaaagcatctgcatattcatttagtttctttcataataattgtctaatttttaggcaagtctaatttttaggcaagtaatatatgtagcatgtttggattttatgatcactttagccacttaagtggatctcaaaattaaagaagatatattgaattaaaaaatatagaaaaagtgatggttcaagttctgattaattatatcctttatgttgaattaattactaattatgtattacttattttatgaagtctaggtggcaagctctcatgtgctgatgtgtcaagttgtgggagagagttagcctcctttcatatatatgattctacctgttccacattaagctccagtttacaggacagtactcagaccgattttagatgcttaatagcttcagctctgtgacagttctccacactatatgtctatatcgggtataattactccatgttcctctcgttcagtctgatccaacgctgcctagctaaactaaggcagcatcaacgtcactactttccgattctaagaaatctaaattcagaaacacttcaaatttctaagcagctcagactttgtttacctgatgaaacccaggttcatgagtcaatgtaacaccaagctcatgtataatagagtataaactggagcttaatgtggaaataacctgatgaaacccaggttcatgagcttaatgtggaacatgtagaataatagagtatagttacactcttactttgatattttcagatgaaggctccacgtcgccaatgctgtgacatctctccatcatatgaggaaacaaaaggctaacttttcatggttcagaaacttgtggaagtctgtatccgaagatctctcgacattctgacaatatttgtcgatgggtttggtcgtttttgtgtaataatatgcaacattgtttaaccagtacggcttctcttctcttgttattaagttttcctagttaaactattaaatgtataaaatgctaattgtagatgaaactgaaaagttgaaaaagaagaagatgaaactgaaagtttaaatcttatatttgacccaaaataaaataaaaacagagaagcttgtaattatagaaaataataattccttcatttcaggttgtcaccataaaaatggtgtgactgtaagagtctgaactcagtcacacctctttactttttcttcggccttcttgtagccgcaaatacttctctgtcatctccgttacaagctctaaacatttatttgaatttatcaatagaattcgtataatgtaaccaaaaaccgtaaactaaatatattttataaaacttatctccattcaacatccaaatccgttcgagtctcacacaaaaatccaataaaatgtactattcatcgccgacatgcttcgttttgatcactatatttgccgtggtggtaacacaactgatctttatgcgcaccgtttcgtccttgaacatgaccaatgcctatctgaaccacaaatgcttagccaatcaagggaaatacaagccgggaagttggtatgagaaaaaactccaaagtattatagtctctatcggtagcggtgatggttttacccttggttacgacatgatggcccttggtaaggattctgattacgtagccgtcaccaaccagtgccgtggcgactccaacgggtccatgtgccgctcctgctttgccaccgccatcgcaagggtaacgctatttcattattgattagctttcacgtctttctttattacatgtataaatttgtgcacacatatatgtcagttttggcgttatatcttatattttatatgtaaattactccatgcaatgttgatattgattttggcgttaatatgacaaatgtatatgaccgcttcgtatagaagatgcccgcgatataagggggcaataatatggtacgaccaatgtactctccagatttctccgttcgatactcaagggaagttcgacaaagataatgatttctgtatgtccaacaagaagaaaatgaacgtagattcgtttggagagaagtggatgacattcctcgacaatttggtaggtatagccctcaaagatcatttgtatgccgctggggatacaaggttcgggacaaagaagttgtacgggatggtgcagtgtaggcttgacatatataataatagttgtcgagagtgtgttggacacatagccgtaaaatttcaagattgctggcatggtaaacaaggagctagagtgttgggtagtggttgtaactttaggtatgagctttacccttttgttggtagtaacaagcgcggtcgtaatttaaactaattttaaattcttatgcatttagatattttttttccgtaaactttaaattatatatatataatttattattattattattttgtttagaaaaaacaatgtcacgtagtttaaataaattttctttgtattatgctttagaaacattttaaataatgtatttttgaacttctcgtgttaaatttattttctgtaaatttctaaaacgttttcatgaaatttatagatagtaatcaaggaaagcattaaaaaaaagaagaagaagagaaacattgcattattatgtttgaaaaactatatttaaccgtggttagttagttacaaatgattgatattttaataggaaaaaataaccagcattaagaaagtcatcaaaatgaaaacatttccccccaatttggattctaacacacgagggagaaatatggtaaacgttttgcatcatcactattataaaataaagaatgaggaaccgataatatgtctaaatgagaacagcgaaatctatatgaaaacatgtaattcattaacatctagtaaatatcaactcagtatctagtacatagttcaacacatgtttgagttactcagcatctcatgatcttgctttagtaatataaatatctgtttgtttgttgttgttttaagaaaaaataaataataatctagaaacataaaaaccaaacactaagttgtatagaatcttataatattcgaccaacaaaaaacaaagaatcttgtaagttgtaattatagaaattagcaattttttcattgtcaccgtacaaatcttgtgattataagagtttgaactcagtcacacctttgaacttttgctttttcttcggctttcttgtcgccgtaaatactaatttcccactcctgtccgttacaaacttatactctattagaaactttaattgattaaaaagatttctcataaggtatcaaatccctcatcatatacatcacagtctcaacactttatctacaaaataacactcccgtttaaaactaaaacatccaaaacaatgtactctttatcttctgtatcaaaacaccttattttggtccatatattggccctggtggccacacaactgcttctcatacgtagcgtttcgtctttgaacatgaccaattcctatctgaaccacaaatgctttgtcagtcaagggaaatacaagccaggaagtgcacatgagaaaagcctagaagctatcatccattccatctcggttggtgaaaatgttaatagcggttacgacatgatgtcatttggtgacggtccagatctagtctgcgttgtcctccagtgccgtggtgactcctacgggtccaagtgccgctcctgctttgcctcagccatggccggggtaatgtcactttaatattatttttttagctgccaaatagttacatgataatgcgtacacatatctcagttttggttacatcttattcttagcgataaataaaatataacagactagaaaactatatcttatatgtaaattagttcatgcagtgttgatattgattgtggcgtcgatatgcaacatgtatatgacagcttcgtaggagatgtccgagatataaagggggaataatatggttcgaccaatgtcttctcgagatttcttcgatcgataatgtagggcagctcaattacggtgatagtttctgtatgtccaacgcgaagaatgtgggagatgatccattttctttcatactgaagtgggatactctcttcgacaatatatcacgtatagctatcactgaaaagaataaaaacttaaaagataccaacaaaccggcactatacggggcgggggagaagaggctcgggacaaagaagaagatgtacggaatggttcagtgtacagatgacttatctgttaaggcttgtgaggagtgtctggttgctaatatcttgaagtttcaaaattgctggaaaagtggtaaacgcggtgcgagggttttggataggagctgtaactttaggtatgagctttacccttttgttaatgccaagactggtcctaattcttattttaagagttaatgattttttttaaaaatacaggttttagagtttgtttgtttttgtaaattatcaattttattttacattaattaattattttatgtagaagaaatcttatgatgttgttaaaataaagggaaccatcccaaaagtcacttgtattttggctttattgtatttcatgatatctccatgtttttattgcactacatgacacttcttaaaattttataccattttgcctttgataaaatacacgatttatattgtacgtgccccaaataattctaatatggaaattctaaattgttgacaagaaaaaccaaaacaaatctaaaacatgtggtgtaagtactatgacagatcattacgtacatatatcaaacaaaacctctaatacatttgaatgaacgtttttttatatataatatacgtaaatcttaaattgaataccaaagcattatgtacgtcaaaactaaaatgacatttagtacacgacagacaaacactgtatttattttgttaagtactgtttttcattattaattaagtgtattgtctataaacccaccaaagtgtgattgattccaataaatactcatggttgtcatgagatgtaatttacactcttcatcaaatacttcagcctaatccaacaccattcagaataatttggaagtctatacccggggatcctttggaattcttacaatagttatttccttgatgggcttggtcatctttgtatataatatgcaactattggttgaatggcctttcttctatttttatagagttttactcgttaaattattttagtgctatctcagggtctatctttgaaacattttgaatcaaatttatcaaaaagaagatatatataacttaaagcaattttcttatctggagagacacaaacgtaaaactaataacagttgataatgtttgaccgaaacaaaagaatctataattatagtaattaacatttccttcatttcaggtcgtcactgtataatcatgtgactgtgagagtttgaactcagtcacacttttgaagttttactttttcgttggcctttttgtcaccacacatacaaataaaactaacttctctcaggtaaccaaaaactgtaaactgtaaactttatcatttaccttaacccgggaattcgccttttgtctattttttaaaccactttgtttgattttgaattgtgttagtcttatgcatactgttttcttttgctttgatttgtattgtttgattttaattgcttggtgtgcacaaaaaaaaaagaagatattaattgcttggtttagttaagtttgtattagaaaaccagaatcaaactcttgttaaccttagattatgtacttgtgtattctcgatgagttaattcattactccttgtggttattagtgcattaggaatttaattgactaaaaaaccatatcaaagaacaaactcacttcttttttttttgtaaactgaacaaactcactttaacgtgtcatcttccttcgtaagaggcggtcagagaagcaaaactgtaccaaattaaatgtcataaggagtctgattcgattattcccttaatgaaagagtcacctacttgatgctctactgttatctacgagcatccaacattccctagatgtacaacttcaattgtttggactttggaggatctcgaaaataggatccgagtaaccgaatattcaaatgggaaaaagatagccaatcgtatacgatgtatatcacataaattctgattttttttattaaagttcaattttctatgggtttggccattttttgtatgatatgcaaccatgttcaacaaattatggcctctgttctcttgtttgtagagttttcctcgttaagctgttttagacttctagttccatctcaggatctagcttttcaatattttaaattttagcaattttccttaataaatatataatatagaaacacagaaacatgataaattagcaaatatatataattagatgaaatctgaaaattggaatcgaccatgttacgttggacaaaaaaaccaaagaattttgtaattatagaaatcaacaattccttcatttcaggtcgttatactacaatcgtgtgattgtaattgtttgaactcagtcacaccttcaagcttttactgtttcgtcggccctcttgtttccacaaagttcctcccgagtctcctacataaacatcagtctcaatgctaaaaatttattttaaaacaccccacttggaaacacaaataaataaaaataaattcaaaacaatgtattcttcatcatctgtatcaaaacgcttcgttctagtccctattgtggtcgtggtgaccacacaactcctcctggtacgtaacgtttcttcactaaaccttaccaattcgtatcttcaccacaaatgcgtagtcaatcaagggaaatacaagccaggaagcaagtacgagaaatccctcgatgatatcatccaaagcttttcgaataaagataaagattcgtatggttttcgtaccggttacagcatgaaggcctacggtaaagaacctgatatggtctccatcacctaccagtgccgtatcgactctcgtgggcccaagtgccagtcctgcgttgtcacggccggttatgaggtaacatacttgagtgttactaataaggtagctttcacataatgtataaatatgcgtgcagagtctaccgacacacactatatttatgtttagatctaacacaaatataaacgcgagaaactatatcttatatatgaaattagtccatgcaatgttgatattaattatgggcctgtgggcctgtggcgttaatatgctaaatgtctatgacagcttcttcgtaagagatgtccgagatataaagaggcaataatatggtacgaccaatgtcttgtggagttttcttcgttagatacttctgggcagatcaattacgacgacaacttctgtatgcctagcgcgaagaacctgatcggcaattcaatctctcttgaagaaaggttgcatctcctcaacaatcttacaaagatagccgtcacgaaaatagataaaaacatagaaggtataaaaaaaccagtactgtatgcggcgggggagaagagactcgggacgaaaagtctatacggaatggtgcaatgttcggctgacttatctgttcagggttgtaatgagtgtatgttatattatatagtgcattttcaagagtgctgggaaaataaacaaggagtaagagttttgagtagaagctgtaactttaggtatgagctttacccttttattaaccctaagggtccttattatacaaagttctaaagcaatttgaatatgttactcttataatgttttttcttttctttttaacttcaaatttccccttacttaacgtgaattgttttctattatttagtaaaatatcatatgatgtagtttaaatttctatcagttagtaaacgattctaaataattaatttttgaattttcatatcttaccatagtggctagatagacttgttattaaggctttttgttcatttgattgtctttggaaattgttgatgattcattgattagtaaatgtgttcataacatggaaatgaattagtcttgtttagtgaattcataacatgggaatgaattagcccaaggatcacacttgttagatgttgtattaatcgccataaaccacctctcgatcatctttatcatttaccttaacccgggaattcgccttttgtctattttttaaaccactttgtttgattttgaattgtgttagtcttatgcatactgttttcttttgctttgatttgtattgtttgattttaattgcttggtgtgcacaaaaaaaaaaagaagatattaattgcttggtttagttaagtttgtattagaaaaccagaatcaaactcttgttaaccttagattatgtacttgtgtattctcgatgagttaattcattactccttgtggttattagtgcattaggaatttaattgactaaaaaaccatatcaaagaacaaactcacttcttttttttttgtaaactgaacaaactcactttaacgtgtcatcttccttcgtaagaggcggtcagagaagcaaaactgtaccaaattaaatgtcataaggagtctgattcgattattcccttaatgaaagagtcacctacttgatgctctactgttatctacgagcatccaacattccctagatgtacaacttcaattgtttggactttggaggatctcgaaaataggatccgagtaaccgaatattcaaatgggaaaaagatagccaatcgtatacgatgtatatcacataaattctgattttttttattaaagttcaattttctatgggtttggccattttttgtatgatatgcaaccatgttcaacaaattatggcctctgttctcttgtttgtagagttttcctcgttaagctgttttagacttctagttccatctcaggatctagcttttcaatattttaaattttagcaattttccttaataaatatataatatagaaacacagaaacatgataaattagcaaatatatataattagatgaaatctgaaaattggaatcgaccatgttacgttggacaaaaaaaccaaagaattttgtaattatagaaatcaacaattccttcatttcaggtcgttatactacaatcgtgtgattgtaattgtttgaactcagtcacaccttcaagcttttactgtttcgtcggccctcttgtttccacaaagttcctcccgagtctcctacataaacatcagtctcaatgctaaaaatttattttaaaacaccccacttggaaacacaaataaataaaaataaattcaaaacaatgtattcttcatcatctgtatcaaaacgcttcgttctagtccctattgtggtcgtggtgaccacacaactcctcctggtacgtaacgtttcttcactaaaccttaccaattcgtatcttcaccacaaatgcgtagtcaatcaagggaaatacaagccaggaagcaagtacgagaaatccctcgatgatatcatccaaagcttttcgaataaagataaagattcgtatggttttcgtaccggttacagcatgaaggcctacggtaaagaacctgatatggtctccatcacctaccagtgccgtatcgactctcgtgggcccaagtgccagtcctgcgttgtcacggccggttatgaggtaacatacttgagtgttactaataaggtagctttcacataatgtataaatatgcgtgcagagtctaccgacacacactatatttatgtttagatctaacacaaatataaacgcgagaaactatatcttatatatgaaattagtccatgcaatgttgatattaattatgggcctgtgggcctgtggcgttaatatgctaaatgtctatgacagcttcttcgtaagagatgtccgagatataaagaggcaataatatggtacgaccaatgtcttgtggagttttcttcgttagatacttctgggcagatcaattacgacgacaacttctgtatgcctagcgcgaagaacctgatcggcaattcaatctctcttgaagaaaggttgcatctcctcaacaatcttacaaagatagccgtcacgaaaatagataaaaacatagaaggtataaaaaaaccagtactgtatgcggcgggggagaagagactcgggacgaaaagtctatacggaatggtgcaatgttcggctgacttatctgttcagggttgtaatgagtgtatgttatattatatagtgcattttcaagagtgctgggaaagtaaacaaggagtaagagttttgagtagaagctgtaactttaggtatgagctttacccttttattagccccaagggttcttactataccaagttctaaagcaatttgaatttatttttctattatttagcaaaatatcatatgatgtagttgaagtaaaaatttttatcagttaagtaaacgattctaaataattcatttttgaaattttcatgtcaagttgttttctttaaattgttaaaactatatatcaagattaaattgcattaacatgttaatccgatccgaacatcaaaataatcattatgaaacttttagtaagtgaaatgaaatatatatttattgagttctacattacactacaaaaaaatacgtccgttacatttatggtttacgtcagattttcggtaactataagaagtttgcgttagttaaaactaacgtctcatgggctgacgtgaagttaattaactctaataatcactgtcaatatttttcccatttgtcgattttacgtcatttacacaagtgatgttaaataagtgatgtgttcaagcattttttttcaataagttagaaagtattcatttttccaaacataatttgaaaagtaattattttaatattcacaatttgtaaaagaaatacttttcactatttgctttgtacattaaaatttgtacaaattatttagtatacatatatacagaaatatacataaattaaaaaatatttttatttgtacatttcattaatagtacaaatgtacacaaatttatatttttattcgtatagccaatttaatatatatatatatatatacataaataaaatatgtatatttttatcattttaccaggattttacactgaatcttgtaaaaatataactacgtaataaatcaataatggcttcatctgaggtcggcatcgtataaattgtgtgattgtaaaagttatgactcagtcacgcctttgaacctttactttttcatcggcccttctctcgccgcaagttccaagtattaattctaacctctctctcctctcctccattacaaactcgaaaacattttttccgaaaacctaagtggtcaattgaaaaccttactataaggtaaccaaaaactaagactataaaaaggaattttttttttatctccactcaacatcctaattcctcttagtctcgacggttcatctataagaaacaatcttttggaacgaaacaaaattacaaatccgaagcaatgtactttccaccatcgtctgtaccaaaacgccttgtcttggtccatatctctgccgtggtggccataaaactgctccttatacgcagcgtttcttccttgaacatgaccaatgcgtatctgcaacacaaatgcattgtaagtgaagggaagtatcagcctggaagtgtatacgagaaaaacctcaatataatcatccgtgcctcatcagccggcgattttcgcagtggtttcgatttggttttccgtggtaagggttccaatttcgttacattaatgtaccaatgccgtggcgactcctactggtcaaggtgccgctcctgctacaccaccgccctctcggcggtaacgtcactctaatattatttattacctatcacacatttacgtatgaatgcagaagcacacatacacatgtaaattttcgttacatcgtagaagtacatattatagaaaaaatatatgttatacgttaattattacgtgcaatgttgtaattaattgtggtgtcaatatgcaaatttttctatgatagcttcgtaagagatgttcgagaaacaaggggggaataatatggtacgaccaatgtcttatggagatttcttccatccgcaatgaaggaaagctcgattacaacaacaacttctgaatgtccaacacgaagaatgccagcggatcgcctctggagttcaaacagaaaatggtcgatttcctactaaatttggggttgaaagctaccagtgaagacaacatggacaagtacaaccaggcggtgatgtatgcgatgggggaggaaagagttgggacaaagaagctttatgcgatggtacagtgtacgaaagacttatggttgaagacttgctatgcgtgcttggaatggattatcctcaaggaatcggactgctgcgatggtaaactaggagggagagttttcagtaccagttgtaactataggtatgagctttacccttttattaaaccaactgtttgatgagagttcatgtatatgcgtgtgtgtgttacgtatgtgttgtgtttgaataaatgttttgagagaacacgaattttgcttttcttgtttgtttgtggtttgttttgtataacacatgttagagagttgatttctacacgcactatataacataatttgtttcataatatatagttagttctttttgtttcattttatgtaatggcttcaagctacacacatttccaagtatatatactttgtacgaagcgaaagtttttaacgttgttagtcaatcgctaaattaataacaaatttaaagatgtcatgttttagaccaaaaaaaaaaaaagaagatgtcatgtaaattgaacatcagaatatcacttccaaaatttcacatgaataaagtatatatatcagttagttctcaattaattgaacaacaattctgatccgcccaacttccgtcatgcacgctaacagctgcggtatagaccattggtaatgttttagacaatattaacatcggatcacatgtaactagctagatgaattttctcagcgctatctagctgttagcatctaaaagatgttagaatcgagtgcaaataaatttagcctctttgaatgaaacaacataacaacttgaaaataagtgtttgcattatcaatgataatgcgacctttgtggtacgtagcgtgtttagttaaagaaagatatatgtagttaatgtgtgtataaggataaatagaggcaactttgagatttgtttttaatatataatgctagtgaaatgaagctgcaagttgaaattctctatcaaaatttactaaatctacatgtcgtaattatatataactatagaatcaattcaattaaactagacagacctttgtcaactaaaagtactaaaaaaaaaagttactgcaaccattctaaatttctaataattagcaattttgtttaacaccatctccactcaatatcgaaaatccctcgagttctcctatataaacatcccaactcctaaaaaaatccccctttcggagaatataaaattccaaaactatgtattcgtcagtatcaaaacgccttgtctccgtccatatcttggtcgtggtggccttgcaactgctctttatcccaatgttttgtctttgaaccagaccaatgcttatctgcaccataaatgcgtcaacgaccaagggacgtacaattcggggactccatacgagaaaaacctcaacagtctcatacgtactatctctaccttaaatttaaacttcggttttgtccactcgtccaatggtgacgctcccaactctgtcttcattaagcttcaatgccgaggcgactcttacttctccaagtgccgttcctgccttgccacagccaactccgaggtaaagtcatttcaatatttttaatttgttgtcacatatttatacaaaggtcatcttttttatcagtgatccagatactctactagattggtgttgttgaaaaaatactgcatttaacactagtataaaaagtaaaaaatttattaattgtcagtgcaatattgttcttgattttggtgtctatatttatatgacagattagaaggagatgtccaaaaaacaaggagaaaataatatggtacgataactgtgttctcgagatctcttcaatcgatacctttaacaagattgattaccagaacaatttctttatgtacaacgcaaaggatgtgagcggcgatattgagttgttcaacaagaatacaagggatctccttcatgagctgaaggagaaagccaacattaagagcaagaaggatttcatgtatgcggcaggggagaagggtcttggggaaaaaaagttgtatgcgatggtgcagtgtacgaaagacttgacacctaacaattgtaatgtgtgtttaaattggattatggcgaagcttcctaaatgttgcaagggtaaacaaggaggaagagtcttgagtacgagttgtaattttaggtatgagctgtacccttttcttatgatttgaagactactaaaagaaaggacctttgttagagcctctaacttagagggtttcgtttggattgtgttgcaaatcagaggacgtgcttgaaatgttgcatctcttcacacaaaagcttcaacccttaaactgaagctgttatattgcattgtaattgatgaatatatagatgtgatcatttccttttttcaccgttgatccaataattttactctcttagcgacctttttattttatgtgttgttggttgaattatttgtttgttctagtcattgcactactctcttaattttttgtcatcatcaaacaaatataataaaatctagaagatttgaatttaatttccacggttagttaaaatatcaccaagaaagcacaaaacacgtataattctacaattaatgaattaattacatcataaattagccgttaatctatataatgaaactacaattgacaagttcgaatggtttctaggtaaattaaaatgacacgaataaatacacttatacacagcccagagacaaagaaaaatgctttctcatgtaattagaagttcaatgtattcttgcgtacgttgactttcacagtttcacctctctttaggttgtaaaaccaacattacgtattagctccactcaacacattccgtacgttctttgagactgcatgaagggtgttagccatctggctaatttgcagcactgaatatgaaatctatgaagctattttggaggtcttaacaaaattaaatattagtacaaatcgtgtgatttaaagagtttcaaaatcctaacattaataatagactaggagtcttatgtataaatgctagggagaagatgttgatgttgtaatctccatcatatgataatttaaccaaaaatatgaaaaaccttgtaattttatttaactacgttatcgaaactatattgccttcattattgcataattatgaagtatttaaactagacaaaccttttttagaaaaaacaaaactagacgaacttttgaatattgactttttcatcggcactcctctctcatcggcgcaaataccaagtctcaactcctaactcccctctcatgtcctttacaaaccaaaaacatttcttttagaaaatttgtcatgtataaccaagaattgataacaaacattctataatgattagaaaatagaacttaaaaatcatatccactcaatattcaaaatccccgagtcttcaatataaacatcactcaaatcctttacaattaacctaatttaaaaaacatccgtcgttggggaaaaaaggagaaaaatcaaaaacaatgtcttcatcgtctgcatcaaaacttcttggttcggtccttgtctttgctatgatttccgtacaaatcgtttttatacactgtgttatgtccctgaatgaaaccaattcgctgaaccaaaccaatgtttatctgcaccacatatgcatcaacagtcaagggacatacaaaccagggagtccatacgaggaaaacctcaaccgtgtcatccgtgcaatatctatcacaatttctaactatggtttcgttcatggttccaatggtgatgctcccaataccgtttttggaaagctccaatgtcaggcgactcttacttgtccaagtgccgctcttgcctcaccaccgctttctccgaggtaaagtagtttgaaaattattaagtttcatgaacttctaactctacaccggttggcaatgaatgcactgtccaatgtccatgccccgtatatattacgttttgtccatctcaatgggatcttaacacatctttgagatgataactcttatcagctgttgattacaacttgaaaatctcactctaaaaccgacaataaaccctactttgggatttatttgggtcaacaaccatattaatatcatttgttttttttgtcaagcgcattcattgatctccgcaatcatttgcttaaaattcatcataattggcaaaaacagttaatatctcatgtcctttttttttttttttgaagtctactttagtttccttgttactcactatatgagatcccaacaaaaactattgattaattgtgacatatttacattggttgacattttaggacttctacaaacaaaaactatttacatagtaattggttaattccatatttctcttgattttggtgtatatatattatgacagcttcgtggaagatgtccgaaaaacaaggggagaataatatggtacgataattgtcttctagagatatctccaattaattctttaggcaagattgattacgagtataatttctatatgtacaacgagaaagatgtgaacggcgatacaaatttgttcaacaagaatacgagggctctcctctataggctgaaagagaaagccacaagtaaagaaaacaataacggcaagcaggacttacccgagattgggggaaaaaggctcggaatgaagatgttgtatgcgacaggagagaaaagtctcaggacgatgaagttgtacggaatggtgcagtgtacaaaggacttatcgattaaagattgcattgtgtgtttgaactggattatagcgaaacttccgacatgctgcagtaataaacaagggggtagagttttgagtacgagctgtaattttaggtacgagctttaccgttttgtaaagacttgagactgtttgatgaaacctccatatgtatattttgttttctacttacgtgttttgagagaatataaattttatactctttgtgatttgttttctaacactttttaaggctattggtaattttcactttgatttttatgagttaatttttttttttttttataaaaataaaaattaaattaaataaatcagtagcaacttccaagtgagaaattcatgttttgtcgactcaagacacattctttgaggttcattcgttgtagattgatttaaaatttatttgttgtttactgtaggagtggactggctttacacatggtttatgaacaatcattttcgaattttttttttttttccaactaatcattttcgaatttttttttttaaatatcaacacagttaaacttatagaaaatatacctaatagtacaacttgtctcaaaatatcaattaatcaactaaaattttacatagaaaaataaaaaccataaaaactattaaacattaataaaatgaaacccatgggcaatggagtattcgacgagacgatcgagaagtctaaaagctaatgagatgaactgaaagttggtatatgtttaccaacaaaataaactatatgtaaatttagtcaccaaaattccttcgctcccgtgtttttttttctttcttataattatcgagtgatcctaagtgatttaaatcagacaaatgattttggtcagtatgtaagttattctaaatatatattatttgcatggagactgttcgtgtacaaatatgattaattttgacttgttcattggtcctcctcttcactcgccgcaaataccaagtcacaatcccccaacatctctcttttgtccattaccgacaataaaaatatcttctaaaaactgaaatgaggaatcaaattttgtataatgcagccacaaaataaaaactaaatgaacccttctcataattatcaaataaactaacatcgccaatgaatatcccatttcctagaatctcctacataatcatcccaactttttcacaatctgtataacaaagcaaacatcctccttccggtaaacatatcaaaatcaaaaacaatgtcttcatcctttgtatataaaagcctctttttggtccctatcttggccgtggtggccatgcaactctcatttgtacagagtgttttgtccctaaaccagacaaatgagtatctacaccatttatgccttaatcgtcaagggacatacgagtcaggtagtaaatacgcgagagaccttaacaatctcatccaaatgatctctatctcaattttaggtgacgttgtcgtctttagcggtgacaattccatctacgtcaagctccagtgccggggggactcctccacatccacgtgccgctcttgccttgacaccgccttctctggggtaacgtaatttgaatattgttgattagctgtcacgtacttgcaaatataaatgtacacacacatgcatgcacactagttttttggttgcaccttactatcctgtactatattcgggtggtttagttgttgattggcattttgacaatagtaccaaacgaaaccataaatataatatagtaccaaagaaaacaatagagcttgatttatgtgccaatatatatgtatatatgacaggttagtaggagatgtctgaacaacaaaggaagaataatatggtacgacaactgtgttctcacaattttaacatttcatacgtatggcgagatcgattaccagaacaatttctatatttcaacgcaaaggatgtgagcggtgatgcaaaatcattcaacgagaagacgaggactctcctctataagctgaaggagaaagcaagtagtaaagaaaacatccccaacaagaaaaattacttatatgcaacaggggaggaaagtctcgggaagatgaaactgtacgcaatggtgcaatgtacgcaagacttatcaattaaaaattgtaatgtgtgtttgaactggattctggggaagcttcccaaatgttgcaacgataaacaaggaggaagatttttgagtacgagttgtaattttaggtatgagctttacctctttgtaaaacttacgactatttaacgagagcttgatatgcatatacttgttgtgtttgaataagttttctcagctaatatatagatgtaatttactctttgtgatatcttttgtaacacacctttttaattagtctatttgcattagatgttaaccaaaaaatgactatgcgcttaataaaaacggactactaagaatgtaagtgggtaaaaatcaatacaagaattttcttatcaatatcgataaatgatacaagagttttggtctggatagtgagtgagagagcgatattctaaggttttgaaacatcaccagcggctggcctcaggctggccgttgagaagttatttctccttcttccgatggcactagccgcatttccaactgtatgattgacattccttctatctcaactttaaagttggacgttcatatcatgttttataaaatacaaaagtaactttcaaaaaaaaaaaaagagataaatttttacataaagacaatgaaaataaattaggattcaaactcctatgcgatgtcgcaaagaaaatgtggtaaaatttgtcgtatcaaatttatttcaatcatctattgtatagttagtgtactatatattaaatattatatttttgaataaacatatactgaaatcatctaataatcttcaccacaaaatctgatttagcaaataagtttaataacataaagagaaactttaaaggaagcaaattacaacataacctctaaaaatttactcgataaatcgtcatattttttcagtttcaaattatttctttggtacattaataattctaaaatatcagtcttgacaatgttaatttataaaggttttacaatatttgttttgtcggcaaaataaagaggaaaaattttggaataacacacacagtaaaaaaccaggtccttccatatctttcattttgttgacccatacgaatcttcttcattaataaaaacaactttcaaagatttccatgatccatatgtcttgtcaataattcatgtattcctaaagatcttattttttcaccccttttgtgtttatatatatgtaccccaatgtcgatattcatgattacatctgatcaaatcaaattgtgatatttagagactctctcatgggtgttgttagcatgaagggtggagatggagaacacagttatgcaaataattccgaggcgcaggtatgtacttctctataacatatctatgaaccataattaagcttcggcaattatatattgcatatcaataattcactatactattagatgatctgaatgataatttctctgatctatatttagtagataatgtcccacgctactttaaattatatttttacattttctggttgaaaacgataatatattcaatctatatgttggttagatcaagagtcgagtttttggtttacaaataataatttttaatttaaagtatatatagttgtataatagaattctcaaaatttattaaatatgatagtgctcatttcattagtggaattcttacacataatattaaaattgaattgtcaaatgatattatttaccaaaatgttgtttgatattaaaaataatgaaaatttgtttttgtttaattttattgataaactagtatgttttggttataaagatggaggagaaattaatctagatttttttttttttcttctggtatcaaatgtgtgtgtgtgttttttgtttctttcttttgttgattcaaaaagcttgaatcaacaaatgttaaaaagtgtgataaaatttcgctttttaacttcttagaaaagtattacttctgatgcaaaaccggaggtgatgaaaagcgtaaacgaaatgatagtgaaaatggattttcctggttgcatcaaagtggctgacttgggatgctcttccggagaaaatacattcttggttatgtccgaaatcgttaacacaatcattacaacataccaacaaaatggtcaaaatctaccggagatcgattgttgcctgaacgatcttccagagaacgacttcaacacaactttcaagttgatcccttccttccacgagaagctgaagatgaatgttaaaggaaattgctatgtctcaggatgcccaggctcattctacacaaggcttttcccaagcaaatctcttcattttgtccattcatctttttgtctccattggctttctaaagttcctgatgggcttgaggaaaataagaagaacgtgtatcttagaagtccatgccctccaaatttgtacgagagttattggaatcagtttaagaaagatttctcaatgtttctaagaatgcgtgcggaagagacaatgcctagtggacgcatggctctcactttagttggcagaaaaactttggaccctttatccaaagagtgtttcaaagattggtcgttggtttctgattccctcctcgatttggtgtctgaggtacttactacagtcacacttcttaatttttttggtaacctaaaagttctgatcgtagttataataatatactggaggagtattttgagtgtgcagggagttgtgaaggaatcagatttggaatctttcaacttgccgtattacagtcctgatgaaagtgaggtgaaggaagttatcgagaacgagggctcattcgagatcaaaaattttgagacaatatttggacttctcttttcatacaaaactggtcatagtgaagtgaaagatgatgatgatgatgtggaccattcacgtcgatttgaagtggttaaaacgagggctaatatgacaagatccatcattgaaccgatgcttgttgctcattttggagaagccattattgatcggctctttgacaagtatatatatcatgcatgtcaacgttacgataccttgcgcaacaaaccaaccgttaatttctttgtttcgttgactaggaagtgatggatcgtcgctctattgctgccaataattgatgaaaaataaaggataataatgatccttggtgatgactggctaccccagccaatattaatatgttatttattgtgcctttaatttccctgttatgtattggtgtgctttgaatgtgtttgaatttcattatctgtctcaataaaaccagctacatccatttatttcgtaaggactcaattttatcacccccttgtatgaaaacgttttttttttccgatgtatcaaattatttttagatatattataagttgtgtttgaatttagaaatcttttttttttcaaatttatttaggtgtaaaaacttgcacagcatttaaaatgaaacaaaatgagtaataaattaatcttatttaggttttgttatgtattgtgatgactgaaataatggggtttggatctagacatttctgatttgtctagtgtccatgcatcgatcatatttttcatataatattacataaaagaaaagaacaatagagaaatagtgtggttactagattttgtttaaaatttatttgtgtgcagttttatttttggtgtaaatgttaagacgatatttgtgtgtagttgtggttatgcgattctaaaatatatgactttttctttggcccttcccctcccctcgccgcaaataccaagtctatagcccaactcctgtcaaacaaattatcagaaaaacaattaaaataaacctctctatgtcttttacaaactaaaaacctttcttttagacactacaatcattaatcgaaatacatattatgcaatcagaaaattaaaaacacaacaaagttttaatgattatcgaattagaaaaagagaaacaaaattttactccgtatcaaaaaatcgctaaagtctcctatataatcattccaactccatgattgattttaaaatccccatatcaaatccgatacgatgtctttatcctcttctgtaacgaaacatcttatttcggcctccatattagccatagtggcaatgcaactcccttctgtacacagtgttttatccctaaacgagaccaatgcatatctgcaccacatatgcattaacggtgaagggacattcaagtcggggagtccatacgagaaagaaatcaaacaactcattgattttttgtcatcgtttatcaaagactatagttttgtccacggcgttagtggtattggtcccgatgatatcaacgtcaagttccagtgccgaggcgataccttacaagccaagtgccgctcttgcctcgccaccgccttctccgaggtaatgtgataattttctgtcatatatatacgtatatatatataaatgtacgtcactcgtcaggtttggttatatcttagcattctgataatattggatttgtttaattgagataatactaattagcaatttaattgttgtaaattatatattacatagtataaaaaacccaatagttcttgattattgtgatatatatgacagattcgtagtaaatgtccgaacaacaaagggagaataatatggtacgataactgtcatctcgacctttcgtcaatctatacatatggccagatcgattacaagaacaatttctatatgtacaacgcgaaggatgtgaggggcgataaaaagtctttctacaagaacatgaaggcattccttcataagctaaaggcgaaagcaagtagtaaggaaaacaaaccctacgtgaaagactatatgtatgcagcaggaagggaaagtcttgggacggtgaaattgtacgcaatggtgcagtgtacgcaggacttatcgcttaaaaattgcactgtgtgtttggactggattatgacgaagcttcccgaatgctgcaatggtaaacaaggaggaagagttttgagtccaagctgtaattttaggtatgagctatatccttttgtagaaaattaaggctattttaatgagagttatatatatatatatatatatactttttgtgtttgaataagtattttgagcagataatttttttcttagctcttttgcaatttagtttgtataacacttttgagagtatttgcattagatgttcaaccaaaaataaaaagtacgccctagctagatatattgtccaagatggcttacggttttgtgtatgcatggtttgttattatctatcaaccaaattaattaaaaaaaacaaaaatcaatttcatttcgtcttatgctttaagagttcatccgatatcatgcatccaatccattatctgctaaagctcaggtctgcttctattttaattttgttcatatctagccaatctttgtgtgcattatcggaacccattgttcatgaactgcaattggtacgatatgtctcattgttgctatggttgttcgaaagctttataagaaccttgccacttgattcacctatggtcattggtcttgaaataataagattgattattgaagtttttagaccgaagaatatcggcattatgatcccgcctctaaggagcggtgattaccgatgttcttccaatccctcttgttcgttttatctgaatactaagaccaagcgattgcaaattaacaactttatgggtattattcaagaaacaagaagtttgaggaagaacggcattatgatcccgtccccaaggagcggtgattactgatgcttcctcaacttttcatccccttatttcctgataaccgagcccaatcatgtgcatattatcaacttcaaggataacgttctttcacctaaaagcttgaagctcaggtttggttacctttttcatgtgtcaagccgaagacaaactttgtgtgaaattcttaatctccatggtcatgtgagagagaatccacatgttctgttacgacttgtctcccatcctctgtgaaccatgactctagcttccatatgctatgttttgtctaagctgaatgctctatccacgacaactctagcttgcaatcttaagcatcagatcaccatcaccttagctcgattctatgtcaaagcgctacttcgtgtagattttctcgtgccggcgagatcgcagactttgatcccatctttaacgccactctgtctcttgactgcggccatttgttcatctatcgactcgttcttggaagaattgtcgatgacctttgatcttacatgtaccaaaaagctagttagctttcggctcaaagctctcaaggatctcttgtgtttttaccttatctatccttctttctatcttatgttggcattagggaatgcttttattagctgtattgtaaacattagaatctcagattctgtctctgtacttggtttctatcatcactgaatgaaatcaagcctttgttcaaaaaaaaaaaaaaaaaaaagactttgccctagtaattcttaaaaagagaagttcctttaaaaaaaaaaaaaaaaaaaaccctagatacatacaaacgtaacagtaataatagacgagagaatatgtctaaaggtaacgagatgaaactgaaagttagaatcttatcatatttttgccaataaataaagacttgcattatcgtgtgattttttggtgatagttgacttcatcattatcatgtgctttaagagatcaaaatcagacaaaccttatcagccgttacttataggcttataactccactacacattcagtcggtacgttattacttattgattaattccatggaaacttatagtgtacgaagctattacaaaaggtgtaaaaaattgaaaattcagtgtagagtaatttcacattttaagagttttaactttgactttttttcattggtactccttttccctcgccgataatacctagtctcaaccccaaattaactcatctctcatgtcgttagactattgacatttattcttgaaactgaaataagaaatcgaactttgtatttggtaaccaaaacacataaatactacaacacattataatacttatccactgtctccaagattgatgtgataaaaacagaggccttctccggagaaatagaaagatgtcttcatcctttttatcaagacccctcgtttcggtctatgtcttcgccatggtgaccatgcaactcctttttatgcaaagtgttttgtccctaaaccagaccaatgcgtatctgaaccacatatgcatcaaaggtgaagggatagtcaaggggagttcgtacgaaggatcagtcaaaagtgtcatcgatcatatgtcaacctatcttgactatggttttgtcaacggcgccggtagtgatggccccactaatatctatgccaaactccagtgccgggcggatgcctctgaatccaaatgccgctcttgcctcgccaccgccttctcagaggtaaggacatttcaacattatcgtttagatgtcatatatacttacatatataaatgcatgtaaatatgtcagttcttattgtggctaaatatatgtatttatgacagattcgtaagaaatgtccgaactacaaagggagaataatatggtacgacaactgtcttctggacatttcatcgatctatacccttgctgaaatcgattagcgacacattttcaatatgtacaacgcgaaggatgtgagcagcgatacaatggcgttcaacaagaacacgagggctcttctctatgcgctgaaggagaaagcaattagtaaaaaagaactaccttataggagagactacttgtattcagcgggggaggaaagcctcgggaaaaaaaaagtgtacgcaatggtacagtgtacgaaggacttatcagctaaaaattgtagtgtctgtttgagttatattttgtcgaagcttcccaaatgctgcaagggtaaacaaggaggaagtgttttgagtccgagctgtaattttaggtatgagctttacccttttgtgaagacttgagactctttgatgagagccccatatgtatattgttgtagtttgaagaagagctttgagcaaatagatagtactatactttttttattgcttatactaaagcacaagttaattttattttctttgagatgttgcaacgagaaaatatttaagagcttttactttcatccaaatgaaaaatgtgtgaataagcttaaatgtgtaaggtctagaggatttgtaattcattgaactttctgattcaatgatgattatctacaacatacagcaataaaaggagtaaaaatttggtactatcctctgttttttttttccttcccgactccaatccttagttttcaccagtgtacgttcttgcaattttgccgctatacactctgacgtcttccctaatatcccctcttatatcttctccgatattttcaccggaatggctatggttaatttgttatgttggacaacaaaaggatggaaatatttgcagagtttatattttcaacttcttatcagcgagtttgctttgttaatcttactttcctcacacatgtcagtataaacgaagacttcagacaagagaaagtctatttactatagtgtcttgtgtcccattcgggtgactaacatgtttagacttcatagtcctgttttgcattttaatcagataccaagatatgattttaatgtgaataaaataaaagtattttacaagtttatgtaatttttatgataatatgtgctttaaatcaaaatatcttataaagtgaaacggtgaaaacataattttccacatattattattttctatgtaatggtacaaaccacatatattttccaagtcccaaagttggattatttacatgatgactttgtattttttgttgtaatatatccaatctattttaagaaaaagggattcttgtcattacataactacataataaactaataataccttcatttcaggttgatagtgcgaacgtatcgtgtgactctaagatattaaaatccgacaaacattcgaactttgactatttcatctgcgctcttttcttggcgcaaataccaagtctcaacgtccaactcctctctcttttcttacagactaatagaacatgtgttatatatagaaataaaatgatcaatcgaatttgtatataaggtcaatatttccaccaattctaatattgttaaaaaaaaaaaaaaaacagcttcatttaaggtccaacatccctcatcatcaagtctccattataaacattcgaactcctcgacgatttatctcataataaacaggaacaaaacacaatctccagaaaaaaaaatcaagaaaccaataatatgtcttcaaatatttttggatcggtccctattttggtcgtggtggctatacaacttcttcttgtacacaatgtttcttcccagaacgttaccaatgactatttgaaccaccaatgcaacaacacccaagggagatacacgcatgggagtacgtttgagaagaacctcaaccaagttcttcataacatctctaacctcgatcttagatacggttacgcctacgtctctaatgttgtggcttacaaagttagcaaggatcccaacattgtcttcgttttgctccagtgccgcggtgactcctttgggtccaaatgccactcctgcctcagcacagccgtctctggggtaatttcacttcaatattatattagaagtcacatatttccatatagaaatgtgcaatcatattcaaatcatagtggtgattatataaaagatctatgatgaactaataacgtttaattaataaaactaatacacatttaaggctagtacaaaataaatacatgtaaattagtccatgcaatgatgttcttgactgtggatctctaattaacaaatatatatgacagcttcgtgagagatgtccaggaaacagaggagcaacaatatggtacgaccaatgtcttttggagatttcttcggtggattccgaggggaggatccattacaaacgtatgttctatatgcaaaacccgacgaacgtcaccaacgatcccaaacggttcgaagataaaagaagggatctcctccacaagctaatgctggaagccaccaaggatagcaaggaaaacggcgccaagggactgttgtacgcagtgggtgagatgaggattggaagaaataagatgtatgcaatggtgcagtgtacgcaagacttatggcagactggttgccatgtgtgtctagaatggattacgcagatgaaatatggagagttcttctaccgtaaaccaggagggagagtttgtggtaggagttgtagctttaggtatgagctttacccttttcttagaaggtaaatgacttttttctttctatttagtctgagctccatttctctccccctctcactctctcatatattgcgaagtgtttaaataaagtcaatgggtgaataaaaaatgtctactctttgtggttttgtataacacatattctaattaactctacttgtttgattttattttttctctaaaagaaaaaaaaaaaaaaaactcaggagaaaccgtatggtttggagaattcttccaactatctatttgaagtatgtaacacaaattcaaaactgtatgttattattagtttttataaacagatcatggtcatgttctaatctacggtcatgttcatggaccagatcactacattgttgaaatcgtcggatttgaacatatttagattagcgttggagtttagttaagtcgttatactaaagatttttctgcaatatatttccgacgtaataaaattttcattatttatccgtaaagatgattgcaattccataatttgatagtgacaatggttacctaaatctttatatttttttatttttttatcaatcttatatacttctgaatagctaattaattggtgggctaaaatagaatttctcactacgtggacgctaaaacgtttttgaaaaatatcactattcgaccaagaaaaaatatcacgtttttgaaaaatatcactattatacttatgacaaaaataggtcacaaaattaattcaaatccaccccttagctaaatataaaatataataatgtgtaagctaatttcatactccagatatatcacttccgaaatttattggatgaaatgaagaagcatgcataaattctgaactaatgcaacaactacatttcctaacagcaaaattacgacatctcatcttccctcattttcgtaggaagttaggcaatgtaaagactacttggttccggaccgaaacttggtcctccgagacatcatccacatgcatggatcagctacacttggtattaccttgacgtcaatagttgtcgacgtattgaaataatggtaactaaatcatccgtaaactcaatctgaaacttaagtaaatattctacaatttctcctttcaacaacctttttgaatgatgaagtcaattcctctttgtgactgttcgacgacaaagagcacaaatccgttgacagtaattagaagatgtggaaagaaaatcgagtttccacgcaccctatgtggactggttccctctagtttggaatgtatgttcaaacaaatttgaatttattttgtattcatgtacgtagtagacatttaaatttattagtagacggaaattcatatacatatggactacggataaattaaacactccctttctttcaggcagagaccgaacgtattgtgtgattaaaaatacacaaacattcaaactatgactttttcataggcgctcctcgtccttcgccacaaatacgtactattaacatttctttctttttaaatagctagagagtaaaatgatcaatcgaattttttgaaggcaacaacagaataagaaaattccagcaacatcttcacttaatagccataatacctcgagtctcctatataaacattcccactcctcaacgtttcatctaatgaaaaaacaccatctccggttaaaagatcaaagatcccaaacaatgatttcaaaatttggatcggtccatatcttggctgtggtagccatacaactcctaattataccaagcgtttcgtcccttaaccttacaaatgcgtatttgcaccacaaatgtaacaacaccgaaggaaaatatagccacgggagtgcgtttgagaaatatatcaacttagctctccgtgccatcgattcagacaattatctcaatggttttgcctacatcgagagaggtgaggatcccaataaagtcttcgtcatgtaccaatgtcgcggcgactcctacgggtctaagtgcaaatcctgcataagcgctgccatctctggggtaattgtcacttcaattttattagttaaccgtcatacatttacattttaaaattgcgagcacaaacacatgtcattttgttttggttaagatcttagagatatatccaatgatcctgacactctacatagatggatgaattgagactaaaaatgataaaagattgtgaccataactaaaaaaatgaagattaaacaatgcaatattgttcttaaccgcgatgtcacatgtatggatacgtatatgacagcttcgtaggagatgtccaaaaagcaagggggcagtaatatggtatgaccaatgtctttttgagatatctaccaatcaactccttcaataagattgattacgagaacgatttctatttgtccaacccgaacgacgtgaacgataaggagttgttcaacaaggagacctcggctctcttggaggagctaacaaataaagccactgataaaaataacatgataggcaataaatttgtgctgtacgcggcaggggataagagaattggaacgaagaatgtgtatgcaatggtgcaatgtacgaaagacttagtgactacaacttctgctgcgtgtttcgaatggattttcaagatgttttcaaagtgctgtgaaggaaagcaaggagggagagttttgggtacgagctgtaactttaggtatgagttatatccctttcttagaaattaacgactgtacagtgagtgctctacataaaataaaaggggtccagagccaaaatatggtcttatacattggttgtgtttaatagttgagcgaataaatgtatttcctctttgtgattcgttttgtatattttcgtttgttagcataactcattaaaagaagaagaagttgtatttaggtttttaaactaactaatttgaaaaatcaaagtatttctaattcccacttcattattttcatttttcacccacagtctccttctttcacactatttggtttataactaattagatagatagtgaaataaatctcaccctttcacacgaaagaagaagccaaaaggaaggggagaagctcatatgcccaaaatacatttttttaattctaaatctgaaatgatgaatcaaatttggtttataatagccagaaaatgatatggcaaagtaaatgtattataattatgaattaaaatgattttcagctttttttcttctttttgtaaaattatctagttacagacaaatttaagagtaatagtaaacgaagaagtcatatatacaaaatgctaaagagatgaaactgtatgtttagaatgcaattaaatctgagaattaagttcattttcaggttacaaaatttgactttttcataggcaatcctcttcccttgccgaaaataccaagtctcaacggccacctcctcctctcctgcattacagactaattttttttttttttttttttaaatagaaattaaaatgagcaatcgaattttgtattatgcaaccaaaatttgacaacttccagaaattctaataactatcaaattaaaaaaaaaaaaaaaaatcgtcacttaatagccatgcatatttccttgagtctcgtataaaaacattaaaactctttaagatgtcatctaatgttaaaagaccctctcctaagaaatagatcaaagatccaaaacaatgttttcaacttttggatcggtccctatcttaaccgtggtggccatacaactctttcttatacgcaatgttttgtccctgaaccttactaatgcgtatctgcaccacaaatgtaacaacacccaagggatatacaagcggggaagtgcgttcgagaaaaatctgaacatagccctccgtactgtcatttttaatggcgattttcgcactggtttccgatatggggatgtaggtgaggatcccaataccgtctttgttatgtaccaatgtcgtggtgactcctattggtccaactgccgaacttgtgtcactaccgccctctcaggggtaactataaattcaatattattaatttatcagtcacatgtttacctgtataattgtgccagtacacacattaatattttttttggttaaatcttagatatcaaaacaaaagatttatacatttaaggctagtacaaatgcactattatatgaaattcaaccatgcaatattgttcttgactgtggtgttgatatttatggatatgcatatgacagcttcgaaagagatgtccaggtaacaagggggcaataatatagtatgatcaatgtcttttcgagatatctactgtcgattcctaccataagatcgattacgagaacgatttctatttgtccaacccaaagaacgtgagcaatcgagagttgttcaacagggagacatccgctctccttgagaagctaacaactaaagccactgataaaaagaacatagacggtgccaatcaattggttctgtatgcggcaggagagaagagaattgggacgaaaaaggtgtacgcaatggtgcagtgtacaaaagacttagtgtttacaacttgctcttcgtgtttggaatggattttcaggatgtattcagactgttgtgatggtaaacaaggaggaagagttttgggtacgagttgtaattttaggtatgagttatatccttttcttagaaattagcgatacaatactgaggcttccatattaaatgaaagaggtccatgagtacacggtcttatatatatgtacattgtgttgcgcgaatttgaatactgcacaagatacgttaacttcactttgctttattttgtatattatagacagcataattcatgaaaagagactctatagtaagggaaaaacataatccaagaataatatacatcccacatactgtagatcacaacaaaacccataaaaggtaaactaaactctctcataattgtgaaataaggttagcgaaagctcttgtgagttgtgaccattatttttagcaaatgccaattatggccggaatagaccccaaatggatacgcacaaaccaagggatgtttactaatagaaaattgctttttatactgcttaacatgcaactatagtgtataaaatcatcttaaaaccacattaaaggaagaccaaaaactgaagttaaaagtttggaattcaagatgagtacaatgatgtcatgggtagaaaatagaaattgtttaaatgttttattttcgaatgcaattgagcgatgtccatcattgagaagccaaacaaccggaaaaaatctcactcactcatccgaaagaagtttgctaagaaggccaagccaaagggaagaggtggaactcagatgacctagagagatccccatatggcctaaaaaaaaatattctaaaaattgaataatcaacaaattttatataatgtgaccagaaaatgaaaagagaaactatgtaataattatcaaatataatgtttttagcttttattttcttctcaattttctaggaacatacaagcataacgttaatactagaccaaaagtcatataatatataacatgagatgagatgaaactgtacgttgtcgttgtataattacataaactactaataacataacactgccttcatttcaggtcgacacctaacttattgtgtgatttaaatcagacaaaccttcgaactttgactttttcattgcctcctgtcccttcgccgcaaaatactagtctaaacgctcaactcctatctcctctcttataaactttttttttttagaaaatgagatgatcaatcgaattttattgtgtggccagaaactgacaacttccagcattgtactattaccattttttttatagaaaaagatgaacttcactttagagcaataacaatccctcgagtctcccctatataaagattccaactctttaacgattcatctattgaaaaaacacacacaccaaaaatatcagatatctcaaacaatgtcttcagtttttggatctgtccatatcttggccatgatagccatacaactcctccttatacacagtgtttcgtctctgaaccttacaaatgcgtatctgcaccacaaatgcagcaacactcaaggaaaatataagcaggggagtgcgttcgagaaaaatctcaacttagtcctcagtaccatcacctcgattggaaattttcgtgacggtttccgctacaccgaagaaggtgaggatcccaataacgtctttgtcatgttccagtgtcgcggcgactcctactggtccaagtgccccccttgcattagcaccgctgtctctggggtaattgtgacttcaatattataaattagcagtcatatagttacatgtaaaaattacgatgagcacacacgtcggttatttttttctgtcaaatcttaaatatgtgtccaatgatcctgatactttacataaatgattgagttgagacaaaactgatagacattaaaggctaattcaaaaatactgattaaacaatgcaatattgttcttgatatatatgtatatgtatgtgacagcttcgtaggagatgtccaagaaataagggagcaataatatggtatgaccaatgtcttttaaagatatcttcagtcgcctccttcaataagatagattatgagaacgatttctatttgtccaacccaaaaaacatgagtgatcgggagttgttcaacaaggagacgtcggctctcctggagaagctggcaaataaagcctccgatagaaacaacttggatggtaaacaattggtgttgtacgcagcaggggagaagagaattgggacaaagaaggtgtctgcaatggtgcagtgtacgaaagacttaatatttacaaagtgctttgagtgtttggaagggattttgaggaagtttccagagtgttgtgacggtaaacaaggagggagagttttgggtacgagctgtaactttaggtatgagttatatccttttcttagaaactaacaacaacagtacaatgagagctccatattaaatgaaagggttctagagataaacagtcttataatatacactgtgttgcattttagtacgtgaacttaattgagcgaataaatgtactttcctctttgggatttttgtttttttttgtgaacttgagttattgagaagaaatgttcaagtatctactagtaaatacatcccacatagaataccaaatagctcagctcatacaaactctctcataatgagagaaaaaaaatcctgaaataagggtaagaaaaactcttatgcctcaaggttttagtaaatctcataattttggccgaaccacaaaaagagacgtgcgaaacaaaatagtagaaaattgatttcccgaatcgacaaacatggactaaactataattatgatatataactggtagtacttacaatgatgatacttggtttcacgaagacgagggagcctggagatgaatgatggtgataaggccatgtggcatcatgtcttgtgccggagtcgacgtatgtagaagtcggaagaattagtaaattcacatgtatcagcttcatgataacttcatttgccaacaatttttagtatgtgctaacattaatacgcttgcatgtatatattcattatttcttaacaaaaaattaaaaattcacaagtacataaattagtgtttgatcgaaaccaaatattaaataattacaatatttttagtcacttagaaatctatgtaatatgcctaaattaatcttttactctcttctcgtagcattatacatcatttttttaaattttttttagactctcagatgaaagacaatgctattacagtgtcgaaaccacattatcttgaatagtctaattcttttcactgcaaccatgctctacgtgaagtagagttacaatatcattggattaaaaatatgagctcattgcaatggaaatgatataactacaattgaaaattaaccttcttacacagggtcactacgcatgaaagttaaaacatctattgctcctggcacaaaaccagtggcgcactacaagtttggaattgggtgattctattttctcagagttttaacttagtaaagcatttgaactttgactttttcatatgctctccacatccctcgccgaaaataccaaactcctctctcttggttgttacagacgaaaaaaaacttctcaaaactaaaatgatcaaatccagttttgtataaggtaaccataaaggaattgtataccgtcttgaaaaaaattagttaatctagttaccaatgaagccaatcagctaaatccttcctactctcctgtatatataaacatcacaactcaacgcttcatttataataaaaaagaaaaacaaaacacacctaactcttgaaaaaaaacaatcaaaacaaaatacaatatgtactcttcatgttctcttttacaacgtctcgtttggttccctttcttagccttggtggccacacaactcctatttatacgcaatgtttcgtccctgaacctcaccaatgagtatctgcatcacaaatgtctcgttagtgaagggaaatataaaccaggaagcaagtacgagtatatccttaacgattacatccgttttctcgcagccggaaattttcgctcaggttccatgcacatgactagtggtctaaaacccaatgctgtaaccattctctaccagtgcagcggtgactcctataattctaagtgccgctcttgctatgctgccggcatctccggggtaacattatttactctcttcatatcatattaaatgttattttagccaaaacaaattgttttaaataagaaatattatgttctgtgattatttgtatacaacaatttatgtttgattcaagattttcttgtgcccaacagccctcaaggcttttaagtctgtccatagcgaccaattcaatgaccctagcgtacaatttatcaaattaggtaaataggaagggtaatgaatggtattgtttttttatgtctaacagattcttcattcacattttcaacttatgaaagcctattttctaatacagattcatgaattagttagaaagcacaaacgcacaatgattgtttcttatatatttatatttatttaataatattttagctattatttcataatttaatgtattaattattttaacacgtcaaaacatgaattaattatgtaaaatgtaaacgacagcttcgtaggcgatgtccgagaaacaaaggtgggataatatggttcgatcagtgttttgttgagattacttcaatcagtgtcatcgacttcaacatctcaaagatcaattacgagaacaatttccccttacacaacccgaacagggtaagtggcaatataaagtcattcaacaatgagacaatggctctcctcaaagagttggcgttgaaagcaaataataaagacaacatggacaatggcaagatggcactgtacgcatcaggggagaagagggtcgggacaaagaaggtgtacgcaatggttcagtgtatgagagatctagttaagcctaagatgtgtaaggagtgtttggaaagcattataaaggagtttcccgagtgttgcgacggtaaacaaggagggaggattttgggtacgagctgtgattttaggtatgaactttacccttttctaaggacttcagattcaaaaactgtttgatgacgatgcacaacacattctcttgacaccttacttattttacttcagttccggttttttgagctttttactagtttttatttatattgtttattcttggatttccctttgtgctggtttagatcacatgtgcctatgactaagatcccaagctgtgtttttcctcactctttatttggttattaattacagttgttggctatgaataagaagctctattattcttgacatcttaaatttgttaacatagaactccgttttctaatttattgttggcgactaaatagcgtcacgtgtagttaatttagacgaatatttccgcgtcattgcttaatctgagtcatgatcctacaatttccaagtcattcaacgggtaaaactactccctgattgacaagataattttgtgattatccgtagctctatcaaacctgtaattaagataatgcaaacttctaacaagcaagaaatatttaaccgatcataaagattatgtactggatataagcgtcagttatggtgaatatatattcagcataaataatttatcatcacccatattatgtcgttcaagaagattcatgatgtatttccgttgtgttacgtttatcctattgaaaaaatctgtgatgtcaaatgtatttggatcaacgaatcctcgtagcgttagaaagtttccactctatcgcaatgcatgggttttagctaatttccatggaacattttcttttttaaaggaagtctacgttactacgtatgaaagttaaaacagcttcacaaatcacaagatcccaacacccaaaatcatcctgctccttgcacaaaaccggccagtgcgtatcctatgattatgttttctaaaagttttaatttagtaaaaggcgttgaactttgattttttcatctgccctccccatccctcgccgaaaattctaaaatcctctctcatttctgttacagccaataaccattttttctacaaattgaaatgattaaatctaatttgtaaaggtaagttaaacaaacaaaaaaaaagattacagttgaaattattagttaatttagatctaatgaatccaatcagctaagtccttttgtctcctatatatatatagaaacatcccaatcttagcctttcatatatggaaaacttctaactctggaaaaaaaatcaaaacaagaaacaatgcacaattcatattctttatcaaaacgacttgttttggtccttttcttggccgtggtggccacacaactgttccttatacgcaatgtttcgtccctgaatctgaccaatgcgtatctgcaccacaaatgcctcatcagtcaaggaaagtataagccaggaagtcagtatgagaaaaaccttaactctcacatcgatttgattattaactcgacttttcgcaacggatttggtcacatgacaactgctatgggaagtcccaatatggtaaacatcatattccagtgccgtggagactcctaccagtccaagtgccgctcttgctttgccgcaggcatttccggggaaatgtcacttatatttatccaatatccctcatacataatttgcaaagtcattttcgaacagaatgtttacttcgataatttcggaggaatttcaaaaatatggcattgatttgtatattgttataaaactataagagataattaaaagcaatcttttcgttacaaatttaaattctagtttttgaaacacgttcatttataatattatcacttttaataaacttgttttttttctttttgcaaaattaccattacaaattatttagtccataaataccatagataaaagtgatttaattttaattttttggtttgggtttatgttttagtttttaggttttgttgtttagaacttaaggtttggtattgtggtatttttgaggaataaaaactagtgatggcatttcattttagtgattttttgagatttatcctttttgttttgattttcatctacttattaattaatttctcagatttaacgcttggaagaaaaaacaaacataacttcgattgaaaaaaatcagtgtcgttcagttttgttcttaaaatggcaataattccgataactcttgatactctgctttggtttcttaattgagacaatatgtaaaatattgttctagattgttgtgttgatatgtatttatgtaagcttcgtaggagatgtccgagaaacaaaggtggaataatatggttcgaccagtgttttgtcgagattactgcaatcgaggtcatggaggtgaattacgataacaatttttatatgcacaacccgaacaaggtaatgggtgatgcaaagtctttcaacaaggagactatggcttttctagaacagctggcgttggaagcaacccgtaaagacaacatggaggacggcatgatggcactatactcggccagggagaagatggttgggacgaagaagctgtacgcaatggttcagtgtacgagagatgtattcatgtttaagacaatgtgtaaggagtgtttggaaaggataatcagccagtatcccaaatgttgcgacggtaaacaaggagggagagttttgggtacaagctgtaactttagatatgagttttacccttttcttaggacttaaaacattttttgagaatgatgcaagccacacatttctcttgacaactttccttttttgatacctttaattttttgggtttttgggttttcactccactttcgtttttgttcgttaggtcctcgttgtacctatgaatatcaagctttattcattacagcctttaattttataattagtaaagagatgatataatgtatatcgtctcctcttttttttttttttttgtctcctcttttcatattcttatattcgggatatttttgagagaattggtcaaatgactataaattagagaataactattaatatgatcatcaaatgtgttctagtaacttaataactgtcttatggaaagttttgttagcaccactcacatacatcatcgaactttcagcataccacaagcaagacttctctggattatcgacaaatatgcgattttttttaagtaaaacatttaaactttgactttttcatcagccctccctatccctcgccgaaaaatacccaaaatcgtctctcctttctgggatagacaaaaaaaaacataaaaaaactaaaaacatttcttctacaaactgaatgatcaatcgaattttgtaagaagttctttttaatattagttcatctagttacgaaagaggacagtcagctaaaaccattccgagtctcctttctaaacatctccatcacaacgcttaatttatctcaaaaaacatgtactcatcatattctctattcaaatgcctcgtttgtttctatatcttgggtatacaagtcctcatacatagcgtttcgtcccagaatcttactaatgcgtatttgcaccacaaatgcctcactcgtcaagggaaatataagccgagaagcccgtacgaggaaaaccttaattatctcatcgatcatatctctaagtatcattttcgggacggtttcagacacagcgcatggtgaggctccgaattccggcaactttgtattccaatgccgtggagactcctacgggtctatatgcggttcttgctatgccaccgctgtggccggggtaatgtcacttccacattattaactagtcgtcatacatttacatctataacatagataaccatatatacatttacatttatattttcaaaccatgaatcatttaccatgaaaataattaagaaacgctaaacatatgcattgaaatttaaatcatcgtttagaatgaacaaaatatatatggatatgtatatgacagcttcgtaagagatgtcagagatacaaaggagcaataatatggtatgatcaatgttttctcaaagtaagtacgatcaactcccctccaacgaagatggattacgagaatactttttctatgcacaacccaaacaacatcaacggggatactcagttgttcaaccaaaagatgaagaatttcctctatgagctagcgctgaaagcggataaacccaaagcggacggtaccggtttgctatattacgcggcagggacgaagaggctcgggaagaataaactgtatgcaatggtgcagtgtactttagacatatttcattgtaaggtttgtttggaatggagtattaaggagctttcaaagtgttgtgaaggtaaacaaggagcgagagttttgggaacgagttgtaatgttaggtatgagttatacccttttattaggacctaaagactttgtaatgatgtagaacacattctcttgacaactctttaattttgttttggttttgttttcttctccattttagtctttgtattgtttcttttaagctttgctttcatatatttgtttacatataccaactttgttgttcctcaccctttcatctaattggatgattgttgataaggagacaacgctgataaatggtgtattacatttttcatgatttcacttttgaaaagtgattccgttacttttactattaagaatatgcatgcatcaacgatttcacgcttttaaaaagtgattctgttatatactataagcaaagcataatagtagagtgtgccctattagagtcatttgagtcgataaatccatcagatgtatgcaaaatagtaatgcatgtatttatgtgactctacacaatcagatgagtagcagagaagaaagcttgtgtttttttgttattcaccaagaggctagttggttggaaatagggttcttctacgggcttagaagtcagatcgtgtggattggtcgaagacaatacgtgtgttctctagatgaatccagagaccattactcctaaggttccataaagctactacttgtggtagtggtgtacatcttggctctgggggattggtcgaatgcatatttctcattatggaataaaaatcagtttttaatgtactgagacaccgttttgttttactctttaatgtaatgtatttctcattgtgctttacccttttattaggacttaaatactggtgatgatgcagaacacattctcttgacaacttccaaattttgctttggtttctttactttctagtttctaattctctttttcaacccttatcatttttttcccctcgttcgcctttttgttttgttttgttgatgtcctacctatgactatgattatgaatagggtccaaaacatcgctatccccatagagatacatttcttctccactctgtctcttatatccagataagttcttagaaatatagctacaaagaaatcaacatgttccagcatttcaatactttggcaacgtcatttgatgagatttgcatacttttgtaagtgtgacgaactcgaacaacaacattctatgatttggaaagcaccaagtccgatgttattcttcactagatatatgttcagttaatttttacaatgctaatatttaatcagtgatacacagttttaactaagctttagattgtgatcccaatggacttctattataaacaagcttcaccacaatgatctcacacaaccgtgaatcaatggattgaacacccacctccaaacttgctatttgaaaagattcaagatatgcaatatctccacttgcgatccttagtgttaacagctcaatctcaatcctcaaacctatatacattaatcgccaaaaacccctaacttaatcgtaaagcaatctttgttaaatcacaaacttaatctccaagtttcgttccaaaaccaacgtagaatatttgtatttttgcaagtctatccctcaagtctatccagcttagcaaatattcatctaataaaaacatcctaatggtgattctattttctacgattgataaattagtataaatttgaactttgacttttaccaaaaaaatttttttgaactttgactttttcataggctctccccatccctcgccgaaaattcccaactcatctctgtcctctctgttatagacaaaattccttctacaaactgaaatgatcaaaaacaaatatagctttgagttagagaaaaatagttaatttagttactactgagacgaatctgctaaaatccttattctcctctagaaaaagaataaataaaccaaaacaatgttctcttcatattctctatgcaaatgcctcgtttctttccatatattggctatacaagtcctcataagctgtgcgtcttccttgaatcttactaatgagtatctgaaccacaaatgtcgcgtgatcaaggaaaataccaaccaggaagtgagtacgagaaagaactcaacactctcagccgtagagttgctacccttgactttacagatggtttcacacaccggtccaatagtagagataccaaatctgtcaccatcatattccaatgtcgcggtgactcttacaggtccaagtgcaactcctgctatgctaccgccctcgccggggtaatgccactttaacatgtttgcatatgtgtagtctatatcttgtcgttcgctataaacaactaccttaactaaagccaaaagaaaattgactataagaaaccaaaattcaggttagagttagaattacctagctgaaacaaatgtgagttggtttatacacatcaaccgataacaattaacataactgttatatacactatacaaccaaatttgtggtgtgctaggtgttggcttggtgttggcaagattatttacccatttggaaaagattatttacgtccaaaactttcttgttaatatatatttatatattaagtcatctctctttaagtcacaactatttgatttttcgttaggtgaaaacaacaaaggtgcaaggttatcttgtattgaaatgttaagattgctttttaacttgatttatttatcaaaacatttattatgattggtatttagtatttacatatcatccagttagagatatcttctatatcatatcatttggtagattattacgggacaacttttaggtacatatgtcaaaaaaaacttttaggtacatttcgccattttgcatacaactgatttcgtgtacatctcacggttcctacaaaaatatttatgaatatgtatatgtatattacagtttcgtagtaggtgtccgagaaacaaaggtggaataatatggtatgaccaatgttttctcgatgttagtatgattaatgacaattccccaagacggatgaactacgataatattttttctatgcacaacccaaacaacgtgagagggaatgtaaactcattcaacaaaaagacgactgaattcctctacaaactgattggaaaagctgatagactcgacgtggacgggatcaactttctatattacgcggcaggggaaatgaggcttgggaagcaaacattgtttgcaatggtgcaatgtgcgaaggacatattgagttgtaaggattgtttggaatggagtatcaaggagctttctaagtgctgtgatggtaaacaaggagcgagagttgtaggtacaatttgtaatcttaggtatgagctatacccttttcttaggacttaaagcctctttggtaataaagcagcggttttgctgtctctctagtatctcttttgagctttttacaaatttttctgtttattttactgcttatacttctttttattttgtttgtttaagtcctaactatgtctatgaatagggtcccaatcaaaattcagtaacctaattttgaaacgaaagggggaaaactatgtacgtagcaaacaaaatgcaaatcaatcagtcccaccttctatttcaattattaataagagcaaacttggtgaccctaaaactgagacaaacgacatttttgttttttcaaattgcccgttaaacatattgacgggttttttattggaccgacgatgacttagtagcacataagttgcccgttttggcatgctattttaggcccatgacaaaaatccgattcacaatgcatggagtatgagctaatagccgtggaatgttagtttatcaatgttttgggaaagaaaaaaaatcgtttggtaaatgaaaaatgaaagactttgatttccataatccaacttagttataaatagaaagggaatgaattatttatagcattcgaagctaaatatattagcatttttctttctcaatctagatagttctgttattaaatcatttttatattacaataatatagtcatatagattcctaggtattagcatttttctttctcaatctttagatagttacgttctctaaaaatgtttgaagaggtggagatgtgaaataagtacagagaacctctaaaactttgatccttgatcaaaactagtggtgattcaattctctcagacttttaacttggtaaaacatttaaaatttgacttttccattggccatcctcacccttcgccgaaaaatacccgacccctctctcctgtctattacagaccaaaaataaacattttttctacaaactggaatgatcaatagaatcttgtatacactaacaaaaagagagaatattattttagatgatgtgtgtccatcagctaaaattcttctgactcttgtaaaaacatcttaactatataaaaaaagaatccaaaacaatgtactcttcatattctctatccaaatgcctcgtttctttccatatcttggccatacaactcttcatacctagcgttgcatcactgaatcttacaaatgtgtaccttcaccacaaatgccgggttggtcaaggtaaataccacccgggaagtagatacgagaaagacttcgactctctcaccagtttcgtcgctgctaataagtttatagatgggttcgtacacagctctaatagtgacggtcccaattccactaccatcatattccagtgtcgtggtgactcttacaagtctaactgtcgaacctgctatgacaccgctctggccggggtaagtaatgcctcttcaacatttttgcatgaaagaatttaattatcatttgaaatataccttaacattaacatgtaagtatatgtatttaacagtttcgtaagagatgtccaagaaacaaaggtggaataatatggtacgaccaatgttttctcgatgttagtatgatcaatgacctagccccaaggaagatcaattacaaggatacttttgctatgcacaacccaaacaatgtgaggggggatacaaagatgttcagcaagaagacaaatgatttcctccaacagctgattgtgaaagctgataaacccgacatggacggcgtcgagttgttatattatgcggcgggagagatgagaatcgggagggaaaaactgcatgcgatggtgcagtgtgcgaaagacctagcggactgtaagtcttgtttggaatggagtttcaaggagctttctaagtgctgcgacggtaaacgaggagcgagatttttgggtacaagctgtaatcttaggtatgagctatatccttttcttaggacttgaagactcttttgttaatgcggcaggacacaagttttcaatttttttgttttttttactttctaattctcttatttttagcatgttacattagagtttgttttggtatctgttatatctacacatgtgaatagggaccaaaacttcgttaccactcaatgctctgttatttgtaataaggacccctcagtactctttaaaattattaataaagaaacaatagcttttttcttcactcttaacttctttttctaataattacttttaaaactagagcagacttaagaaggtttgataaaactgatatacaaaacaattaaagagcaacgtcatttgatgtgtgttctgcataattataacaacagtcataattaatctacaatataatttttgtatgatttttgaatcagtttttggataaaataaaaagaaatgtactcttttgttttgtttaaaacggattttttatttattttatctgttaaacatttgtataggctaggacgtgtagcgttgtgattatgttaatgttttcgtttctgtcctactatattcaaatacgcaaattgtacattcttaacaaagaaaaatatttcaaaagaatttttatgcttgagccaaaattcacgaaaaatgatataaagctttggttaaggctagtgcaaaaaacaattgtaggaaactcatgatgtgatgcaaactttggaatccacctaagatttacgattttcggtttctcggcctacggcttgaatgattcgatagaacgatggtagagatggaagatggaagttttgtcattgaatccacaacaacacacgaactataatgtttgaatctcacaaacacactagaaacgcaatcaaacaagactatggaatttccctaatagacttgaactgacaaagactacttgctccttgctacttgcactttggaaagaaaaacacacttttattactcaatttgaatgacttattacaaataacgatatgaatgaccttttatagaggaagtgaatgatgatacagtttaccaatatctcgagagtcaaatcctacttgctccttgctgaaaattggtaatacatatatacaccacaaggtttgtatcgtgtgattctattttctaaaacttttaacttaggaaacatttgaaatttgaccttttcatcggccatccccatttctcgccgagaatacccaaactcctctctcttgtctgttacagacaaaaacaaaacatgtcttccacaaactgcaataatcaatcgaatttgtataagggtcactagaaaagattatcctttagagataaatagttgatctagttactaatatgagaccagtaagctgaaatccttccgagtcttcttataaaaaaaatctcaatctcaacgcttcaaaaaagaaaaaaagaaagaaaaaacctctggaaaaggaatcaaaatccaaaacaatgtactcttcatattctctatcaaaacgcctcatttatgtccctatcctggccatccaattcctcctcgtacgcagcgtttcatcactaaaccttaccaatgagtatcttaaccacaaatgcttcgtcagtgaagggaaatataagcatggtgataagtacgagaataacctcaacgttctcaacaagaatgtcctttcttatgatcttactagcggttttctacacgtttctcatggcgagggtcctgattccgtcaccatcatattacaatgtcgtggcgactccttcgggtcgaattgccgctcttgctataccaccgccatcgacggggtaatgtcactccaacatgtaaacgttaattagtaatgccatcgaaatgtatgcatatatttttgggtatgataatttggtttaatttttatatttctacttttatttgatttttagaaaatggtaaaatgattgaataatattcaaatttcatattaaggaatattttcatatgataaaaataaaaaaggaaaaatgaatcattttttaatgtaaaacaactatgtatatgacagtttcataggagatgtcagagaaacaaagggggaattatatggtacgaccaatgttttcttgttatttctacgatcaaaccccaactcccaaggaagattgatttcaaaaacactttctcaatgcacaacccaaacaacgtgagcagtgaaccaggatcgtttgacaagatgacaagggatttcctctacaagctggtgcagaaagcctcttatccaaccgtggtcgaacaccagtctacatattatgctgcgggggagaaaaaactcgggaaaaggaagctgtatgcaatgatgcagtgtgcatcggacatattgcaatgtaaggtttgtttggaatggtgtatcagagagcttcccaagtgttgtgatggtaaacaaggagggagaattttgggtatgagttgtaatcttaggtatgagctatacccttttcttcggcgttaaaagaccgtttgatgttgatacataacacattaacttgacaactttcccaatttttttttttttttttttttttttttgctttctaattctgtatttttggtaaagtttataattgttgatcttttcattttctcaatgactgcaagttaattagttggctctttgtaaacattttatgtcagttgtgatacagatttaatcaattcaaaatgcaaagggtttacacatgagtgatttgaatctgtaaagtgtgataatttagacctttttgtaataactcgaaactctctcttttttaaaactcctatgaatgtggaatgacctagctgatgcatgaatcagtaaagacttccatatcccgtatgaagttaataatcactagatgagtacccgcactacgtgcgggtttatgtattactatttacaaattgttttatataatgtatgttcatataaagtaaagttgaatgcatctgttttgaaacataaatatgatttgtaattgttttcaaaaagtccaactatattagttcatctgaaaacgaaagtgcttgaattgttttttattgttgttctagattctcagttttttttttttatttatatatccttgttcttttggttatatatttagtttgtgagacggtgaaactttagaaaatttatttcttacattaaaaatataacatgtctttattaaccatgtctctacatatccaatataattatattcaacttgatgttcttggaaagtttagttaagttcttctcataatctgtattagttataaggatacctccttaaacatctttcaaattacttgttttcttagcataaatctcgaaaagcttaaatatatttaatttgcatattcatttagtttctttcataataatcgtctaatttttaggcaaggaatctatatatacatttttgcagccattttgtgaaataaatcctgtagttggacttatttacaatggttgccactggattttaatgtttgtttttgataattaaaaagaaaatcttcgaattaaatatttgacatttaacaatcttcccaaaatctctccacattaactacacgattatttactaaaatattacttccaaaatatttagtatcatttaattactacaaaattatcatttttgatattggttctctccataattataacaattcgattataatcatcaaagcgcagagatataatctgatagcatttaattactaccaaattacaaaatatttagacaatgattcataaacatatcataaataagatcaacattaataaaataaatggttttttttttacaggacgggtttggcaggacgttacttaataacatttgtaaactataaaataaaattattttatagatagatacaatttgtaaacttttatatatactaaatttaaaaaataaattgttccctcggtataccgcgggttaaaatttagtatgtgtaacatgtttggatctcaaaattaaagagaatatattgaattaaaaaatgtagaaagagtgatggttcaagttctgattaattatatcctcctattttagttattatgttgaattaattactaattatgtattatttattttatgaagtctaggtggcaagctctcatgtgctgatgtgtcaagttgtgggagagagttgaccaactttcatatatatgatttatttccatatcccgtatggagttacgaatcaactaaaatgcatgaatcagtaaagacttcttagtttcatagaattaattcgtttatacccgcaatttccatatacacgacaacaacactaatcacataacagaatgttaacctttttccatttggtgatccatgaatgatacaatttaacaaaactccgagagccaaaatcttattgcttcgagctcaaaaccagtggtgcacaacaaatttggcaccgtgtgaaaatatcttctaagagttataacttagtaaaacatctgaactttgactttttcatcggccctccccatccctcgccgaaaaatacccaacccttctctcatgtttgttacaaacaaagaaaaacatttcttctacaaagtacaaactgaataatcaatcgattttttataagattactaaaaagaacatcgttttgagataatcagttaatctagttactaatgaagccaaccagctaaaaattcttctgagtctcctatataaacatctatcagcacttcatttatcaaaaaagaccaaattaaatccaaagaaaggtttacatccgaaaaatgcactcatcatattctctatccaaatgcctcgtttgtttcaccatcttggctatacaaactctcatacgccgcgtttcatccctgaaccgtaccaatgcatacttgaaccacaaatgcctcgtcatcatcaagggaaatataagcggcagagcgagtacgaggaaaaccttaactatattattgatcatatctcatctacccaaaaatttccggatggtttcacacacacatctcgtggcgaggctccaaattttgtcaccatcgtatttcaatgtcggggcgactcctacggttccaagtgtcgttcttgctatgccacccccatctcaggggtaatgtcacttcaacatcaatatgattttactctgcattttacgaaattatcaattaaccgccgattttaaacaatacaaaaaaagacatcacaatatatggctatcaagtgccattactatatagagaacaattgcaaaatatgtatccaattctaatttcttttaaatattaaaataattaattatttcttataagatattttagaaacaaatgaatagggtttttttttatcaaacgccaagcattgaaaacttgaatcatggcttaaactgaaacacaacatatgtgaattgtatatgacagattcgtaggagatgtcaaggatacaagggagcaattatatggtaagaccaatgttttctcgatattagtacgatcaattctccaccaacgatgatcgattatgagaatactttctctatgcacaaccaaaacaacgttaacgaggatgcagagtcgttcaacaaaaagactagggatttcctctacaatctgatgctgaaagctgataaacccaaaagccggtagttatgcggctggtgaaatgaggcttgggacgaaaaacttgtatgcaatggtgcagtgtgctctagacatatttgaatgtaaagtttgtttggaatggagtatcaatgagctttccaagtgctgccatagtaaaaaaggagcaagatttttgggtacgagctgtaatattaggtatgagctatacccttttctttcgacttaaggactctttgatgatgatgcataacacatgaactcttccaattgtaattttggtttgtttactttcccattttttttgtttttttttgtttttgcctatctcccactttgtttgtttggtattgtttagcttagcttccctgctttgtttgtttaggtcacacctatctctaaaacattatttgaatataaacttccttatgtatcgttttgactaatagttttacaagattagtgactcaaaacagaattaacaaataaatatatacaaataatatcattttttatttaaaaatgagtagctagtcttttctcacgtatcatgcttataactagaacttgacaaaatactcgtacccgaagaaaagaacagcaacggaggcatcaaattgaagcagaaccgacacaaatactcgaattgattttttaaaattcttatatccaaaaaaacgaaactgaattgaaaaccgaatgaatatccaaaatatacatggtctaatcaattaatcagtaagcatggaagatgagataattgccatgatacagtttagcaaaatcccgagagccaaaatcatatcgaacaagtggtttacaatatgattctattttgtattttctaagagttttaacatttttacttttgactttttcatcggccctccccatctctcgccgaaagatacacaacccctctctcaattctgttacaaacaaggaaaaatatttcttcttcaatctaaagtgatcaatcaaattttgtaaacaagaatattgttttgagatatatagttaatctagttactaatgagaccaatcagctaaaaactccttctgagtcttcttatatgaacaaaacaatgtactcttcatattctttatccaaacgtcttgtttctatccctatcttggctatacaactccttctcatacgcagtgtctcgtcactgaaccttaccaatgactatcttaaccacaaatgcctcgtcagtcaagggaaatataggcctggagataagtacgaggacaacctcaactttctcacccgtgaagtcttatcctataattttccaaccggcttcatacacatctcttatggcgaagctcccagttttgtcgccatcatactacagtgccgcggcgactcctacgactccaagtgcctctcctgctatgccaccgccctttccggggtaatgtcacttcagcattattaattagccgtcgcatatcgaaagaaacaccaaaaaatgttttctattgtgattttactcggtatgatttcaaatatttaaaaattaaatcatcaaatctatctttaacatatataaacatgtatatctcttgcatgttaagatatatatttgcattgattagttaaatcattactcaaaaaatgaaacaatcacatgtatgtatatggcagcttcgtaggagatgtcagaggaacaaaggaagagtaatatggtacgaccaatgttttctcttcattaattccatcagatcatccccaaggaagaacgattaaaggaatgttttctctatgcacaacccaaacaacatgatcgaggacacggaattgttcaacaagaaaacaagggatttcctctacgagctcatgctggaagccactacacccaacaggacaatgatgctttacgcagcaggggagaagaagctagggacaaagaaattgtatgcaatggtacagtgtgcgcaagacatattgcgatgaaagggttgtttggaatggagtatcaatgagctttccaagtgctgccacggtaaacaaggagcaagagttttgggaacagagtgtactcttaggtatgagctatacccttttcttaggagttaaaagtttgtttggtcgatgatgatgtagaagacaatctcttgacaactttcctattttgtttggttttgttttcttaattttgttttatttttggttacaagtcaaaacttttttggtttgaaataatataatgtataaatcccttttaaattagtgaaaaccctcaaacaagaaaaagaacaaaaaaaaaaattgatttaatatatttgagcagttaaagggagaaaattatcatttagataaaatacatttaaaaaaaaagaatttatgtccacaccgtacatatcttagtttcactcagtcaaacctttgaatgttgactttttcattcaccgcaataccaagttcccctcaactcatggccctctactttacatttctaatttcatctagaagcttgaaatgaaagttggatcaaatgggacaaaaaattgttgttttgacataattgcttcatcttagccaatcagctaaattgacttcttttttgttcaaaggaactctcgtgattggaaaatgaccaaatcccaattgtacaaaaatgaaaacttcaacccattctaatatttattaaataaataaataacttgtctcaccacccaaagaccaaaatcatctagccactctataaaacatccttacctcaacacttcttctatcaaaaaaaaaaaagacaccctccacaaaatatcaattttcttccaaaacaatgtcttcattaaaacgcatcgtttggttccctatcttggccatagccatacaaattctctctatacataccgttttgtctcaaagccagaacaatgcgtttctcttccacaagtgctcagacatcgaaggaagctttacctcaaaaagtctctacgagtcaaatctcaacaatctctttagtcagctctcttacaaagttccatccaccggttttgccgcctcctccactggcaacactccaaacaacgtcaacggtttggccctttgccgcggtgatgcctcctcctctgactgccgctcttgtcttgagactgccatccccgaggtaaccacacaatatttacataagtttttctacatcttagtgatatatatagaaaccgcagattaagtacaaaacaaaactaggttataattagtttatttacatttctaatgccaattttttaattcatacccttttcttttttgaaactacaatctataattagagactggctaaatttcatttggaaaaatgctattctattgataaaaaatagttggaaaaaaagatattatatattggaacggcaagagaagcataaatagtatatcgagttcaatgatggttcttgacgttggtgtcacatatgacagctacgtcagagatgtccgaacaacaaggcgggaatagtatggtatgacaactgtcttgtaaagtattcctcgaccaatttcttcgggaagatagatttcgagaacaggttctatttgtacaacgtcaaaaatgtgagtgatccatcaacattcaactcgcagacgaaagctcttttaaccgagctgacaaagaaagcgactactagagataaccagaagctatttgcgacaggagagaaaaatatcggaaagaataaattgtacggactagtgcaatgtacgagggacttgaagagtattacttgtaaggcgtgtttaaatggaattattggggagcttcctaactgttgcgacggtaaagaaggagggagagttgtgggtgggagctgtaactttaggtatgagatttacccttttgttaagactgcttgattagaggtccaagttaaaagggggtccaatgccaaacacggtcttaatttgtgattattgtcaatgtgatatgtattgtatgttgttgtttgtataatgtgttgagccagtaaaatgtaatcttctctttgtgggttatttgtacgatagacacgattatagaggcttgactcctataaataaaaacattccctttgccaaatattttctagacttgaaccacaacccacagaagcaaatatcatcgttcataatgcttagactgtatggcagattcaactgtttcaaagggaaatctatttgtctactacttcaaattttaattgatgttaaaaacacaaaacatttttcaatatatatgtttatattgacaatttgtgtgccaaccatttaaaaaaaaatagtaaatgcaaaaactctttatttttttctgtttgtatcaatagttttgaaaaatatatttgacagaaacctggaaatatactgtatgtaaataaataaaaacacaccagtaatgtgtcgtattgctataaacttgaccaaaaaatcattaattttttttttttggaagtcgtcttgattttctaagttcatttacatatatttgtcttctaatcaagtttagttatgttaatgtttttggatagaaccaagtgtcgttagctcaattcgtaaagatcctacgcaaagcttagaggtcgccggttcgaatgacatttagaacaaaactaatgttacataatgtggtttcgggtctgggattacggacttcaacccaaaacctcctagatttaaaaaaaaaaaaatgcttttggatagaaaatctaaatttcatcaaagtatatatgagagactcagaaaatgttttacattatgaggtgctgattggtttgttgactaaaagattttaaacgtcaacggataactaggagaagatattggtcacatgtgctatgctgagtcattgcgatgaagacaggtcaacgaaggaggagaaccacgttgctccttcgctttttcccaatcctttctttgtgcgtaagcggcgaccactaccacgaaaatcccgcataatattctgaaaaaattctcacagttttcggataaaatcgtacactcaggacaaaaataagaatgcaagatacaaatatagaaaccctatatgaaaaggacaacattaaactaaattctaattctattgatattaaggacctatattttcaaagtttaaaggactgctcattaagaattacgaaacaataaaattgtttgtcccccatcattggtcaaatcaaagataagcctatacgcacttccgtatacttaaagtttgacttgataactatacaaatcatgttcaaatggtaaggttgctgtcactcctcgagtccgaaacttagggatcggtcaacagagctagtgttaatcagatgtgaatctcttataataagcataaaatcaaactattagtatttattgaattaaaaactcaatgatttgttctccagagctagatattttaatggtacagagaggcagacgtttttcttttggtaatcaaggtctgacccatgtaatctagagatcagagcaagttatataagtcttgtcttccttgtagatatcggcactcataaccttaaaagttctttttttaggtggccactggccagcttgccatagtcagtctcagtccaattggtctacaggtttaaagcaaatttatcaaaattagaccaataaatcaaaatattttaatgtactttttctatcatatcttcaaccattctagaaatattttaaaatatataaattattcgttcgaagttttaaactttaaactagtaacctattttatcttaaaaattttaagtgtagtttgaaataatgattagcaaatttattagattaacatacataagagggaacaggtttatataatgttggaactaaaaggaaaatattaaaaaatgaaaaaaaaaaacatagggacaaaaagaacattatatgggaaagacaaaccatcaaatgtaagaacaaatggattgtacatttagggtatgaacccaagcgtggactctaagaaaagctcaacccctttctaagcccagcaatatacgtatatagttgggaattccacgtgaagaacaacacatgtattaaaggtcaggccaaatgtttgtaagaattttacccaaaaaaaaatgtttgtaagaagtattcactattcagtatcacaaataatagtcactttataagaatcagattccaacgataaaagcgttgtcacatcgacaacaaatttttagtcttgagcccatttagtaagcccataatataatattttctttgacatggaactggcccatagtaaaacatctaaaccgagatgctagtaatttagtatagtttttaataaatacacataaaagcagataaatcataaatgtttgcttcgtttaccaaaaaaatgtttgcttcgtttaccaaaaaatgtttgcttcatttaataagggatttcagaaacgctcttgcatgataaatagttaatgcaccaagtcatcaacatcaagcagatgtctctgtataatatcaataaataaaattaacatagtagtagactgtatttaacatgtataacatatcaaattcataaatgacaaaatcatgaaataacacccaactagttagtagttagtgtagttgctaacaaactatggaaacaaagaacagaaagataaagtaaagcaaacgaaaaaagggattaagaattacattttgtacggaacacaagactaaagaaagttactataattttgcaaagattgaaggtggtcaaaaattagccagacaaatttcatgggattcttaacccattgacccacatcatgtctctgccccctcctcactagtggtttttcacagttacacacttttaaattatttcaatgtagtatgataataatgttacaattatagtactatatcatagtgccagccaaaaaggagatttgactggtgagtggattaagattaaagacaatgatactcttttagttaacttcaaagttaaaacaaagaaagacttaacttaaaacaaaatccattttttggtcatcaatcctatgataaagatagaaatagacaagtctgtccccataacatcattgcaattagtaacaattaacataagaaagaagttttaaattctattccatcggtgaagtatgacacaagattaatgaaaatcagaattaagtattcaacatgattaaagattaagattagagaaaaatgatctaagtaggaataacaaaaaacaaacgaatcaagttcaagaactgggaaatgtgaagtaaagaaaaatgtcggaatttacaaaggttttgtctttaatcgttgactagcttggcatgcacaggagcaggactagtgacgacggagctcggcggagttaacggcggagatgctgatactggagccggaggtggtggtgggattggtatatccgttgaaggcggaggaggtgcggtggttgtatctaaatccggcggaggaggtgaaaattccggcggaggattcggagtggatggaggaggcggattcggatttacgatcggagccggcggatttggggaaattgaagtagatgatgatgaatcagttggagatggaggagaagatccgagaacaggcgggttcgggtttggattcgggtttgggtttgggaatggagttatgaaaggagaagtagaagaagaggaagaagaagaagaagaagagggatcggtggaagatgagcaatagtcgccggagcagtggtgagagtgacggcggagaacaccgaaggctacgacgaggccaatgacgaagacgacggtgacgatgaaaatgaaaatcttggtggctttgccgacatagcagagcattgttgtggatattcagaagatcggaaaccaaaattctgtgactattttttttggatgtttgttttattttatttttatagttgttgtgaatgaatttttagattacaaaaatgaaatgaatctctctattatctctctttcatctcctttattttcacagtttgtgtgcttttatataattatttttaaagatttgtaggaaaagtaaacactttttcaaaaataatttataaattaggtaatttttaaaaaaaatagagaaatagactttttttttttactttttgtgagataaaagatttgtgtaataaagtacaagacaaaatatagagaaaatgctaaaatgtcctttgtatcaagagataagagaaaaatttatgagaccacttttttttacaaaaatttctaaaatcatttactaaaattatttattaaagacaacaaaacaataaaaagttatttaaatcatttattaaaatatttattagaaaaaaaagttatattagagaataaagaaaaaagtgtatatttttcctctttctaacaaaactatctagtttataaattatttttgaaaaaaatgtctactttacaacttatctcaatttttaattcgaagttaaagcgtgggataatgagagacatgcggatggtgggaatgaaaagctaggatggccacgtgaaagccaacaatggcacgtaatttgttgtagcttagtttttattttttgttattaccaatattgtattggtgattagttttctcgttggtatatatatgcttagctaatattaaaacacacacactcaaatggctaagaaaaattaatatatgatgaaattttcactatggtaatactgagttcattatataagcttgtgatgaaaaaaaaaactgaagtctttggatcagacttttcacttaagtttattttttcatataatgctatatttattttagttattttgattgatagagtccacaaaacgacgaatatagttatttttagttttttggagttcttagaaatattttagctattttaaaatccttttttatactttagtttagtagggtttacattattttccttttcattgttacgtctttgagaaaaataaattttattattgccatacgaagaaaagagtaaaatgggcccaaaaagatatatatggaagcacagaccacaatgtttcaactttcaactagttgtcctcaaggccaggcaagcccagccgtgcataaatgtaccagaattcacaaaccttatgagtatcatcaatgaatctaaatcgattgggtacaaaaagaaaatattcactaatttttttgttcctgctaatgtcacacgaaaacatgagtgtctctgtttcaactttcaaggacatggtcaaagacaagataacatgtctctaactctgctgaatcatttagtacatttttttaaatcctttttgaacccaatgaggagagtttagataatgaatttgtaatcgatcgtagaaaccatttcaaattcaatctcttaactcaaaagtatatcttgttcaaaaaagcctccccgagcttagccttaagcatgctgcatgcatattcattgaatgaaaggagcaaaatgaatatatcagtctataagaatagtctctagagatcttagaagataattaagaagcgtaagaaacagatcactgtatcatactaagtaaatgcacggtacataactgaagttttaaaaggagagcgctgcttaaatcatggaaggagagaattctgcttcagaaacaacttcaacatcaatctgcacttttaaagtgtccttgtccaagtaagctttaggaatttcagctagagacacaaattttctgtatccccaagccgtatttgagctggtgtaccaagacgaaactacaacaaaaaaaaatcgcatatatgaaagcatggttatagcttagtataaatctagaaagagtcccagctccaatcacacaaaacgttaggaaataagaatgtagtacataaaatgttgttagtacacctacttttgtgtgtcacgtgattggatccacgtgggtctaaaactcgcaattgagcttgcacgaaaatcttttcactttcctttagtgtttcactttgatcgagatatagataaagggataaccattttcggtctccttttacgtcccccttgggatacaactttagaaccctacatgtgtaataacttgcacatgttaatctctagaaacaaaattttcttgtatcatatatatactcaccatttcctttctctcatcgaaaaattgcctgatgtgtaaacattattgttcagctcagagaaattcttgaccgtccaaaagaacttgggttgacttagtgcttcatgtaaagtgtgaatttcccaattagtaggaggtgcagcaacaatgacatcaacaccaaactcgcattgatctccctcaaaaatatatccgtttttaggatcagtgaatgtatcaactggaagcacttgcgccaatccccatattgttctgaatgcattgaatagcttcgactctacatctagatatatatatatatatatatatatatatatatatacacacattattggataatatatagaagtaagaaaatatatgtgtaacaagacatgtagacacttacgttgaatagtatagtacttattttcttttttgttaaatacgaaaaaccgtagatcggcaaacacctcagtggtaggtgtagtcaaaaggcttgtgctatctatttcaacatacattgaaataaacccacttccatcgtctttgcgattccctttcgggtatatgatcattctcctgcataagttaagatgatgcatgtttatcaaaatataaggacaaaaaaataggactgaaatattgatatttttatggaatgatgaaaaaggtgcatttccttggatcttgtgggactaagtgaatatacaatacgtaccagttgtatccaccagaggagaaaagacgggattgatacttgccatcagagaagagagttgatttctcgacttgggagatgttttggagcttgagtgagtaagaattaggagtacgttctctccagcttcgaagagttgttgaagatacgcttgaacacatcattgaacctgaagcgagactagagagaatcagaatctaccccaaaaaagaagaaaaaaaatcgtgtatatgtgacagaagagaagagatgaaagggaactaccaaagtttagaatttctgttacatatatcctaactagaaaataaaatttaactactaaaccaaaaaattacccatcgaccatatatagcaaaacatatacaaaatcaaaagattcgacgagtactgtcttttacacctaaagaaaactaaagaaagattcgacgacgaatcgagctatattcaaagtatgtgggacagggagaaaatttgatttagaattcacaaacattaaacaacgtacctagagctagctcgttttatccttgattctctaaagaatggtgaaaagttgagagagctagagaaagactcgacgtacctgaagcaaagagagagaagaagaagaagagcctttggggtggggttaatttttgtttgccccacttatttctagggtttggacaaggaataatataatctatatacgtattgaaatttttatttagtgagatagttatttaaatttaattttgtattctgtttacagagataatgatcatcccttattttttggttattttgccagtaactttcatcatattttaccggcactgaactttgatgactagataggttcacctctaggctctagtttattttatgtgcattcaattgctctttctcgtttctttgttcataatcatatatatacataccaagactaaagtttaaagtataacctaaaaatattaataaaaagattcagatttaaataattcagaaataaataactcaataagccattatcaaaacactgcattgtattgtctttgaatcaaatggtagatatataattgtcttttctaaagcagaatttagttaacaggagagtatttggtgctagaaacaactgcaaattcaatctctatgttcaaagaaccctcattgtccaagtacttctctcgcactttatctaaagacgcaaaagtaggccaaccatagccttggtttttatttgtatttgtgcgccagaagttgcctgcaacaacagaggaagaaatataagcatgcatattgattataagtcaaatataattacaacttataatttaaaatagtaaacgagggacgaaaaagagcaccaaatgaaacattatgtttcatcaaccagtgaagtaaaacaactataagatgatatgatatacttattgttttggaaacttacattgcccggcttggtgaatggatccaaacggatctaaaactctaagatgtactcgcgtgtagattttctcctctgcattgagtgtttcactttcacttaaatacacataaatggataacgagttgtctcgtgctttaacacccttaggatgcacctttagaaacctacagaacaattttgcacttgttaacatagcatatgtaatatgaaaaagcaaaacaagttttttttagactcctcaccattgccttcctcctactaaaaacttgtctgagttgtataactcctcttttaactctttaaatttcttgagagaccacgagaacttgggatcaaggattttctgattaaaggacacgacttcccatttagtaagggatggagcaaccagaacatcaacaccaaattcacattgatctccctcaaagatatatcagtttttagagtcgttgaaagtttcaagcgaaagcacttgagacaatccccacaccgttctaaatgcattgaaccgcttcagttctgaatctatgacatcgtgcataaattgtcgatgagtaaagaaaacgagaagtgaatgtatactaaatggaaaacaaactagcaatagatcaatgtatatgtgaaatatattagatatatacaaacctttaatagtaaagtatttgtctgttttcttgttgtagacaaagaatacgagatacgcaaacacgccagttagtggtgatgacaagaggtttgtgctatcaatctccacatacattgaaataaatccactcccttcgtcttttgcgtttccttttggataaatgaccaatctccttaaaaagttgccaacaaaatcatagagggtaaaaacatgatcattcttcatggagtgatatgtctcacaaatcacatctagcaataaaaaatttattgtctccaaggtccaaactactcactaccgtgagctctattatgttcagttcttcatctttcttggaaactttgtaaggtaattaaagactagattcgaaataagttagattaaacatatacatagtgctaaatttaggtacacaattagtgaaacaaagagttgtatttgtaagtatacataccagttgtacccgccagctgcgaaaagactagattcgtatttgccatcgtcgagttctgcgatattctcaaacttgatggaatatgaggaaggtggatgttctcttaaggttgacgggtttgcgtccaagacggtgctgcccatccttgttacacaaggtaatccagagagacttattagagagaagacaaaacttagggttcctgataaagatcaatcttctttgttatataaaaaaaagaaggattaatctttgatttataaatatttttgcaactgcaaacaaacgtaaacggacgtggaatatggaaagacgaaacttacggttctttggttaattttcctttttttctttaaggccttttaattttccttttttatatagaaaggttttgctaattactactttaacaaaacaaaacaaaacaaaacaaaaggcatatttgagagttattactttaaaaaaaaataccttcaaatagagaatctagatgagagtttactttatacatttctgtaaggaaaatccaaaagcccattttggtttacaagtttgagtgtttgtcgtgaacgtagccatatttctttcttttccaaattattattattatcatttattttatttatttttattttgtagaatccaaaatctgtaatctaaaggccttgaatgttttgtagattttgtaagagtttttggtttttgttttttaaaaacttattttcataccaatcaagattttaaaattttggtttccctacaatttagtaaaactatgttactgtagttttccattcatgattttagttttttagttttcctaaaatttagaaaatctagtttttattcaatcaacattatttttctcaaaaactaaaaaccaaattttttgggttttctaaacaaaaatataataacaaaaatctaaaactaaaatctaaaatctataaactaaaatctaaactcaaaaactgaatctaaattagcatccattcatggtcttagttttgtttttttgagcttttaaaaatctataatctaaaaaccagtttaaaatgtttaaattatgattataaaaaaagagagatctgaacgaacagtagagttttttaatagcttttatttactatctcatcaaattgtgcttgtgtactattatattggcaacgtttaatcttgttcatatttcgcattttcaattttcggtttagtttatttttggtttattatattgatcttgcttccatcttcttctagaaccggttcaatccacgtcagctaaacaaatttacaaacaatttcgtactccgtaaaataaattgatacacacaagcacaaatcgactcttattcgtttcttcaagctcaaatcccaacgacaatggcggttccgattcacttcctcatcaactctccacctgaatcatccgacgaagagtacaacggttccgaaatttctaattcatctgaagacgaatcaatggaagacgaatcgtccgagttagtaaacacaaacgaaggatctctctccaatctcgtaaacgaaggttcatattcaccatttcctctgtttctactctgaataagcttgaacgagtcttgttatgtcgagattgttgtgtaatcgattcgtatctctgatttttgtgttacagaaactgtggaagggttttgggttaagtatccgtatttgaaggagttagtggagattattgtagctcaaggtttgatttctgaagaagttgcttttgagagagtcaagcttattggtgatgataaagctaaagagttgaatgatggatggaaagctttgtgtcttaaggaacaggatttgggtaatcagatgcttgagcttcttcttgcttcttcttctaccactaaaccctgaggaatttttcatgttttgattttgtctttgagaactttatgtatcgtttatgtttgtattgaaaccttaatgtgaaaaaattgcaaagtttctcatatagttcgttctttagaatatcatcaatcaaaccaaaacttttgtacattgaaactgagaatcaaaacgccattaaaacgctatgtagaagaaacgttaaacaaaacaaaaacagagagcttttggtgtttcttcaaacgacgtcgttggattcagaggtttctcgacattgtcttgagagagagaagctgttcataagagaagacacaaacaccacgagaggagagtacgtttcgtgagcctggagaattcgcaagaacctgaagaatctgttgacgtgtcagagatttgagcaaatctgtttctcctacttcaccggcggtgttgtagacagattcgagaggcatccaacggagtgaagcaatctgagattgaagaaacttgatgtatttgtgagattcttctagagtcatcgctaagttcatctttctctcccacggcatgagtttctccagggatctgattttgtctgagatcttccgtcgtttggtaataataccaccgtcgtttgacgcagttggagatccagaggttgttgaagaggaagttgagttaagcttctgacgtttggcggcgggaagaggaggagagagagatggaaacagcttcatcgtcgtcggttcttcaacggcgtcgatggatttgagatcaggaaggtggagaaacggtgtggtggtggtggtggtgtcgtcgttgtgaaagagctgagtgtgagtggagtcgtaaaaaatctgttccaagcgagtggactcagagagatggtgccgattgaggagagacagagtggagtcgaggaaggaaaagtcgaggttgtggtcggggaaggtgaaggcgttggaaggagtgaaatcggaaggaggaagcggtggtaagtcagtgagtgagtcgaaatcgtaagctggtgtctccattttctccggcgaaagggaaaaaacagagagaggagaaaatgagaatgatgcgtgactgtgtgaagaagagaataaaacagagagatatccacgtggcttgtgattattgggtggagatagaagaaagaaataattaagaaaagagagatatacacgtggattgtggtgattgggtgttgaagaggaggcggcgacacgaggaacgaagacgattccgttatatgttttttgtcgactgtttgtcgcgcgaccctcgtcaggcggtttcagggtattgtacttatggaatctgggccgttggattgtttcggggtattgtactgattgaatatggaacgttggattatgtttacgatcagatgatactgatcccatggacagggatgtttgtcaggttgcgaaacaaattctgatttacggattgtgccatcgtaatgatgttactgaaaagttttttttttcgggggcgatagccacgttacttttctccaaccgtgactgcaaaagtttctgttaaagagatttgaaatgtattttttttagttactttctattcgtgattgtaatcaaaagaatagaaattgctcaaaatgtaaattactttccacaaaattagagtgcttaatttgctttgataatttgaatttgagaacaaagtgtcaaagacattaagtattaatttcatgattttatcttttttattaggatttttatccagaaaaagaaagaagaaagacactaacaataattcaacgttttcatctacaagagaaaaaaacaaacaaaacataatctattaagcctttttccaaccaaaataaaaaatgctatattactgactttgttaaaaaaagaaaagacatatacagattatataatatacataagaaattggagaaagcgattggcacagataagaacgtgttttcttgggaaggggaacttggtaaataaaagagaaagttacctaactgttgtaaaatggatggtgtgtttttaaccactgtaacaaatcttgtaaactttgagatggtaagtggtaaataaattcacaaggtcaaagtttgactcatttatgtataaaacttccatgacgggttttaacaacaacaaaaaaaacttccatgacggcaaaaatgatattttttgaagtcgaacggaaagaaaatgattgttactatttgggccaagaagcccactaattaaagcaatatcatctggggtcgagattattgatgacaatagtttaaacttatgcattattattattattgcacgacatttgtgttatctaaattcatttttttttgttaatgctctaaatgcagtattttaaaagtatgtaaacctgaacacatatgattaggaaaaaagctattgttggttttgtagtttttggcgatagtgactagttactaagggcatctccaaggctcaacaccattttggtgttcaaattacaccatttttagcattaaaacttgtgttctctccaatcataacaccaaaaatcacactaaaaaaaaaaatactattatattatctatttaaaagatttcttttattatttaatagttttgattagtatttattattagtatagaattacataacattataaacatagtacattgaaatatatatttaaaaatacataaaattgtaactattttgagtattttcatacataataatataaaaatatcataactaaataaactatttcaagagatataatatattaatgtatccattcatttttatattttatatctattaatcatttgtaattttatatttgttaattgaatttttattgatataataagtgaatagtgtttagagttgtgaatagtatcagaccaaatttgatgtaacactgtagcattacactaaaatggtgtgaattttagagttccattggaaagcttttagtgcaaaaattacactaaaatggtgttttagagtcctattggagttggcctaaatcatgtatgttttgcagttgcaagaatttaatgccatgtttcagtgggtaaaacatgtcagtataactttcatcattgacgtaatccaaaatctaaactgtaattttcagtttttaaaatttattttcttattgaccatttatttattttcttattgcatgtcttttagtcgattttatagatttctaggtgctcttttaagtgtctttcaaaatgggtcatatgtttgttgggggggaaaagagctatggacgagtgtttggatcgaaaacgaagagatttgggccacaatgcccgttaaatttagcaatatcatctttacatttcaaatttgtaatttgtgttactaaagcattttcttttggtttcttttttttgtccgtgtcgtccattttctccggtgtaaaaagagagagaaatacatttcccaaaacattttttttggtcgcacttcccaaaacctttgacatatttttctgaagaatattcaattcatataacattcttaaaccaagtaaaagtgtgatatccgcataatgacataactagatgttacttaagtatatggttgtagcaaaatatgttcgtttaataactcaatatctctcctaagatgctccgtttatccaataccaccttgatttaatccagtttcttttcaaaagcaagttatatagaatcatttcacatcattcatgagcaacaaatgaagcaaatatgcaatgtgttctgtttttaattacactcagtgttctgttacatgaataacatataagttgatgataaggtgtgttatttttaatgtgattgtgagaaatgatcgtcattttcataatcttaaaatacgtaggaacaaaagtaggaatccgatccctccaaagcatattcaagcaaaaggtaggagatgacatgaccacatgacccaaaactcatggattattatacataaaatttctttttctatcacaaaaacaaaagaatacatatggactgatcgatgtggccactacacacaatcacacatatagtagtgtcgtacaacacaagggttcattagtttaatttgatagagaacgtcgtgacttgtgagtcactgcaatacattggttgatccatttagttttaaattggtatattgttaatgctataccaacttactaagtaaattaacagattctttagtattatatatcttgatgagcctttttaatttctctaacgtacaaatgataaaattgcaattactttattaggttttacaccacgtgagcaatattggtgtctcacgtaagcacctttaggtccttaacatttaaactcctctctgtctagctattacctagtagccggatttcagtttggttttataacttttgttttagattttctttgggtttcttcgtcaacatatttctttgattgatgtgacttatttaatatagcttgaatccaaaccaataaaaagaagccatactacgcctcaattttttcctcgtagtttagtttatccgaaatacaccctaatttcccaattatgtaagtaagatgggctaatactctggaagaagtgtctcataaaacaacactattgggcactcaaatgggccagttacgccaatagctgtaaatacctattgatattcagggtataaatgtcctttcagagtataagtcacgtgagccccgttccatggcttttttgctcaccacgttaggaggagcttcagtgcatgagcagttgaaaccaaatcacacttttattttattttatttatattattatttaacatttatttttgttattaaaaaaaaaatttagaatatttttttgttgtctaacgaatgctatttttagactctattattgcggtgcctcgtttattaacagctattttcttgtttttttttgaatagtattgtaactatttatgttttttggaaagtaaatatttatttgaactatttgttatgccatctaacgtaataataaagcatcatttttgtttgcggagatccctttatattacattatcgtatatatatatatatataattattgattttatatagttgtatgtcatcatcaacaaagataataattatattatatattcctgattttgtatctttgttaacgtctcgatgtaatcaaattttcctccattttaattattataatcttgaaatagtatggtagataaatcaaattcagtttggtccacatagtaccaattttgttatggtcgggtccaataattaatattttgtatatttgtatattggtatttaacggaaaataaagatttaagtttaagattttttttgtaaaaaactttaagtagaacaagatttgagaaatttgattatctaaatatatttcaaaaattctggctggcttaaattttcggttgttgtttcaaaacttcttcttttgaattctgttctttattttttatttttttatttttgtatgttgtttaagatgattaaaaactaatcatttttcaacagcaataatcatgttttaataaaaaatataactttgattagaagcatcacgtgtaaacataatttctatcaaattcatttgaccgctgcaccattcgtactaaagtttactctttggctcatgagttaaactaatctaaaataaataaagttgattagagatataaatacaacatgattataaaattaaagggaatatagcctaaaaagcttcaccatttgagcttaaactaaataaactttaccagaaaaataaatgattaattactgattgatcagctgatcaaaaggttaaaaaaaaaaaaaactttacattataataaggaataaacaaaaaaaatatcctttatctttttaataaaaataaaataaaattgttttattagcaagaatgtcagagaataggtctcagttctcatctctctctcttcctctctataacagtgaacagagtggtgtttgcttggacacgcctttgttgctttgctttggtctctttccttttttatttactctcaaaactttcatttttcgttttgtttatcaatgaacaaaatacaaacccaccaccactactaatttgtgggtgcttctctaattgacttgacagacatcataagagaagacttatatagaatctgacaatcacaaaaccaacaaaagtttcttgcttctttgctctttgtcttctttctcttctcagcataaatccacacctctctctctactgttactcacctctttcaccacatttcttttctcttttgggggaagaatcaagaaagaaagagagctagaatctagttctatccaagagtgttttttagtttctttctcctttttgggatatggaagcttgttgctctgatcttgaagtagacatcaatggagaacaaactatctttctcaataaggtaaagtctaaattaggctcaaaaaatccaaactttaaccatttctcaatgttaatttcagtttttcttatctgggtttagttaaattcttgttcttgcgttaaatcttgatttacaagttctaatttatgcatcaaaactgtgttcatgtgattttaaaaatacatcttttgtgtatctttatatgataatactacggctcacgtactgtgtgtgactctcctacatttagcatttaatgtcctctcaacaaattaccttaaaatgagggcacacaaatttcttctttttttttgttttcttcctgtgaaaccaatcactaatttggaatctgcaactaattctctgagtatcaatggactcaagagttttagttaagtgagtaatgaagtaaaatgtctccatcatcatttattgcctttttttgttcttatacttgttctctgactttctcccatatttctctgtaaatcaaacaaaattttgccctctctaggaagataagaggcttaatttggatttttgttggatactattcacttcccttttgttcttacttgttatgtgacttatgaagatgatcttaaatgattggagacacagagacctttgtgtagttgatatttaatttccttcctgtcttgtaataactgttgcctttattctttcactaacagtaacaagccttaaagttttttgctttttttttttttcttgtagtaacttatgtttgtgttgtttgtattttgactgcagcaaatcatatgtgcttattctggaacgttaagaaagcttttggggaaatcaactagttccagtggaaatctcaaggtgatcttcaatgatttccccggtggagctgagagtttcgagtttgtatcgaggttttgctacaatgacggtcgagtagctgtgatgccttcgaatgtagttttcttgcattgtgctgctaagtttatggaagtcactaaagtcttggaacaaacagagaagtgtatggaagagattaggtattgggcttggccagaggttcttctttgtctaaaacagtgtcaagaagttgaaacatcgcccgaagttgattctttagccgcgaaactgatggatgcgttggtggagaaactgtgtttaaccattgaaatgagtccttctagtgctggttctgcttgttcaccagatagcagcttgtttcggttttcttgtgatagtaaaagcacagagagtttcaagaattgctctgttcggttaacttggtggttcgatgaagttcttgttctgagttctggtttggttgaaatgttcttgaagcttatggtattgcggaaatttgataatctcatcataagtaggttcttgttctattatcagaaggtcaagttttgctctgcgtcttctcatgagaaaagaaagattcttgaaaccatcattgatactctttgcgtcttagatcgaagttgtgtcccttgcaagagcctttttgcggttttgaggcttgctcttggattgaacataaacaaaagctgtatgaacaagctggaggttatgataggtcaccaactggatc

SEQ ID NO: 1041 - DNA, 70100 bp, Arabidopsis thaliana
aagcaacactagacaatcttcttgttccatctccatcgaaatcgagtcacttgtactatgtgaatcttgttcttagattcacaaaagctttcctagatggggcaagaagtggattgcaattgaagaaagtctcaagtttgattgatcaatacatagctgaagtagcacctgatccttgcttgaaaccttcaaagtttctttctctcatcacacttgttccagattcagccagagaatcccacgaagatatataccgtgctattgatatgtatctcgaggtacgtttcaacactcatctcaagttcaaaatgtaaaaaagaatgtttcgatctttatcacactaataacagtttaatggctcgttcaggctcacacaggaacaactgatggcgaaaaactcaacttgatacgaactttaagttacgagaagctttcaggagaatcaagagctcacatttcgcgtaaccaaaagtttcaggctattgagacactagatgaacaacaacaacaacaacaacaacaacaacaacagaagcagctcatactcagaatggagaaggttgagacttcaggagaaaacgagaagctgaaggaacatatcgaagggattcaatggagggtaatggaattggagagagcttgtttgaaaatgcagaatcaaatggaagttatcaagaagagatccaagagctcgagcaaaggaagtaatagatcacttcctaagctctgttcttgattagtgaagctgtaagcttacgatcatatttgtacatagagtgatagagagcataaggagtcaattatagttaccatttggttcttatgtttcagagtatttatcttttcttgtgttgttttctttgtcacaaagttgtgcgtaatgaaaagtaaagataaattcgtttttatggagatgatacaaacttaaatctataaaattttcttgtgagattaataccaagaatgcaaaacaaaaatctagaattttgattctattcttccttaaacgttactcttttgtgattccaagattctcaacgtgtaattgcgtttacttagaagataaaacagttctttttgacgaggccgttacgtgtaaaactttgcgcgacaagtagaatgcttagtattcaagtcatgaattgaagaaattcagactaatctaaagagataagaataaaatatatctgttcctttgatcgacattagtaaaaagatgatgcattgaagataaattcataacattgtcaaatctagtttcatcgccaaaggtaacttcaaagttcaaaccaaaaggaaagctgtaaaacagagaactacaaacataaagcggagacaccgtaccaggcgaataagactagagatacttttgggcttaagatgtttcagcagcgggttgagtcacaccgtgcttgaccaacagtttggtgagcgactcaggtgagtgaacatggtacttaacagtcttggatggagtcagatacacttcagcaagctctagcttctcagatgttaagctagtgctgtccattgtcttggtcagaaccttcaaggcaagctcgactgcttcttccctggttgcatcgtccttgtagtcttgtttcaggatagactgagccgcctgattgtttgctccaacagctgcagctttccaaccaccatagttcccactcgggtcactcatataaagctggaaaccatggtgcttgtcccatcctgcaaagagaaaggagacaccaaacgggcgaagaccaccaaactgtgtgtatccttgttttgtgtcacaaagagattgaaccagctgctcaaccggcatgggctcttggtacatgaaggtgtaacgttgagcttgaactcgagccgtgttgataagtatgttagcatcagacattataccagcaacagcacaggcaacatggtcatcaatcttgtacattttctcagcagaggttgaggtttgaagaagctttgaggtgactttcttctcaccgatcaacacaacaccgtctttggataagattccaatcgcagaaccggcgtttccaatggcctccatagcatactctacctggtaaagacgaccttctggcgagaagattgtggtacggctatcatatctccgagacattctttaacacctgcaccacaacaaatgcattggtctacacaactaattcatactccattagacacagggcaagttccgaaaacacgaaaactagggttttcgacatcacaacgatcaacaaacacaattgattcagattaaaaactagactaaaactaggtcaagtttcttcaatagaaaggaaatgaactagctttataaatctatgttactttgagatcaacacaaacctaaagtcacaatcacaggagcgaagagaaaaatcgaaagataattcaacaatcactgatgcccatataaaaacacctaaaaactaaacatcacccagaatcgaatctagctagggtttataaaattctatcaaaagtttgaagatttcataagaaaacacttcgctcaagacagatccagcaaaattaaacaggaaaggaagatacacagattctgaaaattctaggaacaagtaggagaatgaaagacattggatttaagagaatacctgagaagaattcgtttctctctctcgttcggttcttctttgattttgctgagaactttgctctccacaaaatttatgagctctgagatgtgaactgttcgacaagccagaaagaaaagaaaaaaaaaaggtgttttttttttgtgctttacagattaggcccaaaagtgtaatttatggataagaaaaggcccaaattatataatcaagcccaatgcaagatccataactcggaatctctgatatatcttaatttttgttgtcatatgctgattttttttttttttttttttttttactgatatgtgtatagaaatataaactagattcatttctgacaaaaaaaaaagctagattcattttacgtggatgtatttatatacacatatcagtaagaatatcccttttagaaaaaacatttaaatgtgcacctatttcataaatcataataagaatgtaatgttatatatattcacgatgttaaaagaaaagtaaaaatgtagtatttacaaactaaatgttttgttaaatccctggtacgtagtaacacacaatgtatgttatttgtataagaaaatacatagatatatctcttgtaatgtatgataaacaattgtcactaacaagataactaataacacactctaaaatattaggggcttacttattttcttgaaatcttcataaacaaatcaaaattttgtaatcttatcatatatcttttttatcaaatgtttggacaaaaaaaaatgtgatagataatttttttttagcaagagtatacgtgtatacagtataactaaatttatacacatgttcttggtcagtagctgcgctgtgaggcgcatatgcatcagtgcaatgcgcatgggccatggctacaaaaatcacattttttctactccaaaacgtacgtatgtacataaaaacaaattagacagatacaaacttgttcatattaaaaaaaaagttatatcgtttaacagtttttttttcttcttcttaaaagtacaacataacaagaaagcccaaagaaattgaaatctcaaacccaaattacaacgccttttattgtatcaaatgaaacatgtaactaaaggtcgcacatatgcagattaacctcccattaccaaatagatcatgaaactaacaaatttcttgaagaaacgaaacttttggagtcgtccagagactctcaacgttctacatcgattaagcgggacatttgaagtcagatggtggagtttttccacagtcgagaagaagctcaagagcaatggggagaacaaggtcgatgttgagaagtttgagcttaatggtggtacatagacaaacggctgcgtctaggtcaagtaaacctcctaaaaccggacaacattctgccttggcgtggctttttccaagtccgatgtgaatcaaacctccaagaacgtccacacaagcgcctagcttcagcgtgtcaattgggcaagtctctggaataggcgtaggaggagttggtgttggtggtgttactacgggtggtgttggtgttggaggtgtcacgacgggtggtgttggtgttggtggtgtaatgacgggtggagttggtgttggtggtgtaatgacgggtggagttggcgttggcggtgttacgacgggtggggttggtgttggtggagttatgacgggtggggttggtgttggcggtgttacaactggtggagtcggcgttggtgttggtggtgggcatggtgtaggcggaggcttgtggtggggtggtttcggagtagacggaggaggcttggtcgtgggaggtttaggtgtggacgggggaggtttggtgggaggtttaggggtggacggaggaggcttggttggtggctttacgatgggaggttttgggtgggggtgaggtttggtgggtggtttagggtggggtggtttgacggtgggtggcttagggtggggtttgacggttggtggtttaggatggggtttgacggttggtggtttaggatggggtttcacggtgggaggttttggagtaggtggttttactgccggtggtttaggtggtttgacggcaggaggtttaggcggtttgactggatgttttggtggtttgtgaggtgctggtgatggtttaggaggggtacagtcgcaagcataggagacggcaacgaagccaaggaggaggaggacgagaaaggagaggttttgagagcgagaccccattttttggaatgagggtttgggtttctgaaaggagtgagtaagtagatacatgagtgtacgtgtaccttttatagaaaaactctcacgagatatttaatttttatatataaatattgtatgcaccaaattgtggtttagatgattgaaattggatttgagtaagcacgtattaggtcactttgttacaaaaagaaaacaaagggtttgtcacactttcctcaattggcatatatttgtctcatccatattacaaaaaaaattactgggtttagccactatttaacgtacgagggaacataaaaatatttagaaaaacaaaaataccactgtaagatatagttgtcagcattcggcggcataaacattcgcttaattattgtcttatatactccgaaagaagagattatcaatttttaacgatataacgatctcgattccttaaacctttttatatcatatataaaaagggagctcgattgtgatattctttacaaaatttcattgttcgtatttgcctatttggtcaaaagttagcatttcgaaaaatgctatctacttttaagaattatatcttgcaccttatttttctagctatatcatagatcaaattgctaaatatctgacatatatcgagaaatcaatgcataaatcagctagagacattttcaagctctactctaacattaattagagaatgccgactctataagcgtacgtttagtcgcataaaaaaaaagccatcgtttaagtattggcacacaacttaaaaaaaaggttggacaagtcatacacttgtaattatagagtgaaaacaatgggagcaaccaaaggtttttgtagtgtaatggccaattgggtcgacaatttaagaagagactttgtcattattatttgactttaaatacacctcccattctctattttgatattttctgtagtcacaagatataattaagggaagacatccttctcactcttttatttcttgttccttgcgaggtaggtccactttttttttataaggattttaggcaatttcttttgggttttagtttgtgtctctacctatacaaataggaaaagcgaatcaattttggttagaaccccaaaaatatatctaaaaagttgataaatcttcaaccaagtttgtgtttcgttagttaattactaaaaaaattagattacatgttaaacgtttacactaatagatgaaaaaactacccccacaatcatttccggaccgaaacaatgtttttttcgtcttctgcatatgaaagatattagcttattagccctttttggtaatcatcttttgaaatgattgagtgacgtatgtgattgatgattctctttgtagtttgttcatattattgttctatatactatagtacactctacttgtgtttgatggttaccatattcatttaaaaatttatattggcattattgcaaaatataatttgatttattttctagtatatattttaaagtaatgttcgaaaataattagagctatataagtactttgtattgtaaaattatgaaattaaaactaccacaattttgtccttccaatttatttatggtgaagaaaaaaagaaataaagttatggacgcaattataaagctggcgggtacaatttggcgggtagtcaaaacagtctaacccgtgaagtctgtcacattttaagatatagttttctttagatgaaagaaaaatgaaatggataatgtgacgttattatgaatgaatctcatgcatgcatgtgactccaccatttgtctctttgttatctctcacaagtcacaacaacgacaataattgtaaaaaaaaaaacttatggtcgtttgagtactgagtactagtcgatctagtgtacaagagaaagaagacgagaataaactttcttctttgtatttctttttttcacacatttacaacgtctttccatgggctttttatacactactctttcttgacgtacacttgtctaccttttcatcatttcatggtgcaagggattgcaaaacacgcggttttaggtcagattgctcgttagaagaaaagattaatcttttcttctacggagcaatctgaacttaacatgctttagatgtatgcacagagacgaaagtgacgtggctgaacatttgcttgtgttttgtctttgtgttgttgattgtttgggcttgttgagatgttgaagttgggccagtaaagttgagcttagaattctgagatgcattcaacaccaaatttaatatatggtcgtgtgagtgttagatattgaagtttaccagcaagtcaccaaccccataacgaagcatgttatacacgtatcaacttgtctaaccgtggctattagggatcctctccgaagaggtcttatttggttacgtgtatggtttctcttcttatcatgacatttgaaacactctcgctgataacttccatatatagaagttatgttgctcatgttttctaacttcgttgtgatctccaaagtaattggtcatcttgttgatgtactttttgaatatattttagtcccttaaatgggtaatatgatccatatacgcatggagattcatagctctctttctctctttcccctatgtttaatgatgtggcttcagaaatctttggtattaatgctcgtcttcactccaatatatgaagtcacacaatctatgttatacacctctgatgcagcagcttaatcattagtattatttaatttcttaatctcctttattattttggcaaattgtgatagtgagaacgaactagatctcaggttcatggatgtggaggaaatattaaaatacagataaggcgcatgaatttcagaagatggaggttcgttctgagccttctggccgaataacttctttttggcatgatatttcgtgtcctctacggaaactttatgacttgttgtggtctaaaggaaacattgatacgggagtaggagtagctactcacgctattgttgcgtaagtgttgggaactcatcgaagacggatatacatcatgtcgagtgcgcattcttaatcggattgagaacctgatcgagctagctagaaacgaggaagcttaacgttcactttgaattcaaagaagatggtttctagaataagttctcttggaaacacttggaatctcatatgtgatatcaacccgatcagtgactagcacaaagcagtttggttccctttttccacacggtactcattcataacttggctagtgaattgggatcggatgtggcagctcgagtaagttgcgtcttttgcagaaaggaagtagagacaagagatcacctctttttctcttgcccttactattctcaagtttggtgtcatctcgctagaggcattcttcaaaatcgatacacggaatgtaggagcttaaactcctcacatcttacttgacacttctcagccaaaacttcatacgttcacgctacaaaatgtatttcaaattacgattgatagtctgtggcgagaacgcagtgggaggcgtcacagtgagactcatatcctatctgccaagctaacacgacttaccgataagaacgtgagaaaccgcttcggctacattcaattgtcaggaaaaaccgagacgaagagggactttgctaatggtttagcactcgatcagtcttagttctcaattacactttctatatgtcatttcaaaattttcaacttttaaagtcacaatattttacaaactttttgttgttgaataaacttatggtttggcaaatttattgaaaaccattgaataaatgtataagaaaataacaataaaataaattaaactcgaggttcctaaactacaccataagcgagacggatttgcgcgactactcatgttctcaccgtaacctggcaaaaaggaaaaaataaagggtgagtaaagaattattcaatgagaggatcttctttccgcccattggaaacacgacaacacgattctacctttaaacaacaaacacatagaaaaagacacaacactcatataatttgcattactatgcaaaactataacacacaacttattcttgtcttaccaagatctccacatcaattccatgttcgatcatcttctctgacctttgaacctatgtacttccattagactcgccagtcttattattgaggtaagaagaatctgtcaactcaatatagaccatattccattgttccactattccactgttcatcatcttaaaagatggtaattccacttactcatatatagcattcagtaattaacatcactctatcattaacacaattgtcatagtatcaatcataattatcaaattattactattaagcaagcatatttaatcctatgtcattgaatcatgaagataaaaatagaaacttgtaatcgcattatcgcagatcacaagtttctattacaacttacttgaaattcttgaaatccaactgagttacttgaaatccttacctattctggtgattgaaggctctgacggcttccttgacacttctcctaaccgtatacaacgccgtcttgccctccaatggtcaaatatgaccggaaactcttctccaaaagcccaacctgactctgaaatctgatacttagttatttctaagttcagaaactgtgatttttgtgcaactttcaactcgaattgcggatgacgtttacctcgtaacgaagatatgtttgttgttgtgtcttcctcactatgagatctatccaacgacaccaaattagtgatctgattccttcagaccggacgagaaaacgctcaccaatatctcgagttgaactaatatatatttcctcttttcccctcaaaacacaagtagtttgagatgtaaaccactaatcctcataatagcaacattcttctacatatacttgtcccttgtttcatctctatttcattaaaaattctcctcctctgtttccttacccaatgaaatagagatgaacgatgacgagtaacgaacataaccacatagacttgatcaccacaaaaccataacgtaacgacaactccggtctccataacggtgatggtggtggctgggattaagatgaattgctgctggaaagagataattaagaacgtaatggtgatgatgaagacgtaagtgcttgcggtgaagacgacggtacacaaatatatacattcacgttaggttaggttttggtttggttgggctcatgagcacttccattttacaattttggagagtgtctctaaaaagctaaagctattaaatattaataaataaatgtaaaagatctttaaattaaagacattacattcaaaaatgtcttgctatagacatttaagatatattgtcctaaattttaagacaccaaaacactatatatatatatatatattttttttaaatagattttaatggtaggaagatccctgataggataagggatagagatgctctaatgggctcaataatatttgggtttcacaatgagtctcacttatctccatcataagaaaatctaccactaactccaagtccaattctaactccaactttgcaatccacttatctcatgctaagtagagactatagtaaactcgccttaactctggcaaaagagccgaacagggccgactcaacaaaactcaagtctttgagctgaaagagaaaaatgagatatttttctttatattttttggaccctattttattaagaaaaaaaaataaacatgaatagaccttgagctatggcactcctaacacatgcctagagtcggggctggaaccgaacaaaagcaaatccatgaatccattgtccctccccatctctcaaaactccgcatgtcgtctctaaacctggattttcgtgtgatgcaccatccgtgtttagctttacccatctgaccaaaggaggggtccaagcaattagtctctcaacccttgaatactgccccaacccaccactactcacaatccacgcttgagaaactttcctaactatattattcacaaatcgaactctatcacgacattttccattctcacgaaacacgtttccacacctccattttcacccccacatgtcattccaaagaagaccatgtgaagagagcattggaaccttagtattaattttttattcttcttcttcttcgttacttaacctctgactatgtgcttgcaacttgcaactatcttagagaaggactgaagatctgatgggtttttggaagagataatattgttaaagctatgaaactcagtcaaaactgctttcttctcctttttgtgtcgccaaaagcatgtggcaacgacaccaaaaacaaagaccagttatttatctaataaatcattgactagctaatatgacagtagtgctaattaatcgattgtaaaagtaaacaccaaaactatataaaaaaaatatttatattatttatgtctacaatttttttttaataaagaaaaaaaagatcacaaaatactataacaagcagagctagctcttcattaaggcatgaaactggaagcgattcttaaatatatgagcatgctaaagacatacggttaattctttcgattgattagcgaatttatttgaaaatccccattaatcttgaatatctctgattatgaaaattcaaatccatttacttaaaccatatgagaatgtaaaatggtgcttctttggatagtatatgttttattgaattttgtacaacaagcttgtccctttgttccgattcttgacttatactgactgacttgtgcatgcatatatacaaaacaacagttagagatacttaacttttcgtacaaccagcgtgtgataatgtcttttaaaagtgaagcaaaaacaatacaactaacgtgttatataacatgtgacacgataaaaatattattgtaaattacataactatttgattcatatatgaagtatgacccttgttataacatcatttatcgttagcatgtatttgatttttactacacgaaatacgcaagtaaataaacagtttctttttaaagtaaaagctatctcgcttatagctttttttctttcttaagaatacaatatgaaaactcaaaaaaactaactcttgtaaaaagaaaaagaaaaaatccagagaaactaagagctcaaaccctaaaaaacattttattgtattaaataaaacaagttattatcattaatcgcacacatgcaagtaaagaaattgttccaaaagagatcatgaaaccaacaaattcttaaaatatgaaaccttcaaagctatcgagagactctcatcactttacatttatcaggcgggacatttgaatccaggtggtggattttttccacaattaaggagaacttcaagagctatggggagaatgacgtctatgttgagaagtttagctttaatagtggtacataaacaaacggctgcgtctagatcaactaaaccttcaacaactggacaacacttttccttggcgcttttcccaattccaatgtgaaccaaacctccaagaaggtcaacacacgagcctagcttcaacgtgtcaattgggcaagttttcggcatagttgtaggtggcgttgcgatgggtgtttttgcgattggaggagttgcaattggtgaacttgcaacaggtggctttgtcataggtggggttgcaacaggcgacttagcgataggtggagttgctacgggtggtgtggcaacgggtggccgtgcgccgggtggctttgcgattggaggagttgcaacaggtggagttacggtgggtggtgttgcaaccggtggttttgcaacaggcggagttgcaggtggcggcgttgcaacaggtggttttgctataggagaagtagcaacaggtggagttgcggttggtggtgtcgcaactggtggttttgcaataggaggagtaccaataggcggcggcgcgattggtgactttgcgatgggtggagttgcaataggcggtgtcacaataggtggttttacgatgggaggagttgctacaggtggagttgtaactggtggttttgccacgggcggagtttcaataggcgacgttgcgactggtggctttgcgataggaggagttgctactggtggagttgcaaccggcggttttgtgattggaggagttgcgactggtggttttatgattggaggtgttgcaattggtggacttgcaactggtggctttgccatgggcggggttgcaacaggcggcttaccgataggtggagttgctattgatggcattgcggtggggggtgttgcaattggtggctttgcaataggtgactttgcgataggaggatttgcaacaggtggatttgcggtgggtggtgttgcaattggtggttttgcaatgggcgtagttgcaacaggcggtgttgcgataggtggctttgcgataggaggagtagaaacaggtggagttgcgatcggtgattttgcaataggaggagttacgataggaggcggcgtaacgattggtggcattgcggtaggtggatttgttactggtggtgttgcaaccggtggttttgtaatgggaggtatagcaaccggtggttttacaacaggaggaattgcaacaggtggagttgcggttggaggtgttgcggtgggcgatgtttcaactggtggttttgcaataggtggcagtacagtgggcggttttgcgattggcggtgttgcaaccggcggtttttctacaggtggatttgctataggtggagttgcaacaggcggttttgcggtaggtggagttgctattggtggcattgcaacaggtggagttgcggtgggcggtgttgtcgttggaggttttgcaataggaggagttgcaactggtgaagttgcggtgggcggtgttacaaccggtggtgttgcaataggagaagttgcaataggtggagttgcggtgggcggtgttgcaactggcggttttgcgacgggtggagttgctattggtggaattgcaacaggcggttttgcgggtggtggagtttttataggtggtattgcaactggtggttttgcaacaggagaagttgcaattggtggtgttgcggtgggcggtgttgcaactggcggttttgcgatgggtggagttgctattggtggagttgcaacaggaggttttgcgggtggtggagttgtgataggtggtgttgcggctggtggtgttgcaactggtggttttgaaataggaggagttaagattggtggctttgcggtaggtggagttgctattggtggtgttgcaaccggtggttttgcaacaggtggagttgcggtgggcggtgctgtagtgggtggtgttgcaactggtggttttgcaataggaggagttgcaactggtggtgtcgcggtgggcggtgttgcaaccggtgattttgcaataggaggagttgcaataggtggtgttgcggtgggcggtgttacaactgggggttttgcgacgggtggaattgctatcggtggagttgcaataggcggttttgcggtaggtggagttgctattggtggcattgcaacaggtggagttgcagtaggcggtattgtcgttggaggttttgcaataggaggagttgcaactggtggagttgcggtgggcggtgttacaaccggtggtgttgcaataggaggagttgcaataggtggagttgcggtgggcggtgttgcaactggcggttttgcgacgggtggagttgctattggtggaattgcaacaggcggttttgcaggtggtggagtttttataggtggtgttgcaactggtggttttgcaacaggagaagttgcaattggtggtgttgcggtgggcggtgttgcaactggcggttttgcgatgggtggagttgctattggtggagttgcaacaggaggttttgcgggtggtggagttgtgataggtggtgttgcggctggtggtgttgcaactggtgattttgaaataggaggagttgagattggtggctttgcggtaggtggagttgctattggtggtgttgcaaccggtggttttgcaacaggtggagttgcggtgggcggtgttgtagttggtggtgttacaactggtggttttgcaataggaggagttgcaactggtggtgtcgcggtgggcggtgttgcaaccggtgattttgcaataggaggagttgcaataggtggtgttgcggtgggcggtgttacaactgggggttttgcgacgggtggaattgctaacggtggagttgcaacaggtggttttactggtgttggagttgttataggtggtgttgcggctggtggtgttgcaactggtggttttgaaataggaggagttgagattggtggctttgcggtaggtggagttgctattggtggtgtttcaactggtggttttgcaacaggtggagttgcggtgggcggtgttgtagtgggtggtgttgcaaccggtggtttttcaataggaggagttgcaactggtggagtcgcagtgggcggtgttgcaattggcgattttgcgatgggtggagttgcaacaggtggttttgcgggtggtggagtttttattggtgatgttgcggttggtggtgttgcaactggtgattctgaaataggaggagttgagataggtgattttgaggtaggtggagttgctattggtggtgttgcaacaggtggagttgcggtgggcggtgttgcaactggtggctgtgcaattggagtgacgggtggagttactattggtgaaattgcaacaggcggttttgcgggtggtagagttgttattggtggtgttgcggctggtggtgttgcggctggtggtgttgaaataggaggagttgcgataggtggttttgcaatgggaggagtggtagtaggcggtgtagtaacaggcggctttgatattggaggatttgttataggaggagctgctactggaggagttgctataggtggcattatgataggtgggtttgcgatgggaggtgttgtgataggaggtgttgcaacaggtggaattgtaatgggcggtgttgcagtaggtggggttgcaataggcggtgttgcgacgggcgatttggcgatgggaggtgttgcgataggaggcatttgagtgggaggagttgccattggtggtgaggcaacgggtggtgttggtgtgcacggtggaggcttgtgggtagggggttggggagtagacggaggagggttggtcgtaggaggtttaggagttgatggtggaggtttgacggagggtggtttcggaggaggttttatggtgggaggttttgggtggggatgatgtttggtggggggtttagggtggggatgaggttttgtcgggggtttagggtgagggtgtggtttgacgttgggtggtttagggtggggacgaggtttagggtgaggaggtggtttgatggtgggtggtttagggtggggatgaggtttggtaggtggtttagggtggggatgaggtttggtagggggtttagggtgagggtgtggtttgacggtgggtggtttagggtgggggtgtcgtttaggcggaggaggttttatagtgggaggtttcgggtggggatgtggtttaaccgccggtggtttaggtgggacgacagaatgttttggtggtttgtgaggcttaggtgatggttttggagggctacattcacgagcgtatgtggcagcaaagaagttaagaaggaggagaatgagaaaggagaggtttctggtgcgaaaccccatttttgagaagtagtggagttcagtgagtaagtaggaatacagatgcgaatgttcccatttatagaaaaagattctatgatatttttgttcgtatcatattgcaaggaaaaattgagattttcttttgttttgttttgtttttcttttctttttgacagacaaggaaaatttgagattacgtgattgagatttgatttgattaaagcgcgaatcaggtcacttaattactacaagacaataaaggtttttgtcgggctttcctaaattggcgtatattatgtgttgtagattcttatcttttttaggaaaattaggaacaacatactctatttagattgattatgactcattagtttttggttaacggttgaacatatttcagaatattatcattcctaaaaaattgttcaacgatctccactgttcttgaaatcatggtctaaaaagtgcaatctaggttacaagtctatcataaaagcaaagctttaaatcagagaaatgtccccgcatattattatcaagctctaggctattaacctagtctgtaaacttttagaagtcactaacttaacctttgctatatgatgatcgacataaaataaaaaaaatttggacgtagtcatattttgtaatttttttttttttgaaacagtagtttgtaattattgggtgaaaacgatggaagcaactgagcaagcagaggtttttgtagggttaaggccagtgtactgtataaaagaatgttatcattattatttgacttaagaggcatcgcccattctatatttttagtcgcaagatatgattaagcacatcattttctcttttaggtccacttttcttataagggttttgggtgttagtttgtgtctctacctatagaaatggagaatcaattttgagtagactcaaatctatgatatataaacctatagatttgtatatattggttgataaatatagaaccatgttgcgatgtttcagtggcaaccagctagataaatctgtttataggtgaaagtttcactaattgatgaaacaaatcctctataataaatttctgactgttgaagttttgtatattttgatctaatgatgaaaaccaatcaatctctaggagtaaactggactagtttgtggtaattgagtcttgaatcaaattaacgattttgcagttaaaagtgaaatcaaggaggttgttcgtttgtttctataaccagagcaagaattgatctttagggttgttggcgtgagatcaagcttgtggaatatctgtaactctgaaactagtgaattgctagtgttgacgactgtgttgtcgagccgacgtataggctttcccacatctagaatctaactcgtaaacgtgatcactcgatcgctcgtatacattattctttttcttctttctcacaattcatttttcaagttcttccgtatgatttcatgaatgggagcatgattgattgtaagaaagagatcaagaagcacaagttgaccaagttctgtggcattaacgaatccaagtgtacaacatgttaaaccagtttgttaggtttccagtggttactataactttgtttacaaataaaagttacactaattgatgatatattatattagtgtcttgagttacaacaataattttatgatcaaaatattatctcgaaagaacgtattaggatacattcaaaactaaagataaataaaattatacactctataagggttaagagttaatccattcataatcagttgattttgacttggaatcacataaaacttcacatttaccttccaattcattttaataatacggttcaatactaatatcagagctattaacccttgagataaaatcataaaacaaagtatcgtttgtttgtgtttgtttaacatgcatgtgaaactttattaatggaaataatgaaaagagtgaagaaggtgaataaagagagtggaatataaaacttgatcattggaatttagctttttaggattttagctaacatatatatctgccgacctgttcgaagtttttgggatccaaatgaaaataacatcttcaaatctgtccttccgaaataaatttatggacgcggttacaaggtggcgagtacgattcggcatatagttagaatagtgtaacccgtgaagtatatcacttttaggatttaattttccttaaaaaaacattaaagagagaaatggataatgtgaattttgtgaatgactctcgtgcagtgcatgtgactccaccattcatatctttgattcctccccaaaccgcgacaagaattaaataaaactagtggtcggagtactcatgagtacttgtcgtttagacacgtcggtccatcaccaccagaagagagcaaaaaactagaacatcagacaacgatcatcgtttggatgttttcgttccacttctaatatgttgccgacttgccatttacaagtcttaacaaagaagatttaatggcaacctgttgtgatcaaatatattggtttaatttggtccttagcgatttcagatatttttggctagacagaagttccctagcctaagaatggttaatccatgttatgattaatcgtatcttctttaggttcgaagtttcgtatgaaaaaaggatagttcgaagcttgtaaagactattttcatactatactatacgtatttaatcattttaatggtcaaattatacgtgtggttgtgttctaaaacattaattattagaatagtaatgtaacacataaccaaaagatagctagactagctagtggtgagagttagacccctctaaaaagtgcgtattctagttttcctaatttgattcttggtggagagaagttatttagttatatgtataaccaagagatgtgtatgtggttggacgacaagaacttctcgattaacaataagaagtaagttaacacatatatataaaacactttaaacataactatcataataagcatttaaaaaaagaatatcatcaaaatactcatacgttgaaattaactatttctttagttataaaaagtgaatcttagccacaaaataattaaagctattgacgtgtgtgtatgaagaagtgatatttctaatctataaaattgcgagggtacatgagataatactttaaaaaaaggtatcagtatttaaatatattttcttacaaaatttgtttcttctcaaacattattttatattccaattaaaatttaacagaaccaatccaattaatttctaattgattgaatcagtttttgaactagtttatatttttttaagttgaaaaatggatatttttctaactaaatttaatagagagggaatttactctgctacgttttctacgtatatatgattgtgaaggttttgggattatgcagtgcagaatacattattgtacttccaacattttataataattatcgtttccctatgtttttcacacaaattaaaaagtagaaggtttctataatacctctgcagaaaaagttgacttttgattctattttattttaagctaaattttatctttaaatattcaaaattacgttggttttgaaaattgaaaataatgatataattgtgacttaaattaaaatatacaaaatttagtgattattattttgtaaatttagttattatatacaaaatatatatttatctatcagttttactgatcttttgtcttatctcttagtattattgatttcgagacgtcaactgcaagcctccccaaaaaatcaaatttataacatatcgtttagcgcctaaagacgtcaaagaaacgttactattaaaatatactccgaatattatattgttgcacaaaaatatcagaactctaaaattccgtgacatgattttatgtcaacaaatcatctattatttcttatcatttttgcagatgatcctttctcgtatagtgattattttctgctatatcctatctgaatttgaattttattaattatgcaatatttagttatttagtattgacacataattatttagtatttctcttaatcataacgttgtaatgttgtaaaattccagtggctgttggctgaattatcttatagctatcccgtgaatagatttccatcacaaaagtaacatatacacgttattgaacttatagttttgtcacaatccatgtgtttcatctcatatatatgaaaacaatacatatatacactgtttgatgacaaaaacaaagaaaatacaatattgtagttcatgttgaacaagtgaatgtagttcacacttgcaaaaaagaaacgcatgcgtataaataatacatgtatgtggagcctataatcactatgcatgcacgataacatatagtacacattctgtcattgtatatacatacgaatacgatcattcatctcactataaataataattgacaaatcacgtacgattcactctgacaaaatcaaacgcataatacacaagagtctttttttttgctaaatatctttctcttcctagctaaggatatttttcccaatacttagactatatatgtaaagtcaatagaacctgaactaaattgcactattacattaccggttctttgtgttatatatatattaaaaaaagaaaaaaaaaaaaaaacattaccggttctatttactatacataggatgagtttgggcttcttaaagcccattaatagggcaatttatgggcatcctagaggcccataatagacggatagaggcccaaacaaaatctttgaatacatatataaaaaacaaattatgtgttctcggcaaaaattggaattttgcggataatgtaggataaattttcgtaaagatgaatggaaaaaactaacaaaacgaactctttatcactgaaccttaaaaagatgataacatagagagatagagagaagaaaacagagccaataaaggctcttcctttttcttcttcttcttcttcttcatcttctcaatggctggatcagctctacctctaccacctcctccaccactatcattacaatctccgtcacaaaatcaaacccgtcattcttctaccttttctccaccaacccttactcctcaaacaccttctatccgttcccgtcttagcaaaatctgtcaagatggaaacccacaacttgcacgccaattgttcgacgcaattcctaaaccaactactgttctttggaacactatcatcatcgggtttatttgtaataatctaccacacgaagctcttcttttctattcccggatgaaaaagacggcaccttttactaattgtgatgcttatacttactcttctacactcaaggcgtgtgctgagactaagaatttgaaagctggtaaagctgtgcattgtcatttgatccgttgtttacagaattcaagcagagttgtgcataattctttgatgaatatgtatgtttcttgtttgaatgctcctgattgttttgagtatgatgttgtgcgtaaagttttcgataatatgcgtaggaagaatgttgtcgcttggaatactttgatttcttggtatgtgaaaacagggagaaatgctgaagcttgtaggcaatttgggataatgatgagaatggaggtaaaaccgagcccggttagctttgttaatgtttttcctgcggtgtcgatttcgagaagcattaagaaagctaacgttttttatggtttgatgcttaaattgggagatgaatatgtgaaggacttgtttgtggttagttcggctatttctatgtatgctgagcttggtgatattgagtcatcaaggagagtgtttgattcttgtgttgagagaaacatcgaggtttggaatacaatgataggtgtttatgttcagaatgattgtctggttgaaagtattgagctttttcttgaagcgataggatcgaaagagattgtgtctgatgaagtaacgtacctcttggcagcgagtgctgtttcagcgttgcagcaagtagaactaggcaggcagtttcatggttttgtgagcaagaactttcgagagctaccgattgtgattgttaactcgttgatggtgatgtactcaaggtgtggttctgtgcacaagtcatttggagtctttctttccatgcgagagagagatgttgtatcgtggaacactatgatctctgcatttgtccaaaatggcttagatgatgaaggattgatgctggtttacgagatgcagaagcaagggtttaagattgattacataactgtgacagctttgctttcggctgcatcaaatcttagaaacaaggagatcgggaagcagactcacgctttccttatcaggcaagggattcagttcgagggaatgaacagttaccttatcgacatgtattctaagtcaggtctaattaggatatcacagaagctttttgaaggaagtggttatgctgaaagagatcaggctacttggaattctatgatttccgggtacacgcagaatggacacacagagaaaacgtttctagtgttcaggaagatgttagaacagaatatacgacccaatgcggtaactgtggcatcaattctccctgcttgtagccaaataggtagtgttgacttgggtaaacagctccatggtttctctatcaggcaatacttggatcagaacgtatttgtggcttctgcgttagtagatatgtattcaaaggcaggagcaataaagtatgcagaagacatgttttctcaaacgaaagagagaaattctgtgacatacaccacgatgatactggggtatggccaacatggaatgggcgagagagctatctcgctgtttctctcaatgcaagagtcgggaatcaaacccgatgctataacctttgttgcagtgttatcagcttgcagctattcaggtctaatagatgaaggtctcaaaatattcgaggaaatgagagaagtttataacattcagccttcaagtgagcactattgctgcattacagatatgttggggagagttgggcgggtgaatgaagcctacgagtttgttaaaggacttggtgaagaagggaacatagctgagctatggggttcactactcgggtcttgtaaactacacggtgagcttgagcttgctgaaactgtttcggagaggttggctaaatttgataaagggaagaacttttccgggtatgaggttttgctctcgaatatgtatgctgaggaacaaaaatggaagagcgttgataaggtgaggagaggaatgagagaaaaaggtttaaagaaagaagttggtcgtagtgggattgaaattgcaggttacgtcaactgttttgtgtctagagatcaagagcatcctcattctagtgagatttatgatgtaatcgacggtttggctaaagatatgagaggcgattcgtttctgacaacattgccaactgttactccaagtttggaattggatgagtgaagagtgccagtaactctttagctctcacagaacatggagataaaagcaagaggtgattcaaggccttaaaaagtgagtaagccttcaaaaactctcatttctttgctttctgaagcttttttgttggtgacatagaagcaactctttatggtgataaacactcttgttcatcattgtcttcagtaattgttctaacaccattagtcatgactggaatcgaaactcgacccgacaggagatggagatttaaacccattgtgcagtttggtctttgtatacactattacaagctaatcataaagaaggcagaggagaaactggaaacaaagaaatgtagataaaccaacatcattgtagtttccttgctctcatcttcactctaggcatcttctcgtgtatacttaaagttttaaatattataattattttcattttttcataatttaaaatctttaaacaaatgatgaatggaattggatttttattttttgtacaaaacaaaaataaatttatataacaaaatcattgcctaattatataaaaagtgattataaacagcaaaattattgcctaattaaataaagaaaattaaaaataatggcctaatttaaacatagagtttttacaattttattttatttatatacacattttaatgtggtggaagagcctatattttgatttacacatgtgatttatagtcaaataccaaatgaggagtttgaaaattacatgaccatctaaaaactagagtacaaccactagtccaccactacataaacttataagaaatatctatatacaaaagtacatgcatttttgatacaactactctaaaaactggtagttgaaagaattttagaaagttcaattcaaaccaacaatgtgtttccaatcacttgctagtctaattgttaaacaggtattttaaagcttttcaatataattttcataagttaattttacatgatacataaacattataatttatcaaaatattagtattactgaacttgaatgaactttatatttctgtacatattgttttttactaatttattaaatttaatttttttttttgctaataatgtaaatattcattgatgatgaaattagaaaattaattcattttgtagaatacatgaactcatttgaaacatgaacattactgatgtggagtagtgatatataatttagttacaacatacgaatctttaaagataaagattcttagtctttaaaaatgttttgtaagtggttattgaactcaaaatgtaaacttaagaaatgcaaaataaagtgaaatttcactgtaagggggtatatatataggacccacaatgtgttgagattcatcccctcttcccaatccatttcttactcattttttgtcatattgtcaatttattattcctttatattatttatatctttatcatctacaagaaacacgactacggcatgctaaattattctctttcgtttaatttgtggacttatcgtaagaatctaaaatctaaagacaaatgccaaagaaaaaaaaaaaaaaatctaaagacatatactcataagttatccattgtgaatgcgaggctttggtttatttgccaaactctatattacatcgatcgattttacgtcaaagacccgtctcagtctaaatcataaatacaaattacaatcataatcaatattaggtcgagggatttaaaggaaaagaaaaaaaacgataacgtaagaatctagacatgttggtagcctaacttcaccaaaacactatatatctccttgtttccgaacgaaaggcaagtttggttttctatatgatccaatagactaattttctccatattttactgttaaagattattctggtccctcaatatattttagtaagtttcagaatttaaagccgaataatttgtgaaaaggaaatggctaatcactgtttttctttcgacaagtcatatgaaaatatattgtgcggtgccatgagaaaaagttacattataaagctcgatattctcaattattgcactaatttggtaaagttacattcacattaatttcatgtatctgaaactattctatccaataagaatacaaaactttgagataagctaattgccaatttcctccattttatgcacgttttatatgcattctttgactaatgtatgagaattatatctttgcacatgcacttgagaacttcacgtgaaaatgtttgatttcttgtatatgtgattgtgttctagttttaattgaactttaagtctaataaattattagaagtataaattccatctaatctatgaataataatttattttcttgagattaaaaaaatataaggatttgtttggaaaacatttttatttatttttctaatcgacaatttgcagtttgaaaatgcaagcatgcaacttcagcattgaattatatgcctatttaggtccatgataacgccataattaaataaaaaacttatgctaaaaacctaaaacaaagataaaatctccaaatatgaaagaaaaaaacttaaatatacaaaaagtcaaagttttcattctatgacaaagaaagtcagtacctaacatttctgcctttatgcgaaaaccaaaaaaaaaaaattcaaaaagaatccaatcgttttctcattgcaacctcgaagaagaagaattactattcgtagcctcctttgacgacggagcagaacctcctccaccagaaccatccaccgtcccaaacacaccggaaaccatcgtattagggttgttcatgttactatatccaaccacgggattcacgttgttcaaagaaaacatgtaaggccgttgcggtggctgaagcggcgcgtgaggctggaaattatattgccaaggagcttgttgagaagatccagctgatggatccgacgatgaagtgaggctaaaagcagaagtagtattaccggacccgaaagccatagcggatggaccgccagtgtattgctgaaccatggcacggaagttggaagtgtcggtgttgagaagcgttgttggtgttctacgtgaggctctggaccttctacgtgttggcttggttacacggccagtttctggactcagacgagagtctatggaggtggtatcaccggcagtggtggttgtaacagcggttgaagcggtggtagaagttgtgaagaaggtttggttattgttgtagaactgagaccactcgttggggttagccatttttgtgtgtgtctaaagacaagactccgtgagattgtaagaaagaaaaaagcatttgccttcgttagttctttatatatttatttgattgtgttttgattaagacttagtcaaaggaaagactattctatatcaatcctgaccgttgatatttaattacacgttgattttttggctttacatttcattcttaattgccaaaaaaaaaaggttgtaactattttacgtactttattaatacaatgtttaatttgattcgataatatcatgatttggaaaataataaaataatagacctcacgaagttacaattagttgagtcttaccaataaactagagtttagtttggtattggctactttcccaacaagttgacgaaattggcccatttcactgtatttgtatgcttttgttgaaatacttaacaagtccctcactttacataatcgtcacaaagctgacggcatatacatttcttaacgaaacgttaagatattcataataacgttgcttcttgcctgcttagtgcttagtgtagtagccgttctatatagcacactaggtacttaatatgcttagtgtagtagccatattatatggcacgaattaaataacgacggtcgtacgataataacgacatgacatttgctatatattatacatgggtatcatatttaaatatcgacgtaaataaaatatgatacactctcggctgtgattgtatatattgcgaaccaatatatccgtttctttgaagatcgttgcgacatgaaccaaaagaagattgtgaaggcaaatctttctctgcttccaaatattgttgattacaacttgtggaaccactttcttaaaagaagcaattgggagatctctttgtatttgtcattgttcaagccgattattaaggaatattatctatgtatgatcatagatagtcaagacattagaaggtcattaacaaaaagattcaagagcttggtagctagctaagaatagttgtaaccatatgatgttaagaaaagtgtttgtattatcaaatttcgtaggaaattcaagatatgtcatgtgaagtttcttatacccttgagggctattaattagttaagataatgattctttaaatctagtgtggttaataaactaaagaaagattagttactactagtattttcataatgtgtatgtatcatttacgtaatttattaagaatgagtggacacaaattaattgactggttaggtgactttggaatgaaaagacgaccgaaaaggaaactagtgagaaatttcaaagaaaaccataatctgattctgacgttgcgatgcgtaataggaactacatcatccttctctttcttctgtttgttacaaattctgcatccatcaaatatataatagacatgtaaagagggagagtactttccatggaaattttgttatgaactaaaactttgtaaagtttagggtgtattgaaaaaatcgatacttttataaacgaaatataggataaggattagtttacgtttataaattcgagataagggatttaattttattcttacactaataaaagcggttttgtggtagagaaaaaaatctaaaaaaaaggttgtgtagtatagaaaaagaacattaattttgtttttttttctctaccacacaaccccttttattagtgtaagaataagattaaattttttattttagaatttataaacataaactattccttattttatatttcgtttttaaacgaaatctctttattcacattaaatataagagttgtgtgcattgttttcctagggattcataaaacaacaacctaagaaagggatttcgtttgacagacatttgataatgtctatgtatgaataaaatatgaggtgttttgttggatcaattatgggattgacacaaaaaactttatcctattgttggatgcggcattttttaaagtgattacaagattgagtactttatttccttttgattatctattttacctttttcaatttagcaagtagcaatatgcacttttaatttgcaaactgaatctagatcgcaaatttgtcatccgagaggaatgcatatttgattttcgatctgaagattgcccaccaaaaacaccaattagatgatatttacagaagaatcgagattcttttagttaatttaggattgtttaaaaaaaaatatgcatgtatgcacaataccaaaaccgaaaattcccttataaatccgtgaaatttgttgtttgggttctctatatactatcaccttagggtttaattttcgtgattaaaaacgattgaaattttctggaaaaataaaggaagaaaatcaacaaagagaagaagaaacgaagatgaacaacgaagaagaagaacagacagaggcaaaatagtccatttatatatcagcaagtacccattttcgtaagccaattaaaaatgttccttttttctaatttttgggctaaaaagtacccaaattaacaaaagccccgtgttttgttatttaccaaaacatctcagattttaagtacattttaattaagggtttatgagtacaattgtacgatctttaaggatttagagtatagactttctttttttaacttaaggcagcaaaacgtgtcatatcggacctaatgtatcgaatgtttgtgaagtgtttaaaaaaaaaaaaaacactatgtttgaatgtagggaatgacctagaaattagaataagtttttacatgtgaccagaatttttttggaacaataaacgaaaaatgagtctcaattgcaagagagtcttgcttgatatgtaagaaaaaaagcattttccttaggccactaaaaaataatcaaataaaacgccacattttttttctacatatatcacatttttaatgtgttttaggactttattttgaaaacaaaattcatctctttaacatttatagaaatttttgtttgtttttttacattaaattactaaatcgtatttattcattaatgttttttttaataacagtatttaaataatttcttctatacaaaatagaatgttaggccacattttaataatttgcctaaaagctctatttgccaaaagaagagaaaaattgtttatgattactcaaaaataataataataaatttatgatccttctctgattttaaagaattttatatttatactatgtaaccctctctcctctcttcaacaagattcaaaccgccaatagcataccacaattttgtttgtaatttgggcaagattaatcacaagatacaaatttgagaaacctaatcaagagaattaacaagagtttacaaatagagaatattcttgtaacactgtttcttcacctcttaaatcgaacagtcaaatgatcaaacatatgatcatcagaactaatacaaacaatattaacagaatcgaatctctgagaataaaggcgaaacaatacaacatcctatttttaacacttgagaagataaaacagagctttggctcatgttctgttccaaacctaaccgcgtcctagtgctcgttggcttttgttctccgagatttgaatctttcatccacagactgacgactcttaagatttgattcgtggttaacttatagttttgtttacgagtgtctagacgcgtcctcatgcaactgcgtagtcctcacattaggatcatcctgcacagaaatcaccatgaactaagatgaccaattgatacaaacaggaaaaagaaagatcttttattacaactgcaatagttacccggatgtcgtaagaaaaattggcaggcctgaagaaatctactccctagaaagaacaaagtaagattttacttttttggcagtcttgttacaagattgacaaaacttatgaaagcattgagaataggtatgtaggtacctgtccatggatgccttgctgaggaccgtagtaactgtcgtagcttggtgctatcgagttcaactgtcgctacagaaaaccagccggaattgtttttttatccaaagttaatgaaatagaaaacagcagaagctacttatacacatgtcatggtcgatttcataccaatccttgcattgtttgttgattcccatagaaattatcgcgagttggccccattaagttcagctggacctgtaaaaacacatatcaaaacagattacatacgtatctagataataatatgaacgtatgttgtgcttaattaccattccttgtacgctctgctgtgttccataatagctttcaatgccaaccgtccttgggctcagcttatcctgcaattacaaaattcagatatgacatacttaggcgacttgtgtttaaaagaggcttgccacgacatgtcaacaaagacagaccatctgttgcaagctttctggcgctgcaactggcataacatcctgctctgggttcacctgaaattagtatttggtatcatcaaatttgcaaagcataaaagcgcaaagcgaacaaaatccataagctgtctgcacagagagatcgtaaacaagtaagttacttttcttttcttagttggattctttttcttgctggttttgcctgcacttctgctatggttgtcctcctccacagaaatcagaccttgagttggtgacgttacaacatctggaagacttctgccggaagtattaataccagcacagtttcctatagctccttcaatagcaaggaatgcaatattgtaactctcttgagagagggatgcctcttcattcagctttaatgctcgttcgcacaaatcgttataccgcagcagcctagtctgcaactgctgaggttctcctgaaaaatgccggctttttgcatcttttgtccaccgcttcaatatgtactgcgaggggatggaagaaagatgacaacactgaagaacattaagagtgtgtctgcagagataccctttatactcaaataaccgacagatgcaagagacttcagcctttgtttggttccatgttaccatgaagtcttggttgttttcaaaatcctgcactctaaaagtagaacatgtggcatctcggttctcctccctaggactacacgcaatcgcacccaaaacttcaatctggaactttttgaaaactgcaggagtatagacttcagaaacactcttctcaaatggcgatggagacttcattgctggctgcttgttccacatttcagaatcagctttggcttcttcttcacatctatcttgcaaaactgtatcatatacctttacaaattcttgtacactagtcttcttatgcatatacttgtcgaagaaagcattaatactatcagctcgttgagatgtagacatcccagccaaaagaacatcagtcatgtaggttggtgcccatttcttgcggtcttcatataaagaaatcatccattgatcatctttgaggccgaatctagcaagattcttataccattttctcgcaaagtcttcatctttccctgatttatagatgcacttctcaaacttaggcataaaattatcatgttgcttaacaacttgaccaagattctcagaaaccttcatcaatacatgccaaagaaaaaggcaatgccgtgtattggggaagatttcgggaacaatggagttcattacaacgtctagctcagtgatcaaaacctttggagcttgtccaccgattgctctcagccaggtctccattaaccaagaatatgttgctgcactctcatcggatattaaggcgcacccaaggaccatatactggtagtgctggttcactccaacaaaaatagcaagtggcatcttgtacttgtttcttacgtaggtggtgtctagagaaacaacatcacaaaaactgccatagttatgcctgctctttgcatctacccaaaatacattcttcactcgctgatcatcgcccagatctactgcataaaagaagttggaattcaaggattgcatccgtgacaagaagtcaagcaggattttgaaatcccctgtttccactgataaagtccgacctttttcaaaagaacttttcgaatcgctttttagacttataacagttttgtactcagcaaactgcttagccattgcagcatatatctttctggtctgttcactcacagcttgtgcaggtaaaagctcatgattatgctccctcacaaagctgtgaattacccatttcccatccggccttctcttaacatgcatactagctttgcaatcggttttcgcacatgttctcctaccagccatattctctggatcttgcttactttgtctagctcgtggccgattaaaagatttgtcatattctcttttagtaccatacctagagcaagcaaacttcgcatcaataaactctcttgtagttttcgatctacgactgttctgtatcgcagtgttaaaccccatagctcgagaatactcctggtaaaacgaatacgcttcaccgtgtgactcaaactccataccattaagaggttcaagattcataccctcagtgtactcaaccaactccccagttggaacacccatgcctacactgtcatcagtattaacctcaacagaaacatcctcaattttgccaatatccatatcttcttcattgtgtaacacattatcaagtcctctatcctcatcatctcctttgcaaaggtcacctgaatgtagtcgaagatctatatccatgacaaacctatagtctcaggcaaaacaaacgtcttacaacactgcaagacaaaatctaggtctcagtacatatatctaggtcaaaatgtatactaaagtcacacacaaaagatgtaacaaaccagagaaacccatcaaaattcaatctttctatgatgataaatcgagaaagtatacacattttgcccttacaattgcagaaaaaagcaacttgcagctaaattcttagtgggtatttcatcacataaacgaaatcctcaaatccaattcctaaaacgaagctgatcaaaactactgtataacccaatcatttgtgttggttatcactataaaacaaaaacaaaaaataaaaatgaaaactttacctcgtacgaaacagaagatatacgaatcggagcagaaactgagaaaaggccgtctctttttaatctcttcgtcgtcgagaggaggaagaagaagaagacaacacgcgccaatcgggtgcgagttggggtatcgatctgcgaaaaggagatagagaagaagaagagagaaagagaagaaaaattggtgagtggtgttcacgcgatctgaggaagcgagtgggcggaagatccacgattcgttcttttggtgtctagggtttcttcttcttcttctctctgtctaaacgcatcaccatgttttttgataataataatatctctatccatttatttatgttattaataaaataaaattagaaagaaaaaaaaaaactgtttttgtttgaaattttgtgcaacgcgcatgccaaaacaaaaattggagggaagcgtgaataatgggaatgatgagatttacttacatctataagagtagacttgtttaggcttttaaaatttgtttggtccactctaagactaagacttgtttgaattattttattttgtatttctaagtatttactatggtgaaaactgaaacattacggtgaattacaaaaaaaaatcatagtaaactattcaaaatatttttttgttatttacaaactatcagttttgaatttggactatatatatatatatatattagtaaatgcttttaccaactttcaatagccaagagccaattggtatgactatttcagaattggattaatttattatatttgatccaaaataaaaagatcaatagccgtccaaaaaaataaataaatcaatagccactcattagcatgagtcactgttctttttaattttgtacatatagattagctcagtcttaaaaaccatagttataattagtcccactaatgttaaaaagtttggtaaaaaaaaaattatttcctaacttttttttacatattagctacaataaaataaataccatttttggaaatattttatgaattcaaaataaatttcataaaatatcataatcaatagccaatagccagttggtaatttactatttccgacatgatttaatttaatacagcatatattttttgacaaaaagccagccaatatcctgaaatttaattataattatgccaaaattatttataataccaaaattatttataattaattatccactaatgtaaaagttgggtcaaccatttggacttaattaagactaaacctgccacagtaacagagagagacgatattttctcagtccctttcccttttcaacgagcaacaacactcttcacttaatcgctccggcggtggcgaacggcaacgtgacggtgacgttgtcggaaaattagagtttgtttatctttgcttattgttgttggagaagaaggtatggtgaggaaacacggttggcaacttcccgctcacactcttcaggtaaaatcgaatgtaacctttctctatagccaaagcttcaatttttcatgaatctgctcaatctaaagtcaccaatggctgtgatttcaattgggttctgtgtatttttcttctcaggtgattgcaattacggtgttttgcttgttggtggtcgctttctatgctttcttcgctccttttgttggaggtcgtatttgggaatacgttttgatcggtgtttactctcccgtggtatgtttaatgcttctcaagctagtagtgtttatgatcagaatcaattttgcaaattcataacgagttttggattccacagctgtgtagtttatggcattgatcttatctgataggttcctttatgtatcgtgtgtgtttttgcaggctattcttgtgtttgttttgtatgttcggtgtactgcaatcaatcctgcggatccgagaatcatgtcgatatttgatacaggcgtgaatggagatggcatggttcgtggcttatcaaggaattatgatgaaactggtagtcagttgcaggcttctccttcggttgtcagtaggagttctaccgtggctggaaactctagtgtgaaaggttctgtagaagatgctcaaagagtggaatctgtaagtagaagatcttgctataatcctctggcagttttctgttatgtgtttgttgtggaagactgccggaaaaaggaagggccggcggaagaacaaggaaacagcgaagaggctctgttttgcacattgtgcaattgtgaggtactaagcttcagaattctacatcaagtctccatggttatatttgtcatgtgtatggtctttaatatgaaaagtaaatgatgtatgagcagttaataataactaaaatttcttggtctttatcttctagaatctgctttaagaagtctttagggaaagcaatttggttcagattttagatgtgtactcaattatgtatgtttcacaggtacgcaagttcagcaagcattgtcgaagttgtgataaatgtgttgattgttttgatcaccattgcaaggtaagctttctgatgtttcaaatgtttgactggattttcatgggtttagttgatgacatagttctaatcattgctacagtggcttaacaattgtgtcggtcgtaaaaactatgtgacttttgtctctctgatgagtgccagtcttctctgggtatgtatttcacctcgtatgtgctatttcttgtacttattttctcactgaaccactaacaggttatgctttctccctcctcagctcattattgaagcagcagttggaattgcagttatagtgcgtgtatttgttaataagcagaccatggaaactgaaattgtcaatagacttggaaatagtttctctcgtgcacctttggcggcagttgttgtaagtattcttggtgttatgccattagtttgagtttagctcctgtcatcaaggttcctaatgccatacctacaaattgcgtagggtctttgcactgctgttgccattttcgcatgttttccactgggtgaacttctctttttccacatgcttctcattaaaaaggtcagtgggaaagaaactagttctgatattagttactctactcataacacggataattttcttactgtaagatatcatggtaagacttttaaaagatagaagtgacaatgctcatcatagtagtgaggttgaacttcggattatttttgtttaactacctattatctatcaattgtgaacttttcttaacactggcagggaattacaacatatgagtatgttgtggcaatgagagccatgagcgaggcgccagatggagcatctgttgacgaggaaattcagaatgtgctctattctcccactgggtctgctacaaccggctttagtggtggaagctctctcggtttaccatacaggggggtctggtgcactccacctagagtgtttgataatcaggtatttttaccttttccgaagcatccaaccattcttgtatcgcatgcctaactcttgtgaaacactgaaactcactagtgttttggttgcaacagataggttatatacctcatatacatcatttgaaagtctagttatccataggatcaatctctaaatataaacttgaaagacaagggtttccacgaaatgcagttaatttttggcatacatgtattgcttaatctgagattatgctcaggtatcaacatgccatttttacactcattatctctatgtaggatgaagtcattcctcatttagacccttgcatggtcccgtcaaccgtagacccagatgcacctggatcagagaaaggcactaaggctctgaaaagacctgtaaaacgtaatgcatggaagcttgcaaagttggatccaaatgaagctgcaagggcagctgccagagccagagcgtcatcatctgtcctaagaccgatagataatcgccatttacctgataatgatcttagttccattggcacagttagtatcatcagtagtgtaagcacagatgcaaatgtggctgcaagtaaagagataaggaacaatgatctaaggtcatctctttctagaaactcgtttgctccaagccaaggtagccgggatgagtatgacacagggagccatggtatgagcaatcttagcagtccaagccatgttcacgagtctgtcacacttgctccactccctcaaaatcctacaatagttggcaatcgcttcactgcaacaagccatcacatgcactcgacctttgatgataaggttctgcacagaggaaacgacgcggatccgctatttctctttgctcctgcaacttctcatctgagggatgtgagaaagacatcagttgtttgggatccagaagctgggagatatgtatcagctcctgtaacaacaacatctgaagtccgcaacagattgctaaatcctagctcacaaacagccagcactcagaatccaagacccattcttccagctcatgattcttcttctggatcatcagcactaagggatcctcttcctctgcaccaagccgagagaagactgacatatacaggtgactctatcttttatggaggccctttgattaatattccgactagagataccccgagaagcggaaggggcttggtaagagatgtacaagacagattggcatcaacagttcatcgagatgcaagaattagaagggattcaacctcaaaccagcttccggtgtttgcccctggaggtcttggggcaaactcccaaaccggttctaacatcaagtagatacactgattgtatttcttgaaaggctctgatcttctacaaaacgtcttcccaattcctggagaggctcattatccatgggttctttgctgtgttgccggaactctatgaggattaaagtttgagtttctgagtcactggaatttgtgcgaagttcccagtcatttttcagtgttagagtaggactaattttcttacaatggatttgagcttcttgtaaacctgaaatgtcatcaatattgattcttccagaaaaccattcatgtaaattcttctttcacttatctctgcattttcatttctagaaaatcgatcactcaaagtattacattatggagaaaatattatcactcttttgaaattaaaaacgtatacaagacaacgtactaaataatcacattgagaacatggtccattttcccagcaaaaactgaaaaggtttgacaaatgtacacctcgagagagttcatataacttaaataataacactacttaccgatacatataagaatccaactccagagagtcatggacaaaaaaaggatggctaacataaataacaacaacaatgaaggcagagagagacgccaatatggcttcattctcttcttgattgatcgatgaaccaagcaactcttttatctgaaaaccactttgtgttctgtttctcccatgatcttatctctttcctctcatcaaaagctgtgtatgtacagaacgatgggagagtgacttgggctgacaattctcaagttacacacttaaacagggctatgcaagcctctgttttattgggtcggagttgcgccttctctggttttgggcagatttttcctccactactttttgagatgctggcgtgagttttcctgctcggttggctttagttgactgagatcctaaggattttcctgctcaagaatattcacgaaatagacttaaaggacaatagggaagaacagattgatttgaggcttggtcaaactctacactggaacttggaagattagataagatttgggtcttgtgggttatacatacttatactaaaacttagccatccaagtatctacattgtggtttgtatctatatgactactgcaaactgattctcttatcgctaccagcatgttgataagactatcgtctcaattataaaactggaaatggaaacatatttcctaggcatagagaaagagagaaagaaagagagaaagaaattataccgctgtttggcagagataatcgttcttttgaagatcgatttggttctcttgatctttctttcggattgctgtgtgatcttggaccagcaccaggtcttgagttaacttctacagcaagatcgtctttagctggctttgacttagccttggataccactggaatgcttgaagatattccaggagaagacgaatcaccatccgactgacacgggccagtcatctgacttgaaacaccggatacaagatttgaagtgtttggcatcttactcacacttttgatctgcgttttaggtacattctcagactgctccatgccgttttcacctaattttgcatcatccctgaggttactgtcaagaaaccggttctcccatggacgcactgccatccatctttccaaccagttccatccccaattgtttttgtcaggttgaaagccactgtgagcagataacagccgagttcctgcctgccactacaagagagcaattctctatgtgagagaaagtaacattatagccacatataaaacaagagaaccagacactattaatggggctaggattaggctaggtggccatcgtaaaaagatacacttaaagagaaataaaatagactgctgcagaagagagttaagaaaaggaaccagacaaaaacaacactttaagtagagagcttcagttttgcaagtcatagtgcgttagttaaaaattggtcctaataaagagaactcatgatttatcagattcactattcagggatgttatttttcgaacaaattgaacaaatacaagcaattacttcttaggcagagtagtaacctggtgagtcaaagcatatgccatcgctctctcacgcttagctgcagcttcctgcctctttagcagcttggcttgaatttgttcaacagatccaatgctatcgcaccaaccttcctgaaagatgataacacatagtcaacatgactgttattaaaggccaaccagaagataaacaaatacaaagtttgtaaacaacttagacaagtgacaggcacctctatttctcgaactcgggcttcatctgctaactgttgttgaagtgtctgctgactcgtctcactttccaattccaaggcgagacgaacacgtcttgcgcgtacacgagcctgaactcttaccaacgcttgcatgcatcgaagcgttacagcagcttgttttctcacagcatgtcctctaacaagggcttgaagtctaaccaatcccttcaacgctcgtaaagccctcctagcctaataaatatatcatcttccttatcaatccactcttctttttaaaaccaatgaactagcatcactaaaccataagtaaagcaacttaataaggcaaattgataccagaaatccccgataagccgtttggatacgcgttgcagcccgattttccctactttgttcgtcataagcaacacccccatatgattgtagtgaagttgaagtagagaccccagtatcaaccatactacgcgtattggaatcttcaaatccatcttgaaacttttcaaagtcaaaatcaactgaattctttctcccaaacctactcttggtagcaaccttcaccttcatcagttaaacaaacacagaaatgaaccaacattggcataattaagacaaaaagaaagaaactcttgtaataatcttcctttgaagtactcacattttcatctttcttggaagacctagacttatcagatttagtaaaaccaaccaatgctttaatccatctccctgaagctcccattctatctcaattccaacgatcagcaacataaaacaacacaaaacctgcaaaattgccaatttagcaactaaattattcaaaacagtaaagctttctcctttttgataacaaaatagacaaaaatggaaactttaattgagttcactaaattctcctgacaatgttggatccttaatattaaaaccaagaaatttagtaatgaacactaacaaaaaatccaaactttgcaaaattgagacacatcgaggagaagcaaaattcaaaaactttacaccggcggcgaaggaaagatcgccgatgagatctttaaagagagtgagtggcgacttcgtgatcttttcttcttcagtcagtgagcgtctttctcggctactttactttttcctctctctctctactctacaaaaagaaaaaggtccatactttattctctctctaggggatatgtgtgtgaacgaacatatacagatagataggaattgacttgattgatcgtttcgttttccctctcctctctcagatacgattgattgaatgatagattagattgcacgccgtacgcgtgctctattcttcaatttggcggcgttttttgacctcgaaacggcacgcagttttagtttgaaatatgtttgattctcttttttaattaatgcatgcatttatgtgtgtaagtcttgtttgcagtctgatattttgaatggagaagacaaaataagttgacgtgtcacctaattatatgatgtcactagtttttgtaatgttggatcattattagtatcttttttaatctaaattaaagataattattattttttcgtttacttttgttagacgtaacaactatcacatggttatgtaataatcttatggaaactcgtatattaaaataatttttactccagtttttcctactatccctccttagaaattgaaatatgccatcaaatttggctactttttctgttagttgggttggcctagttggtgtttttatttagtaaatgaaaaataaaaagataaaaacaaacacacaaagaaaagttattagaatatgtcctacataaaattttatttatgtatagaataatatataaatatatggtaaaatttccacttgaagtaatttttaagtatgagttaggctcatactaatatgctataaacctaaagttttaatgtgtctcgattgtgaaccatatatagatgtccagtcccataaccttaacgtttcagatgtccatttctaaacgcgagggaagaagtgtattaaaatgtgttccacatcgagacataatttttttttcttcaaattggagtgattttttttactatatttctccattttatttatttcagcagaaaatataataaaattttaattgatatttttatggtatggctgctatatacaactagcctcttatttgttttttctttcccttgctactactgcaccagttacaacctattattattatctctgtgagagagcagcaaaatgatttgtttccctttaaaataaaataaatcaaaaataatattaagaaaatgactcaatgacacgtcactggaaaaaatcaaatggaactcgaaaagattaaataaataaaaagatataaggcatcatcatcatcaattcatcatcctctgttttgtaaccaatctcagctctccctctcaaacaatccaggattcttcagattcctctcctttgatcctctctttaacaatctctctctctctgttttcttcgatccgttgtaggagaaaatggtcgttatcaacagtctccgacgcttggcgcgtaccactcaggttcttccacttcttcttactcgcttgatgatctcattattctcacatacatgatcctcgattgcatcatcataattttccccgaatgttttgcttaatagatcaggagtcagaataacattgaatatgccaacaattgtaaataaaaatctaatcttttttcaaaacgccaaattgacgtggatcaggatgaaaaaggtcatgtcttttcgagagtatatacttttctgagattctccagtaatcaaggaacaaactttttctcataaagtggaacaaatctcttgttgtgaatgataatcttcttataacaaagagataaatttgaagaaaattctgtggagatcattatatcctaacccaaaaacagtgatgtgatttatagtgctaatatttttactctaatggcaggttcatttgcacagtaagtatgccacttgcatgtctgggaactccacttccaggaggattttcactactgaggcagcacctgagaagaaaaacactgttgggtgagttattttttaatgcttctaagcgttgtattctgaaggctttatagcgtcgtcaacgagacatgaatagtggtgatgtttttattctgagcaggtctaaagggcatgatatgcttgcaccttttactgctggatggcagagtgctgatttagatcccttggtcattgcaaagtctgaggtacatgtcaaaatctcattttcatagtgtaaatgttgagtcaaacagttgtgtaagtgtgacgtttttcttacagggaagttatgtgtatgatgatactgggaaaaaatatcttgactctctcgctggtttatggtgtactgccttaggtattcttccttctaatactactaaacatgaattgatgtttctttttctgcagtttggtattccttgattctgaccctcattgttaacccaaaaccttgcaggaggaaatgagccaaggcttgtttctgccgctgttgaacagttgaacaccttgccgttttatcactccttttggaaccgtactactaaaccttctctggtactccagactttcccttttggtgtcatttttataatgttttcctacaatttcctgctactctctgtgtcctgttaagactcagagcagtatactttatgagatatcaaagagaatttgagcaatgtgatgttttcatactaaacaggatcttgctaaggttcttttagagatgttcacggccaacaaaatggccaaagcattttttacaagcggtggatcagatgccaacgatacccaggtttccataactatacttcaaaccttgatctcgtattttctaagttttcgacctataagagttgtttatgaatttcctgtatatataatgcaggtcaagctggtttggtattacaataacgcacttggaaggcccgagaagaaaaagtttatcgcgagaaagaaatcgtgagtaatgatttttgcttgtccttttccatttgtctgtttttataagatctcagagtgtttacaaatgcaatgttatcatttcaggtaccatggctccactctaatatcagcaagtttgtccgggtaggataaatattgttcctcatatgttctttctagaagtgctaaagattccttcttttccctaacaaagttagtttgttgttccagccttcccccgctacaccaaaattttgatttacctgcaccatttgtgttgcacacagattgccctcattattggcgttttcatcttccaggtatgaatgatcctcactgccatttcaaacagtaaaagtatctgttattataacctttgaattgcttgttcaggcgaaacggaagaggagttctcaaccagattagccaagaatttagaggatctaatcatcaaagaaggaccagaaactgtaaacttctatagttacttacgaaaattcttgtctttatgctactagcagaaccagattagtctaacagaaagcgtcttcttaatagattggtgcttttatagctgaaccagtcatgggtgctgggggtgtgatacctccacctgctacctactttgaaaaggtcattttcggaaactttgttggtactgatagcatgatattgggctctttttgccgtttcattttgtttatccgagtgtgttttctctttctgtactgcaggttcaagctgttgttaagaaatatgatatcttgttcattgctgatgaggtatgtgcatgtcttattgaaccatgtttaccatcagtccacacaggatcatgaccccaagtatccatcaagaagaagatttatcattatctgtttttattttgtttggtctttaaggtgatatgtgcatttggaaggctcgggacaatgtttggctgtgacaaatacaacattaagccagatcttgtgaccttagctaaggtgagattttgcaagatgattagtagtttttttctgttggcaaatttcccctgacaagttgtaaatgtttccaatatacaggcactgtcttcagcatatatgccgattggagccattcttatgagccaagaagtggcagatgtcataaattctcatagcagcaagctaggtacagtattttggtaatgttcacactggttatattccaatgttctgatcttaatatgctggtgaaaacgtttctatttcaggcgttttctcccatggatttacttattctggtcatccagtttcgtgtgctgtagcaattgaagcgttaaagatatacaagtaagtttgtcactttgcatacaagtgagccagtttttagattgtaatttgccaaaaacatcaaaacctgtcacacagttgactaagtttctcgcttctctattcttactgcacttttttgtgacgatcatattcatattacagggagaggaacataccagagtatgtcgccaaagttgccccaaggtttcaagatggagttaaagcgtttgcctctggtagtcctattattggagaggttaccatttctcttggtcctttacttaccagttttattcaataagaattatttgactgaggacattttgtgatggttatcagacaagaggaacaggtttgattcttgggactgagtttgtagacaataaatctccgaacgaaccatttccaccagaatggggtaaaagaaatcactctcatgaccaaacattaaaaagtctctcttctccaaaactcatttaccatactaatctctacaccattgtttcaattgatgtttacaggtgttggcgcattctttggagccgagtgccagaagcacgggatgttagtccgtgttgcaggtgatggcattttgatgtctccaccgctcattatctcacctgaagagattgatgaggtaaatgtcccaatcttgagacataaatattgctgttgtctgctaaatcttgtgaccaattcactgaaactctctctctctcttttatagttgatttctatctatgggaaagcattgaaggcaacggaagagaaggtaaaagaactcaaggctcagcacaagaagtgaaaagcagagtcaaaatgatgttgatgaaaaatgttttttagattctcaaagtttggatcctttgtttttttttttaacacacaacaagtctttaaataagtacattttaatgaggaataaacaataatgggacaacatctgacgatgtgatcaagatcatctactaaaccaaaaatgcagccatagttaacaataaccaaactcttttgaattgtttatttgtacgaacattgaaaagcaaaacgatcatggatcatggtgatttttggaatcaagatttaggacgttttttgtttgcttctctctttgatcttctctcccttgaacttagagaagtcttgaacccaacttcgttctccgagtcgtacacatctttaaacgatttctgcacacacacacttgattttttcttaaaattatatgtaaaagatcaaaaatgttgagaataaggagtagtttcataacagtgaacctctctgatctcggcaaagctaacggcatagaatgttacgaccgagactgcgacgattccaagaacagggagtgcgatatggcttatcccttccattttcttctcttcttctcagaaccaaactttcaggataaggctcttgaggataataatatctctttatatagatagcatctgaattcaactcttttttttcacttatccttttaaagaatcaagattagcttatgtccaaacaatattatatggacaagagagaaagctttagtaaatatcaatcaacatctctaaaatggtttttgttctcattactgagtaaagaagaagaagaggaagaagaagaagaagagtaactattagtttctgggatacaacttaaagctggtaaagacttctattaataatacaaatcaaaccctaagaaagaatcacaaaatcaaaccctatgatgattacaggaaaaggtgcaagttcaagtgaacagattctccgaataaccgccttcgtaactcgcttccttttcccctttgaatatctcagcatcatcgaaacctgttacgcatttcattcaaaacaccttttaaacaacttctctcatgtttgtcaagatattcacaaaaactaggttctgcaaagcttttacctgaccccaagtcttctgtttcgtcgataacaacagctacttcttctgacctcttaatgaactcgagtgacttccagtctgagcttccatttccttctatacaaacttggtttctcgaaacccagtcttcaagaacttccatgttgctgtgtgataacgggtctaccgtgtcatctccgctgctttcgctgccactagaggaaacagacagagaatccttttaagttctgttttgaacaaaagacagtatagtaatcaagaagatcaaaagattccaacttacattcgtctgaggcgcatgttgtactgaacaaatacaagatcgttgagccgttgtcgctcaatagagttctttgattcatatatttgcgagattgatgtcaggtttctcactgagccaatagatgagctgcatgtctgactcagaatacgtatcgcaaaacgtgacaggttcaagcagctttctccatatgtagaccaccattcagctacaggaatcaaacatgttttaactacttacaaaacacttgaacatatgaaatctttttgagattcaattaataaatggcgtacctggaagcattgtgtcacgagctctgatagctaagttccttccgaaaatcccaacagcattcttgtatgagtttatgtccttaatgacaatatcttgaatgttgacatcagggactaatttctctatgcaatcaacaaccgctaaatggatctcactacgcatttcttcgtcgatgctatagaagaactttgggttcaaatagaaaccagcagcatacaaaggttgctgcaaccaccacctatctataattttccagtacactatgtactcctccctgtgagccagatttgtcttaattgcttcttttgctcgatacattgctgcatagacataccccattgcaggcttcctttcagaacaaactatcctcaaaacacgcaaaatcggagcagttatatggttcgccaatgttaatgccttccagaagtcctcatcattgatagtctcagtcattgctaatccacctgcttccttcgaatacgaacaatcattccactcggatgatgtaaccattgcttgcaaataaggttttagatcagcaattcttcccattgttgtaaaatttgtagcggaactggtacagactggttgcacaatatcattgccaaaagtgaatttcctcatcagattcaaaacaccactgtgattgtaaataattcttgtaacagttcgagcttgttcgataatctctcttatccaatccatcttcccaaactcttcaagcatcttgtctatgcaatgtgcagcacaaggaacccagtatagagaaggatacacatccatcaactttttcccagcagctgcgtaatgatcttcacatttggtaataacttgaacaacattagtatcacctatctcttcaactacctccttaagtaactcatacaacttatcctcagaatctaatatctctgatgcatcaactgatttcagaaacactactttctcaggacagtaaaccaaaaacttaaggatcaaaggtccttcgttggagttcagttcctgaactaaaacagaacatcctgttctcttccatagagttttgcactcatcaatctctttcttcacttcctctacacaactcttcaaaatccaacctctgaggtcttcatgtgtaggaatagaaacaccaaatcctccagaaacaatcgcatcgataaacggttgaacattgacagaattcgccgcatcgaaatcagctccaatatcaaacagaaaccgtcccatagccatatgaactgttttctcccgctctttcgaagtaggatgcacaatgttcttcacgctactaatagccacaggaatcaaattgtccatatctcgatcaacctcaacattagccaaatcattcctctcaaaagcattattctttctactcctataagtcctctgcttcgtcctcccagtactttgacccactacgacatccgaactcggcgatttaaacccgttattcacatcagaagaagcagcaacctgagtctcaacttcacaaggagggaaataagctataggcaatggttcaggacttgatttacgtctcttcctctgacgtctcaccgtaccatcaatacactgctgcaagaaaagacgaacctcatcaggaacttgatcacagatagtgccttgtcctttcttgccagcaagatgttccttaacccttgtaataccacctcctttaaacatctttcgacagtaaagacatctcatctgaactcgatctccatatttgtaaacttcacagtgtttccacgcactgtcttgtttctgtggtgttagagctacaggttccaaatctgaatccatcctacaaaaccctagatccttcaattaaacatttacgagatcaaacttagaagaagaattcatcagctttcataaaaaagctcacaactttcgtaacaaagatgttaacttttcgttgattagataaaaatcggatcatattgaatcaaacccgtcaaagaaaagcgaaattctaaaacccagtgcagcaaaatcgtaaatttcagagtttttgaattatcgaaagaacagagaacgaaccttttttggtttgcaggtttgtgaccgggttggttacggcaagaaatcggttcggtaaaaaacttgataaaattacggtataaggacttcggttttggggatgaagaaggtggaatcgaccggagaagaagagattaaggaacgctggagaagaatctgaaggcgacggaggaatgcaatgtcggagaaatttttgagatgacccggctcgttagggttcgagaggagaagaagttgggcagcttttctggtttataaaaacgacaaattttgtttattttttattttttttgtcttgttttggcttaaacttgtttttgtggttaaatcggtttttaatttaaggactaaagtgattatttgtataaagtataaggtctgatatgatgataagtgacttcatgtggggtatcttttaatttgtcttttcaaagatagaaatgattttgggtcaaaaatattggatgagattgtagaatctagagataattattgtttttcaaagtcttatcataaattaattaaggtaaagttgaatgataaattaaaaagcaaaatgtgttaatacttcaagaacatttgttatacttcaagaccaatcacaagtgctgactcacattacaatgattgttatgttttactagatttgcttcggtattagtgtgaggatgtgttttgtcaaaaaaagcttagaacatgaacggagtttaaagaatacggttgaagcaagggcttgcattgttgcgttctatatctctgaaattcgtttatgtttgctaaacagaaaccacaatgtgcatgtataatagattatcaaaatgttgagagaccttgttctgtgattctttcattgtgatattttgtacaatgttagtttcattttaagagtcacaagtatttgtacacaaatcaaaaatttcacataatagttttcaatctcgtatattgcaacaggtctctatgactgaacaaggaaaaaatcaactaacacaaaggctatacaatacatggccactcacacaatcgtaacaatctcctaacttttcaatctaaacagcaaggttaaagaaagattcgacacctatctcgttaaaagttaaaacactctatttataacaccataacatcaacacgaaatcaagtaatcaacagtgacaactcaaacatgcatctaagactctctatatgctcctacaagtaaagaaaagagactacaatggctctaggactgactacaatggctacagggaaaatgatttgacagagaaacccatttcaatactactccaacatctcgaaattggaaaccagaagtgaccatcttcaataaccttaaacaacatttccacaatgtaatcaattcagctattaaaccagtgacaatatataaaatgaggcatcaatatagcaaaagattataagtaagagacaaaatccagaatcaattccaaaccaaaaggtcttaaacaatgatccaaattcattctagaactaaacaaaaagtagatagatagataaaaatctcaaaggttcttcttcagaacctgagcttagtaaagaaccacctgttcttcccagtcttgaaacgttcctcaagcttagccttagcttcctttaaagcagtcaccttcttatccttactcttaagagcatcaagagtcgctacttccttcagatctacatcgagcgtgtaacgtgtaggcatcagatgctggtaattcacgagcttgatgaaacatttcactcttgatttcttcgccgtcttcttcgctgagtctttgcggatgactttgctcgggtacttcttcagtccggcgacgaggcagtgtccgtaacgacggtcactggttccgtcatcgaaggatttgatgatcactgcctttttgccggcgtaacggccttgaaggaggatcaccgctttgttctgcttcagaaacttcaccattgtttctcaccaccgcaaagaagaaaccctaattgaagagatgattgtctttatatagtgtgctgagtaaaaccctaatttgttttatttcaatatcgaattcggcccattaaaatgagatgatcctaaaaggcccatgtaagtttcttatatcgttttaggccctgaaaccaccaaattcgaaaatatttttttgaacaccattttatatgttttgtttggacatcgttttatatgttttgttttacaaaactaaagtcgagattcgtaagctgggggagctctgcgggatggagaacgtaattgctgtgacggttttacggttaacattggacgttgttctgcacctctaccagaattacggagagtctactatgggctttatatcgcttgggagaagcaaatcataagagtggagctggagattgattcgatatttgtagttgggtttctcaagacaaggattaatgattctcacccaaagtctttccttgtacaattgtgctatggccaggggcggacccatgttgaagctgggtgggcatgtgccccattttaaatcttataaatagtgtattagctatgtatgtacaagaaaatttagatagcattgatggttttacagtaaagtgtgtttcatataaacccaatttcgattcccaaaactgtaatttaggtataatgttttttaaaatcataatataatttagctaattaaattttaactagtattttataaataaagtgccccatatagaatttgggtctagatccgtcactggctatggctttctcgcaaaggactggatagtccgcattgttcacgtgtataggaaggtcaattgttttgccgggattcagatattttctaatccaattagcatcagactcagatattttgcaaattctggttgattaatgcataaaagatcgcattcataaaaataccaaatctagctcgtctattattatcccgctggataatattttcatgtgttttctattgattggtgattgaaaaaaaaaacatttttcacgtaataattatatttggataaagtcacaaccacttaaaactgtaaatcgaactgtgcgcacatccgtttggttcacttaaaactttaaagcgaaacacaaccatccttaattcctcactatcgtcaaacattttttttatctatttcttacaacaataatttgtatgaaatcgttaattttgaagttaatgagtcccatgcaaggatcattcactgttggtcagaaacaagatgtaattaagaacactaaaacacagtttcctttgagtagtaaagagttatgactagctatttggtttttaatttcttttatttatatagaaacaaaatacacgaagcaaatgattcattttaaacagtgaaacaaataaactttaaaatgcgtggaaatccatagaaacgactactataacatatatatatatatatatatatatagattttctatcacgtgttgtttttcaggtttgggcaacgacttctgtctcatcatgctgatttactctgatgtacagaggctggagcatacgccgcagcagaagatacactccatacaagtactgccaatagtgtcaacagacatatcagtaaaaaaaaaaagtagaacgccggatatataaaaaaataacatcttggataattagagccaagttataaacatatatatatatatatatatacacgtacctaaaacaactcattatggcttcggggttgacgcccttggagtttgtctccactgctgctgccggaggatcacccaccaccgcatctctagtcggataaccaattggtggcggacttgtgtacggccctgatgaagtctctgaaggtttttgcactgtgccaaaaaaaaaaaaagttatctagttggtgagtaaagaattattgttcatcatgattatacgttagacattgatcatgattttagaaaacaattgaagataattaccggaaaagtaattttgcgcggattgattcattctgatttgaggagctgaggagtgaggatgtgagatttgtgaagaggagagagtgttgtgcttctaatttataaggtagacaaatattaggaaattttttacattattcattatataaaagaaagaagagtcaatattgaacaataaaaacatctaatcacagacaactcacggacagacctaccttagcgaagtggtaggtctaggttttttggttatatccaacacatatataattgcagagataaagcaaatgatattgtttgaaatgcacaagggcagaggaaagcgatacctatggttgagatgaaagtgagaaatggtttgttgcagaaatggctttcgtcacgtacatgacgtacacgtacatgacgtcgtaaaacatgaggaatttaacaaatttgaattattttgttcctggaactgtcttttagaacctcttttttttttttttgggtattgctctaaactctatgtaaattaaataacctcttttgatgattaattaatttaacatttcatgaaaatgaaaaagtgattaaccaactgcctttgaaccatgattaatagttttggctttgttccttatgttggtgtgatctgttaaactgcaaaggaaaacaactttataaacttaggtgttgtttatattattatatattgtattaaacttaggaataaaaaatcattacgtcatattttgttgctacgaattatgactagctatttttgttttttactttgatttatatagaaacaaaatagacgaagcaaatgggaatcatggatctctttcaaccagtgaagcaaataacatactgatgaatcctctattacgtatatgttgtttttctggtttgggcaaagtcttgagtctcatcatcctgaaaatcctgacgcgcagcacatgacacattcgccgcaaccctggatacaactgccaatagtgtaggcagacagatcattaaaagagagttgcacgtcggatgaacatcttgctaataattagagccaaactatctataaagaaagtaagttaaattagatatgtactgtaatattaacattacgacttcgcagcagcccttggaatttgtcttctctgctgctgccggaggatcacccaccgccttatctctggttggataaccgatcggcggacttgtgtccggtcctgatgcattctgtgaacgtttttgcactgtggccaaaaagattagttaattatctagcggtgtgtatagaataattgttcatgattatatgtggccaaaaagaatatacgtcggacattgatcatgattttagataataaatgaagaattaccagaagtgtgctcgagctgattcattctgatttgaggagctgaggaatgatggaagggagaaatatgaagtggagcgagtgttgtggacttaatttaaggaagacgtaccaccattttttaatttttcttacaaacatatacagaacagactcatcttagccaagtcgtataccaccactttttttttaatgtaactaagtcacaagtgattgtcgagtaacaaagaattgcggtgaaaaagtaaatgctattttgtgaaatgcaaaagggaagaggaaagcgacgaaaacggcctttttcaacctctattatttgttaaaagccttttttcaaaaaaactccgatgtcctgtctttcttaatcagaatcaaaacaaaattcaaattgcaaatctgacatttatgaaaattagctgatttcaacatatctctagctcgaaccatgaattaattatggagttaaacacaagttttgatgatgaagaatcataaatattccacaagtgttttttaaaagcgtattgaaacctctggatccaaagtagtaggactcatcaaagtaggagtaaaagaaaaagagattttagccaatgtatcatttttgggtccaatggaatttttattctcatattaaaaaaaaatattacaattccaaacagaaaaatgttaacttttgttgcgaatattttcagatatagaaaaaactttgatttcatcggttaattcaaaaatattttacttattcagtaaagtactattcattttcaagctcaattaactgagacatagtaataaaataaaatatatttgaataaaataaaattgcaaaaagtcttttactatgaatctatgatcatatttatagtagaatatgcaataggaaatactttgttttatctaattaattcgaaacagaactatagttatgatatattatttcgatctcactagcctttttgattttttttttatcaccatatgctgtcatggtctaataaagaatcattctgattagttgttaattttgtgaaaagttcttgtgcaaaggataatttattaaatgatatgttcttaatttatatcgagtagacattgttttttcttttaattgaaagaattctaaattcataacttgtaaggagggacttatagtcaccaaaaacagagactaaggcaattattggattcaaagttgatgttaaaaccctttttggtattgtcaagttgttaacatcttgataaataatatatcaaaacgaaaccttggagacgaggagtttaattttctttttagaattttaaaaaacaaatatacgtgatcgtgaaaacgtttacaatatatgtataacggctatattgcatattatatttaataggattattatgtaatttttaagagagaggtcaaaattgcaaaaagacgattttgaagtttttttcacaaaacccaaacttcaaaacaaaatgggatttagaatttaattttgttggtatcaccctggcaaatgtggagttatttttttcttatccaatgatggaatagtcatttggaactcaactagctgaaaaataatttaaaactgaaatgtatatgtataaaaaacaatttacaaaaacttttgctttagttctcatcgagaataggcaataggtttcttaaacatatttagtgtcaagagtgattttattaagattttaatattaaatatttggatatataaaaagtcaaagataacgtaacgtgaaaaggaagtattagattgcgctatacatatgaaaaatatatactaaatgatgtatttggcgaatcaagcatcatggtctaatacagaatcattccgattgaatcattctgattgaatcattttgaatagttgttaattttgtgaaaattcatgtgaaaaggttaactaaatgatatatcttaatttatgtctagtagaccttgttgtttcgttttgttgcaagaattttaaatatatggcttgttgggagggacttatctcaccaaaacaaagactaaagcaaatgttggatacaaagctagtgtcgatgaagaaacgatatatgcggtagctgctgaatcttctactggaacatgggaaactaaagcgatggggcataccagcctggatcgtttcaaagatgatgctaccacatcaaacccgttttgggagaaaaaacctcaatttattgcgaatataataacttaccccttagatctttttgatgaatgtttggttactaccatgtatacctcgactgtgggtaatgtatttgggttcaaaaccatgtttgttttacgtctagaggatatgtgaatcccttctgcttatactaaaatgttccaaggaccatctcatggcatccaagttgaaagagacaaattgaacaagtactatctagaggatatgtgaatcccttctgcagttcataaacggcggttcaatcgtgttttacgatttgagattaaggttctcataggaccggttcgattttgtttaaattggttttgtttagttagatactaagtaaaaattgtatgaatctaaattcggaaatatcccaatagaccttatttataaaatttgaataccttttcaaaaaaaaaaagggcttattagaataatagacactttttaaaaaataatttgagaagtaggtagtttttttagaaattggtgaaatagacattttttttactttttatgaaatagaggttatgtgtaataagctaaaagacaaaaatatgtcaaataccactttaccctttacttcatatgagaaaatatgagtctaaatttttatattatttaactatttagaactatttttattatattatagttatttttttttcatattcatctttttgaattttattaaaaaaaaatatttttttttaaataatttcttcttccaaagacaagatgatttatatgtttttaattatcattctcgtacaccagcaataaaacatagttttatacactaacacttatacaccaaatcattttatacatatcttctaaaatatttctatttatctcatattataaaataaaataataattgttcataaattaataaaaatatgatggtgtacaccatcatgcatactattaaattaaccataatggtgtataccattaaatgaaagtaatgtttgtacatttttacttatgtacactaacatttgtatacttttatgtacactaatctcatattattattatttaaactttgttttgtatattatcacttgacaaaaatggttctgtcttttgtatatgaggtgtacacaataggtgaaggtgtacgatattatagacggtgtagaagttgatttatggtttgatttattatctcattattgcatgtatactattaatatcatgtacaccatatgttacattttcgtacaccatcttattatgtagttgcacatcgttgtatattatcgtttgtacatcactttgtacactgtctataccgtataccacttcttagatcaatattatacattatcgttgtacactactatttgtacaccacatttttaccatatcgcatacaccgtcgggttaagatcaaataaaagaaaagtattatatatttgtaaaatatagcaaaattagactttttagattcagaaaaaaaattaaaagattaatatatattttatgataattatttaatgaagaatttataacaaaacaaactaaatatatataaataaagagaaaaagaaaaaaaaattatttttgtctttatttgactatatgacaaaacagcagaaggttataaaggtcattcactaaaatctctattagatagaaagttgtattagagaggaaagagaaaagtgtctattctccctatttctaaaaaaactacctattttgcaaattatttgtgaaaaaagtgtctagtttccaacttatctcaaaaaaaaaatacaccaaacaaatgcggataatggatcccttttaaataatgaagcaaataaacttaaaaatggaacgtgagaatccatacaagcgactaatatatatatatatatatcttgagtcaagataacatattgatggatcttctattacgtgttgtttttctggtttgggcaaaggacttcagtctcatcatcctcctccgcagaagcagagcgcgatatggccacaacacaaaagaccactgccaatagtgtagacagacaacaaatcattaaaaagaaagttgaacgccggttgcgaataattagagccaaactataaacatataataataataaaaaagtaaactaaatgaaatatatatgtactgtaatacgacgtcgcagcaattgggctttttctccactgcttttgccggaggatcacccacccccttatctctggtcggataacccatcgtcggcggaggacttacgtacgtccctgattgtttttccactgtgcccaaaaagattatttaattgtctaattgctttgtgtagaataataactgttcatggttatgcatgcatggccaaaaagattagacgtcggacattaattgatcatgattttagaaaatagttgaagaattacctggaatgtatttgttgtcgtgttcattcattctggtttgaggagctgaggaatgaggaagggagaattatgaagaggagagagtgttgtggtgttttaatttaacatagacgaatatataggaagcttctaaataaaagaatgaaaagtcaatattgaatagacatacctattttgcaacacttgtgttatatataaatgctagtgttcaagaaagtcaatttcatataatttttatacagtgttttttttttgaaagacacgtatataaataatcattatgattatttgttaattatgcgaaaggttcttacgaaacaagttaatatgttaaatgatctattcctaatttatgccgagtagaccttgttgctttttaatttattgcaagaattctaaattcatgacttgtagggatagacttagccaccacaaacagagactaaagcaatttttggatttcaaattggtgttaaagagtataaattgacttattaaaatcaaggatactaatttcttggaagcattccaactctggatcttctattggtacatggaaaactgtgtggaccgatagtcttaccagttttgatcgttacaaaggatgatgctaccacatcgcgtttgttgcaagagaaagaaacttaattattgcgtatgcaacttacccattatacctttttgaagaatgttcagttactaacatatttacctccattgtgcatgtattttgggtacaaagccatggatgttgtacgtctagaggaattgcaaatccatcgttcttatactaaacacttttgaaacatcacctcatggatccaaattaaaagagatagattgaacaagtatggacgtcccttagtaggttatccgagaaaaactatggtaaagcaaattatgaatgtatatatgtgattttaccaaagatggtgagaatgtgaacttccaaccatttatgtgttagagagaccgtttcttattttaggctaggactgtcccattggtattataaatagaagtagagaaatgtcagcaaaggacatgtgataactgagagtgagagtcagagaatattctcgattccagctcaaagtcttaagctcgacattccaacttgtttagttaaactttcagtaatttgtaagttcggcggttaacagtttcatgtaaacggccgtaacgttcagttgttgaaataaaatcttctattttgttgctattgtcttctcatcttgttaggttgggcttcaataccaacagattcgttgtattttgtattttctttcggcaccaacagattcgttgtattttatattttcttgtctacttcttttggaaatttgatgtcagaaaaataccatgtcgacgttgttttcgatttatttgattataataatataacttcgtagttagagaaaaaccacacacaaaatttttgtaggatttaaaacactacacaattttatttgtgtgtttttaacctcccaaatagggattttgacatttaacttgaatcataagtatgttctaaattccgccccaaaaaaagagagtatgttctaattaatcatgatgtatatataaatacgtatatatatcaaacgggaaatgtaactttattacttgttacttttaacctcccaaataaggagcttaactggcactttctttgaagtttaactgaatgtttctctaactttcacaaacataaaaacgtgaagcaatttaattccatctcgtttgagatatatacatgcatgatttagaacatacttaagttttctgcagtataacacgtagtatactagtatatgttgttgtgatgttttctagagaaatcgattttgttatgttcgcttttctattactgtatcttctttttgattggtcataaaaaacaaaacaaaaacatcatcccacctaattaattccctttgggtaacccgtaatccattcacaactcttcaatgataatcaatgcgtgaggaactgaaacacatcctttcgttactgactgatggttcaatcatcgatggatctattcgacaacccaattcaacggaatatatatatatatatatataatcacttacataaaacatagtaacaaccatccacagagtatattccaaacagagagtaggtaacataactagcatcaaatactcttttattacatcaataatttgcatgaaatcgttaattccgaagtctcagaagcatgcatccaggacacaacagcagcatatggcagcacaactgccaatagacaaaaccaaatttattaagtgttacgtaccattcttgtctaaggactagggaagatattggtttatatttgaaatagtaacattttctgaaaactttaaataaagaaaaagtattttagcaacgtacgtaatatcccatggtttaatttctttttagttgttcagttggtaaaacaaacttttagctgacaactctgaagttgaatttttatattatcttttgtcattgaaggggaaataaaatgtaagtcaagggtgaatttaaaacaaacaacaaaattgcaagaaattaaacactagttatcaactaaaatgttgggaaaaaaaacaaatcttgactagaaaatgttgacccaaattttaccaaaacatttgcagttcaaaaccaatagtttgattcgaattagatatactccataataattcaggaaaacagagaaacacacaagaaattgaaaccctatactgatagatcattaaaaataaaataagagcgtcgtatgaatatcttgcaaaacgaataattagaaccatcatgatctataatcacatgaagagattaaaatgaaagaaaaacataccatccttcggggttgacgcccttggagtttgtctccactgctgctgccggaggatcacccaccaccgcatctctagtcggataaccaattggtggcggacttgtgtacggccctgatgaagtctctgaaggtttttgcactgtgccaaaaaaaaaaaaaattatctagttggtgagtaaagaattattgttcatcatgattatacgttagacattgatcatgattttagaaaacaattgaagataattaccggaaaagtaattttgcgcggattgattcattctgatttgaggagctgaggagtgaggatgtgagatttgtgaagaggagagagtgttgtgcttctaatttataaggtagacgaatattaggaaattttttacattattcattatataaaagaaagaagagtcaatattgaacaataaaaacatctatcacagacaactcacggacagacctaccttagcgaagtggtaggtctaggttttttggttatatccaacacatatataattgcagagataaagcaaatgatattgtttgaaatgcacaagggcagaggaaagcgatacctatggttgagatgaaagtgagaaatggtttgttgcagaaatggctttcgtcacgtacatgacgtacacgtacatgacgtacacgtacatgacgtcgtaaaacatgaggaatttaacaaatttgaattattttgttcctggaatactctatgaatacctcataatatatgagtacctcataatatattattaatatttttatgtttaatttaagtagacaaacttatactaaaattgtgcttccattggtgagatactcttatgagtatctcattaccattaacatattattatatgttttcttatattaaatttaaaatctctacaatattttcaaacatatcaattattatttttacaaattatattattaaatagttttattatttttaaaaccataattaaacataattaaacattactttacatataaaatcataataaaaatatataaattaaacataaaattccatataaaaccatgataacataaattaaatagaaaaaaatatataaattacacagaaattacatataaaaccatgataacataaatcaaagctaactatattatctattatggttttactcttcatttgatgatgcaccaaactttgtcatatatgctcaactaggtcatcttttagttgttggtgcatatctctatcacgaagtcgaattcgattgccgagaatgttgtaaaataaaaatagaaaattttaaatgtttgttttctaattaaaaaaaactattgtatttataagttattattatgtttaatgcttaactaacaccaattaaataatatttgtatataatttaaaaatatacataatagagcttgttatagataatttaattttatgaattttaaaagtaaaaaataaaaaaaaataaaaaacatataaagtatttaattgatgttataaagtatagatgattttatttataacaaagaaaagaaattaatagcaaggtgacatgtggaagagagagaaagtttctctaagtttctcatttcagaaacgattctgagaaaaactgattaaaaaattattattttaatatttttgatttatttttgtttggagtttttcagtgagaaaccaccaatggaaatggtcttagaacctcttttttttttttttggtattgctctaaactctatataaattaaataacctcttttgatgattaattaatttaacatttcatgaaaatgaaaaagtgattaaccaactgcctttgaaccatgattaatagttttggctttgttccttatgttggtgtgatctgttaaactgcaaaggaaaacaactttataaacttaggtgttgtttatattattatatattgtattaaacttaggaataaaaaatcattacgtcatattttgttgctacgaattatgactagctatttttgttttttactttgatttatatagaaacaaaatagacgaagcaaatgggaatcatggatctctttcaaccagtgaagcaaataacatactgatgaatcctctattacgtatatgttgtttttctggtttgggcaaagtcttgagtctcatcatcctgaaaatcctgacgcgcagcacatgacacattcgccgcaaccctggatacaactgccaatagtgtaggcagacagatcattaaaagagagttgcacgtcggatgaacatcttgctaataattagagccaaactatctataaagaaagtaagttaaattagatatgtactgtaatattaacattacgacttcgcagcagcccttggaatttgtcttctctgctgctgccggaggatcacccaccgccttatctctggttggataaccgatcggcggacttgtgtccggtcctgatgcattctgtgaacgtttttgcactgtggccaaaaagattagttaattatctagcggtgtgtatagaataattgttcatgattatatgtggccaaaaagaatatacgtcggacattgatcatgattttagataataaatgaagaattaccagaagtgtgctcgagctgattcattctgatttgaggagctgaggaatgatggaagggagaaatatgaagtggagcgagtgttgtggacttaatttaaggaagacgtaccaccattttttaatttttcttacaaacatatacagaacagactcatcttagccaagtcgtataccaccactttttttttaatgtaactaagtcacaagtgattgtcgagtaacaaagaattgcggtgaaaaagtaaatgctattttgtgaaatgcaaaagggaagaggaaagcgacgaaaacggcctttttcaacctctattatttgttaaaagccttttcaacaaaaactctgatgtcctgcctttcttaatcagaatcaaaacaaaattcaaattgcaaatctaacctttatgaaaattagctgatttcaacatatctctagctcgaaccatgagttaattatggagttaaacacaagttttgatgatgaagaatcataaatattccataagtttttttaaaagcgtattgaaacctctggatccaaagtagtaggactcatcaaagtaggagtaaaagaaaaagagattttagccaatgtatcatttttgggtccaatggaatttttattctcatattaaaaaaaatattacaattccaaacagaaaaatgttaacttttggtgcgaattttttcagatataaaaaaaactttgatttcatcggttaattcaaaaatattttacttattcaataaagtactattcattttcaagctcaattaactgagacatagtaataaaataaaatatatttgaataaaataaaattgcaaaaagtcttttactatgaatctatgatcatatttatagtagaatatgcaataggaaatactttgttttatctaattaattcgaaacagaactatagttatgatatattatttcgatctcactagcctttttgatttttttttatcaccatatgctgtcatggtctaataaagaatcattctgattagttgttaattttgtgaaaagttcttgtgcaaaggataatatattaaatgatatgttcttaatttatatcgagtagacattgttttttcttttaattgaaagtattctaaattcataacttgtaaggagggacttatagtcaccaaaaacagagactaaggcaattattggattcaaagttgatgttaaaaccctttttggtattgtcaagtttttaaaatcttgataaataatatatcaaaacgaaaccttggagacgaggagtttaattttctttttagaattttaaaaaacaaatatacgtgatcgtgaaaacgtttacaatatatgtataacggctatattgcatattatatttaataggattattatgtaatttttaagagagaggtcaaaattgcaaaaaatgacgattttgaagttttttttcacaaaacccaaacttcaaaacaaaatgggatttagaatttaattttgttggtatcaccctggcaaatgtggagttatttttttcttattcaatgatggaatagtcatttcgaactcaactagctgaaaaataattttaaactgaaatgtatatgtataaaaaacaatttacaaaaacttttgctttagttctcatcgagaataggcaataggtttcttaaacatatttagtgtcaagagtgattttattaagattttaatatgaaatatttggatatataaaaagtcaaagataacgtaacgtgaataggaagtattagattgcgctatacatatgaaaaatatatactaaatgatgtatttggcgaatcaagcatcatggtctaatacagaatcattccgattgaatcattctgattgaatcattttgaatagttgttaattttgtgaaaattcatgtgaaaaggttaactaaatgatatattcttaatttatgtcgagtagaccttgttgtttcgttttactgcaagaattttaaatatatggcttgttgggagggacttatctcaccaaaacaaagactaaagcaaatgttggatacaaagctagtgtcgatgaagaaacgatatatgcggtagctgctgaatcttctactggaacatgggaaactaaagcgatggggcataccagcctggatcgtttcaaagatgatgctaccacatcaaacccgttttgggagaaaaaacctcaatttattgcaaatataataacttaccccttagatctttttgatgaatgtttggttactaccatgtatacctcgactgtgggtaatgtatttgggttcaaaaccatgtttgttttacgtctagaggatatgtgaatcccttctgcttatactaaaatgttccaaggaccatctcatggtatccaagttgaaagagacaaattgaacaagtactatctagaggatatgtgaatcccttctgcagttcataaacggcggttcaatcgtgttttacgatttgagattaaggttctcataggaccggttcgattttgtttaaattggttttgtttagttagatgctaagtaaaaaattgtatgaatctaaattcggaaatatcccaatagaccttatttataaaatactactatttgtacaccacatttttaccatatcgcatacaccgtcgggttaagatcaaataaaagaaaagtattatatatttgtaaaatatagcaaaattagactttttagattcagaaaaaaaattaaaagattaatatatattttatgataattatttaatgaagaatttataacaaaacaaactaaatatatataaataaagagaaaaagaaaaaaaaattatttttgtctttatttgactatatgacaaaacagcagaaggttataaaggtcattcactaaaatctctattagatagaaagttgtattagagaggaaagagaaaagtgtctattctccctatttctaaaaaaactacctattttgcaaattatttgtgaaaaaagtgtctagtttccaacttatctcaaaaaaaaaatacaccaaacaaatgcggataatggatcccttttaaataatgaagcaaataaacttaaaaatggaacgtgagaatccatacaagcgactaatatatatatatatatatatcttgagtcaagataacatattgatggatcttctattacgtgttgtttttctggtttgggcaaaggacttcagtctcatcatcctcctccgcagaagcagagcgcgatatggccacaacacaaaagaccactgccaatagtgtagacagacaacaaatcattaaaaagaaagttgaacgccggttgcgaataattagagccaaactataaacatataataataataaaaaagtaaactaaatgaaatatatatgtactgtaatacgacgtcgcagcaattgggctttttctccactgcttttgccggaggatcacccacccccttatctctggtcggataacccatcgtcggcggaggacttacgtacgtccctgattgtttttccactgtgcccaaaaagattatttaattgtctaattgctttgtgtagaataataactgttcatggttatgcatgcatggccaaaaagattagacgtcggacattaattgatc

SEQ ID NO: 1042 - DNA, 47827 bp, Arabidopsis thaliana
atcctaatgaagctgtgaagaagagagaaagaacatttacgtttaaccaactcacggcgccatttcactacccgttttgcttagacatatacatctcgaaagagtctgtacgagcatgtgtgattcacagggtgactagtaaggttgtaactgtggctcattcgatttcaaaagacatgaaattcgatcttggttcgagaagaaacgttgcagcttgcgctgcggttggggcagttcttgctcaaagaagtttggaagatgacatacatgatgttatatacactcctaggaaaggagataaaattgaaggtaagcttcaggtcgtgcttcaagctcttattgacaatggtgttaatgttaaagtgaagcttaagcagaggaaacttaagaagaagactagtcatctaatgatggcctagaggactgaaattttctagtttgtaatatgggcccagaagatatgtttctgtgtggggcccaaaaaatgttatccgtttcatttctacgtttcttgtcgggtcaaagtgttgactttctaacaatgatatcatcgttttcttatacgtaacttctctgctcttccatagccgatcgacctttgttcacaattcccaccgatttttatttgctagatcgatatattttcaggtatgatgatatatatatcatggtttgtttattcatctggaaagtttttgatgcatcatgatcaggacaaagttggcgtgaaatgaaaagttttaaataagttttttttttttgttgttgttgtaaacctataatcagatgatgagatgatcctatattaatcgaatattttgattaattatacatgatatttaacaattgcattcatcttttttcttttgtgaaatctaagcagtgagcttgaaacatggcttcagtggctcctaaaatcgctaaagatgtaactgaagtaagtaacctccaagattatgtctttcttcaactatgtcttgtcagtaaatgttttttttttaattgatattttttattatttgggagcagctaatagggaacactccattagtgtatctaaacaaagtagctaaagattgtgttggtcatgttgctgctaagcttgagatgatggaaccatgttctagcgtcaaagacaggtgcttccgaaaagtttaaaagctctgttttctagtttctctgttagtgacaaaagaaacaaatacttgtactttgttcttttttgttgcaggattggttatagtatgattgctgatgcagaagctaaaggacttattaaaccgggagaggtctgtttttttttttaaatggaagctattagtcagattcttcatttgttagtttttgagatttttaacttttgagttttttctttagagtgtgttgattgagccaacaagtgggaacactggagttggtttagcatttactgcagctgcaaagggctataagcttgttataacaatgccagcttcaatgagtatagagagaagaatcattctcttagcttttggagctgagttgattcttactgatccggctaaaggtatgaaaggtgctgttgcaaaggcggaggagattttggcgaaaacacctaatggttatatgcttcaacagtttgagaatcctgctaatccaaaggtaattactatttagtttaagtgccttagtggatttgaagtcagatacttataacatagtattgtgttcattgcagatccattatgagactactggacctgagatatggaaaggttctggtggaaaagtggatggctttgtttctggtattggtactggtggtacctgaacaggtgctgggaagtatctcaaggaacagaacacaaacataaaggtgaatttcatttacttatacaatcagactctttcttagtaaactcaaaacttgtctcatttgttttctcatcttatagctgtatggtgtcgagcctgttgaaagccctattctgtccggtggaaagccaggtttgtcctcaataaggaactctttggcacactttttcttcttttactttgctcacatgttagtcttgagtgttcattatgaggtccttctaacttttggtgttcatatcaagattcattgaatttcagcctaacacattggtaaaaatgctcaggtccccacaaaattcaaggtataggtgctggttttattccaggcattttggatgttgatcttatagatgaagttgttcaggtaaggtttcataccaatatcatcttgctgactccaaaacacaccttacatttcttagttgcctcttatagttttgtaacgcttacgcaggtttcaagtgaagaatccattgacatggcaaggcttcttgctagggaagagggtctgttagtaagtgcttcacattttgcctcatcagatttttctgttaagccaaaaatgtcttgattcagctttatcctcaccattatgattcaaacctcaccatgaaaataaaaacaggtccttgatcgttatcacatttgtctcctcctatgtactgtaggtgggaatctcatctggagcagcagctactgcagcaatcaaacttgcaaagaggccagaaaatgctgggaagcttatagtggtacgttttttccaaagctaaagaacaaacagtgaactcatggaagcttaagagtcgatcttataataagagatgtgaaactgaatgtttcaggcggtgtttccgagtttcggggaaagatatctatcgactgtactgtttgatgcagcaaggaaagaggcagagactatgacctttgagccctgaatctgttcccctttcttcttggtgatacaaataaatgatctttcttccaacatatatatcttcagattctgtctgtatcttgtcatttgtgagaactcaaaagtagtttgtctgctactatgaacaatccatttctagaaagtttctggttgagtttttgctctctctatttgaaatcttgtgtgatcaaaaacagtgacgagaggacaactacatctactttataaatagccccaagcttggtacaatattttagtgatttggaattacaaacaaaaatattttctttatctcttgtagatcagattagacaatcaagaaagcatatccaaaaagcttttatccaatctacgatctgataacatatcaataaccatctttatggtggaagaatctgcagagaacccacacaccttcatttcttctatgagttcaactgaagagattagaccactacctccaagatgtgccctgataagaatgttgtacgtaaaatcatccggagtacacccatcctccttcatttttctaaacagcatatcggcttcagacaacgagcctttcttacatagtcctccaatcattacattgtatgtcacgacatcaggtttcactcctttgtcagagaggctacagaataaactccaagcatcatcgaccttactagcattgcacatcccgtgaatgatgatattatagataccaataccaagagtcatcctactcttctgcattttctcaaatatctccaatgctttatttagttcaccattgtcacacaaaccatccagcaaaataccataagttacaacacttggtggcacaccacgagaaaccatctcttggaagagttctttggcggcgttaagttttcccgattgacaaaaccctaggacaagagtgttataagtgattgtattaggaatcaatcctttcgaagaaatctcacgaaaaagtctcataccatcatcaactctcttagctttgcagtagctatttatgagaatactataagtcacgatgtcaggttcgcaccctttgctaaccatcagatcaaacatctgattagcctcatgtaagcaattctccttacaaaacccatcaattaatgaattatatgtaatggtgtcaggagctatacctcttgtgatcatctcattgtacaactctttagcctctagaagcttcccctctttcacaaaaacatcaatcaaagcactaaatgtgacaacatcgggaatgatattccttccaatcatctccctcaacatctttgcaccatcatcccatttaccgtcgttacaaagacctcctataagagaactatacgtaacaacatcagctttaatccctttcatctccatctcattgaaaaggctaagcgcatcgtcaaagctcccatctttacaaagactatcaataacaatactatactgaacaacactagctttgatatttctttcttccatctttctaaacaaatccaaagccaaagcagagttccctgacttacacagtctattcaaaaccggtccataagtaacctcatcaggttgaaaaccatactcaaccatcctatcaatcaaaaccaaagcttcagacactctaccctttagacaaagtccattgatcagagtgctaacggttacaagatccggtctttgcttcatttccaccatccgatcaactaacgcaaccgcttcagaaactctaccctcgaggcaaaacccgttaaccaaagtcgaaaacgtgattgtatcaggctcatacccaagcttccaagctctcccaagaacagaaaatgcgaaaagaagtttcttttttctacaatagcaattgatcataatggtcatagtatacatgtcatgctcaatcccattcaactccattcccttgcagaaacctaacactaaatcatactgtttcgttctagcaacagcactacacaatctattgaaatcgattggagtaggtaaaggacgagattgaatcatggattcgaagagatcaatagcatcattaaccttaatatcaacaatcccattccttaatctctctttataagaaagcttcgcttcggtgatactagaatagtgtaataaagaagtacctttctcaagaatctgagtaaagttcgaagcttttcgatttagaggaatcaatctctgtatcatcttcttcaatgaatgaatcgttggtcctttgtgctgtgtgagagagaagagaagaagaaggaaatgaaaattccggttttgattcattcatatatttaaacccggttcaatgttttgatttaaaaatcaaagcggttttaattgggaaaggtacgagttaaacccaaccttgtttcttcatcttcctcactctctgcgccgcgtttgcttccatcgttctctcgattgtttcctctcaagcgaagcttcttcttcttcgatcttcttcctcgtgtgtggattcgtttctgaaagtaagtatttttgttagttgttgatttttttttgtggttcaaatggtcttaagatttgtgtcgatatcgatctcggagtaaacagaatctagctctggaatcgtagaaattttcactgagacttcttagatcccaatcaagcttcgttaatgttagaaaattagcttagatcatggaatatatgtgttgagagttgatataagtagacgttgaaaccctagtttggagaaatagccctgattgttgaaaaggatgttaaattggttgttgttatcgtttctatgtttgagtctctgttgccatagtttgagattggagtattatgtaggagatgatacactgttagtgaactcatatacgtctactttgtggaatgttctgtgttggttgcttctacttgtataagtgtatttgatgctatgagactgatggattctgaaggataagctatgtcattggtttagatgtggctgttgtagtatttagatctatttgatggaaaagggcgtgattgttcgtgacaagatagtgatggaatgattgtaggattgatcttgatctggtaaaagccttatgcttcaccatgttttgtattttataacttctgagagaataatgaattaagtatgaatcattcttgaggtaagatagttctctgcattggttaagtgattagtattctttccaatgtgcttggaattgttttgtaacaattgtgtttttcggttcgtagttgtgtcagatgcaaatgtttctctgagtgttgttgtttgagtttctttattgatttactctcattttttgcttcaactatgcaattcgtgatttcttggatctaatttctgtagtaggatcgaagtaatggccagcaaatctggaagcggtggcctaagagaaccgccgaatgagcaagctgttttgaacatgtatgaaggcaagagatcagagctaagccaaatctactccaacataaccgacctcgagatgcaagtgagcgaacattctctggtcattaacgccattcagcctctcgaccaatcgaggaaatgcttccgcatgataggaggcgttcttgtcgaaagaaccatcaaagaggtactaccagctgtccaacgtaacaaggacggacttgaagaggttgtgaggaagctatacgagacattggagaaaaagaagaaagatcttacagagtttgaagctaagtataagatcaggataacgaaacaagaagataacaaggaaggaggtaacaagaaggaaggtaatgctcaaggtgttcttgttggagctgccagttcaagccagtaaaactctatatttggcagtttgttttactgttgtatctcttttttggatcttatggttaaaagccgtaaactttgctggaaaaaatcaacatgttttgaatgtcacaaaactagtagactggagaaatgccatatttatgtagatccgttgtgctagagaaagatttcaactttataaccggaaagtgaccatttttttacattatgactgaacttttttgaacaacagaaccaaaacatctccctctcgcaggatttttcatatatcagctctctcgttaagcctagcggcggcagtaatagaagccgctacaccaccagggtgagtagacaaattaggattgttcctcagctcagcgctcaccactccctctgcgtcctgcctggtcacagctttatctgcggctaacttcccggtcgcaccctaataagccatccggttcaaacacatttagacaatcttaaaactaaaacattaagacattgaagatgtttttaaaattggggtttaaccgccaaaacatcaatgagcttgattttatcctcatcacggtctatggtagcgttgtgatttgctgctgattgagcagaagcggcgattccaccaggagcaatcacattagtgccacaagctctaacctctgccgcttgaatcgctgctgcgtcgctttgatccaccggtttgtttccagcggtttgcacagtcgcttccaatgcttctccaatcgttattgcactttgtaaactcaaacccacaacttctgcttccatagctgccgcagtcgccactggcctaggctcgacgtattgtccaacgacctatgacaaatatatcttcaccattataaaacatgatcgtaagaaaaaagatgtaattctggatttgagttatgacctgtccaccgacgaattctgttgtgacacgtgcaccagggacgtcagtttgcgccactgtgacgcctcgttcagcggcgagatcagttgtgtcacctggatggacaaagccaccgcgtttattagcagtggctgcagactgcatgactgccgctgcaccgcctttctgagtgtggccaaacacacgtgtctccgctgcttgcatcatgtttgcatcctccggcgctataggcttatcagcgagttcaccggagacttcaaaaacgtcaccgtaagtgactggctcttgtggccgctttggttgttcttcttgactcatctctctgttttgttatgttatgttccgttttgtgttacatacaaaagtgacaacaactcctataaagataagagaggtgcatgagtgtgagagcaacattatgagattttgacacttgtcattttgtcaatgacgtgactaagaggcaggtgtcagtttccaagtttatagcaaccttagcaagatgatgattcagaccgactgagatagagttttgtcatttaggtttaaatacttttttccatgtttcgtacaacattggccacgtttcaatattgagacaacataacaacaatgagcaaagctgttctgaacatttctgaagccatgagatgagagctaatacatacctactccaacatggcaacatatataatataactgaactcgaggtgcaagtgagcgaatactctctggtcatcaacgccattaaacctttcaaccaatcgaggaaatgctcctgcatgagaggaggctaggcgttggtcgagagaaccgtcagagacgtactcccacatgtgcaacgcataaaggaagggatcgaagagtttgtgaagaagctatatatccgagacattggacaagaagaagaaagatcgtacagaatctgaagctaagtataaccatcaggataaggaagcaggatgataacaaggaagagggtaataagaaggaaggtaatgctcaaggtgttccagtaaaaacgctcttctcttttggatttttgttttactgttgtatctgtatttgtggttttttttggttaaaactcagatatttttaattgtcacaaaccccattggactggaggaatatcccatttatatagatcagtagtggtaagtgttaactctcttaggaattattagttcaaagcaaatcagctaaagaatggattttaacttcaaactaaaaagtccccattattcattccaacatcatccttgggaagtttttaagcagtaagatacaaaaaagaacaaaaaagctagtcgattaaatgtcacaagcttgtgaacaccatcctctccccgccggattttctaacatatcggctaaaggaccaaaagctgtagacgattttacataacaagtttcctaagttgtgaaagagagacgaacaaacaaacaaacaaacaaaaaaaagaaagatcatcgatcctctcgccggatttgtcttgtcatatatcaactctctcgttaagcctagcagcgacggtaagagaagccgctacaccaccagggtgagtacacaatttagggttattcctcatctctgcgctcaccactccctcggcatcttccctcgtcacagctctgtctgccgataacttccctgctgcaccctatataattcattcggttcgaaaacatttagccactactttaaaaggaaaacatcaaaaacattgatgaaaatgttttgaaaattagggtttaaccgtcaaaacatcacgaagcttgattttcctctcgtcacgatctacggtagcgttgtgatccgctgcagattgagctgaagcggcgactccagctagagcaatgacgttggtaccggaagctctcatctctgccgcttgaatcgctgcggcgtcgctttgatccacaggtttgtttccagctgtcttcacagttgcttccagtgcttctccaatcgttattgtactttgcaaagcttcttcgtccgtacgcgcagcagcgactacacgcctcggttcaacgtgttgtccaacgacctaaagcttcaccattactccaaaacaaaaaacggatatatgaaaagaagtactagtacttttcgaaacaacttgtgacctgtccaccgacgaattcggttgtgacagttgcagcagggaccgtttgctccactgtggcgcctcgttcagcgacaagctcagttttgtcatctggatggacaaagccaccgcgtatattggtggtggctgcagattgcatgaccgcagctggaccgcctttctgagtatggccgaacacatgtgtctccgcggattgcatcatctttgcatcctcaggtgctatgggcttatcagcgagttcaccggagacttcaaaaacgtccccgtatttgactggctctcttggcctccttggttgctcttggctcatctttgttttgttacgttaatgttctgttacaaactacgataactcctacctgaattgagtgtctattatataaagagaggtgcatgagtatgggatcaacgttctgagattttgacacttactcgtagatgaggtgactaggacactcgtgtcagtttgcgagtttgtagctaaaaagataaagcttagattgagatagggattttacttttctttttgtaaatttgtcatttagttttaagagtgaatgaaaaaggacatgtttccaacgttaccacatatgagtcgtataacattggacacgtttgtttcaatatttgtttttgttcttgtagacacgtttcaattttaagacaaacataacagaaaagtcaaatgttggaaacaaaggtcaccaatatgtcggaagtcaaataacaaatctttgtcggtctaacaaaactcataaacttcccctaactcttcggatctctctagatccttgtttttcgttgccttaattatctttctcttctcttatttcatgttagaaaacagagtatacaacagaaaacacaatcgtttatttttgttctctgtgttcccatacacaaaatcttccagcttctgtttctccgttttgttcaacggagttacaaagcggaagaacctttgccttcggcctgaaagaccaaagatatgggaactggtggaataacgtccaacgctcacgtggtctctcccacgtggcatcacaagcacgtgcctcctatggatgacgactctgttcttcaaagagacatcggagagcttctttcacggtggggcgggcttcaaatggccgtaaagaaccagtggggaggccatgattctctcaagaaatctcaagagctagctcacaatctttttcatctcatctctcaatcaaatggttcgattttctttttacttctttagattttatgttatgatcatgaatatattgatagtttgattccaacattatgatatgagcagtgattacggtggaagaaatagagaatttgctacatgaaagcttgcttctttctttcaacacagagattgaagatggcagcattgaagaggtacgtactatttcttgaaaatgtagacgatcaatttacttgtgaattatgtcgactaatctttcatcgtgtgatttcgtcaggtagctgaacaattgatgatactccatgaagaacatttacgtgggactctttaagcagtagcttgaacgatttatatcatttttggtgtataattagatcaatgtaagatacaaagaattgaaaattgggtggacaacaaaatattattcatcagaaatcatagaatataggaatacgtatcaaaatctatgtttatttgatgtaatcattttgtagttgtgatgaacagtttttcctaatgtaatttcaaattaaccagtaagacactccatcatgattaatgtggggaatatggaccgagtgaccgataccacgtagaaaatatatatctaaattttccaatataatgcaacaaaattcatattgaagcaaaaactccatgtaatttggattcttgacaattttattatggtcaaatcatgtgtgtaatatgcaaataaaaactagagagatggcaataacatcattagtatgaaccactaggctataaattggtcaaagtagaaatggtgcaaatgaaagactaatttacgtgagtgcgattacggtaaaatcggtcattaaagacaaaaagacttaccgtacaacaagtcatttacatgaaaaccaaaaaaaaaaaaaaaaaaccctccaaaaagggattgtccaacataagggcacaatagtcaatttcaagcgattcctcgtttattcgtgtttcatcttgatctcagctagaggaggaactaaaccacatctacagagtcagaaaataaaaagtagaagaagcagaagcgagagtgcaaaaaggttagatctgctttcaaaattgttcgtactgcttctttaccacataaagttcatagctttttacgtttctaccgataattttgcattccgaattctccattttctcaattttgcttaaatgggtgtttctcttctgcaggaaattaggttttgagtggtcatgtctgctcctatctattctccgatagatatgcaagagattgttcaaaatcctcctgggtaattcttcttttctgataactatgttataaatgtgaacaaaaacttgttttgtctctggtttgttttggttatcctgtgtctgaatctttgctttgatttcttgaacaacttagaccttttgatgggtttatgtccggaaatgagaccaaattagtgtttagctgatatctgttcaaaattctgacctaagcacaaaaagttcttgagtttagatgagagaagattaaattgtttagaggaacatttttgtctttgggaattgtgtgaaacttacgttgagcaaaagttagggttcttattctaattgctgctaccataaaggatgtgtctttagggtttgaagtctccatattttgttattcattatgcctgagtatgcttgtttcaacactacggtataatgaagtgtataatacattgtttgtctacatgttttaatggtgctacggagaaggcaaatgatttgtgtttgttgtttgttttgtttatcacacttctctttcatcttctctagtgttgatttgcatgcaggtttgatacggaaccagtcccaatcagtacttaccgagacaatgaacctgtcccgctttcaacttaccgagaaaatgattcagatcatctcgacgccactcagcaagagaacgatgacttttgggaaaacggtttcagtagggaagaggccattgaagatccagagccttctcaggcaaaggaaaatggaaagagaagtgtagacaacagcgctttcactcatggggaaactgatctcaatcaacttcctgcgattcctccggtttcaactggtcaaggtttgccgtatgcccctgttgattggccaagccctggtgatgtatggacttggagagttgggaggagagtgactgctatggggtatcatcaggataggtttcttattctccctcaaaggcttcagcaaaagcatgtcccaaagtctttcgcaagcaaaccccaacttgctcgttatctcgaatcggatttccctggcatggatgctgatgcattctttgcttcttttagctggaaggttccagctctcttccagcctgcaaataaaggtgattttatagctttccaagagaggttaagattttgcagatgttcatagatgaacgtaatcagtgatatcattactcttttgtagttgatgctgcgtctctttttgaggagacaccgaaggaagtacagactgaggttggccagaatgatgagaatgctcaggatgggaaaggaaattctcgatacagccaaaggaagagaaagccaatgccgacgccacaaacttatgaacctgttgaagcgaaaccaaaatcaactccccgaggtagcagcaacaagaagaagaaaggagccacaactccggctactggacctcaatcctctaccaaaccaaaaccatctcgacaatcaggaagacgtacctcgatccagcagcgcggtggtgctgtggacttgaacttcctgaatgaggaggagagtgaacctgctactgcaccaaagactagtaacaagagaaagaagcgtggagttaactatgaggaagaagatgtttctattccccatatttatgtctctcctatgaatggggtcctcgctgtctcacactcgcctatcgatgttaacccggaagagtttgatagctatctgaactctcttgataacttgatgcagcaacctccagaagaggttgggcgagactcgtctgttcttgttagtgtaagctctccaatgagagaatacgaatgggctgaagcccgaatgaagatctcatctctcctggagaaggattttactactttgttcctctccaaggacgcagcagagatagcagcattagcaactaaactaaggaaagatccaaaccttactgctgaagagatagttaggttgaagctgatggaagagattccgaccttcagcgaagtgttccaagagaacaaaggggtgattgaagaagcagataggttcttctctgctctggaactcaacaaagccaaggtagcatcgcttaaatacgaatacagcgacctgaaggaaaaactaggaagtatccaaatggaagtagacacaaactctgagacaatccgtcaaatcgatgaccaaatcgctcaacttcaagccagacggtctgaattgaagcggtacatcgggaccaaggagaaagagagggttgatctaagctatggtcaaaaaatggtagcgaactcaatcccgaaagtcgtacaggaagttcaatcagctaatttgaagaagcctgaatgggaatgcaagaaagacaatgcgcttaaacgtgaagcagagatcctctctaaattcactcctctcaaaggcttcttcctctaaatctagcctcctcatgtatccccgataacctttagctagtcttgttgtgtcatgtagctttttggtttatgttgcaagagtcttgaaacctattttagacttggccttttgtctatttcatgtaatgttgtactatggaaactatccgttagttgatgaaaagaattagacctttttgtgctttcgttatcttgtttgatacaaccttaaacaacccttgttgatcttacaaaataagagatcatcaaagattcaatcttttcttttattgccaacaacaaaaacagaaggctacacaatatcaacgaaacgaagaagattagagattagtcttcttctcatgttacatagaggacattactttgattcactgaacaagcacaagccttccactaccaataccttgtccaaaatcaccaccaccaccatcatcatcttcttcttcagcattcttaggcacagtaacaatcaaatcaccatcaacacaagcaacagtaacaagctcaggcctagttgattccggtaacctaaaacgccacacgtcaagctctaattcgtctaaagacaaaccaagagaagaagacccatttgtcctcacaacgatcttggttataccaggatgaatctcaaccatataagccctcatttctccatcgccgttacagagacctaccgtctccgccacaaatcgaaaacagtcgtgtctctcttccactgctacatctgcttctgacctcaatggtagctccagaacacggttgaagatatgtggtaatcgtcggagattctttccgggttctcgggtcgggttatgatgatgatgatggatcaatgtgttgttgatgtttctgggaattgggtgcactctcatagcttctgggtttggtttatcgatcgattggatcaaattcagtaacaagagatatgagaaaagtgattgaatctttacgggaatcaaaatcataaaaaacacgagagaaccctaaaacacaaatcagcaaaatgttagatttttgtaatcaaaatctgtatttgggattggatttaaacggattaaagagattagaaagtgaaagaggaaagctttattaggaggatttgaagcaatggaagagacaagaaaagattgcgtctttccttttttatgaatgggtgcgaaggcggtagcaagaagaaggaggatcggaaatgagataagggcatttgaaaatttaccaaactacccctctttttaattgtattttgttacatcttcagttttaatttcaaagttggattatgcgatttatttcggggaaaatgtcaaaaaaagcgcgaactttcaaatttgggacgaaaaaagcatgaactttcgaaatgtcatttaattcacaaagtttcgtttgacttttttaaaaaaatgtcaagtttcgttgacttgaccattttgggcacgtcgttaaatttccgttaacagcgttaattttctattaaaaaattctgttaaatcgaaacgacgtcgtttttagatctccaaaacgacgtcgtttcattagaaaataatgatgcaaaatctgcgtccacaaagactcgaacatatgacctactggactcatatggggcaatataccgctgagttacgacaataatttacaataataacaaacattgcatacatatactaacaaatataatatactattaattaaaaatatatgcaataaattaaaaataacaaaattaaaaaaaaaactaaaaatattaaataaacttaccttaatatattttaaatttcaaatatttaattatatatataaagacatcttctatatttgaaaaattatagatctctctagaattcacataagtctttgcaattgtatttttggaatagataaaaactgaaaaactgaaaattgaaaataatttgcataagtcttttctattgtattttttatatttagaatacagaaaaattgaaaactaaaaataatttctcaaatataaaaaacatctatatagaaaattaatatttcaaatttcaaaatatatatgtatggtaggtatatttaaaaactttgtatatatttgttttttgtagttttgtaatttataatttattgtatatattttcaagtgattgtgtagttttatttgttagtatatatatgctatgtttgtttttttatctaactgttctcgtagctcagcggtagattatcctttaggagtccaataggtcagatgttcgatttcatgtgaatgcggatttagcatcattattttctaacgaaacgacgtcgttttggaagctccaaaacgatgtttcaaaacgacgtcgtttcgatttaacagaaatttttaacagaaggttaaccccgttaacgaaaatttaacgacgtgcccaaaatgaccaagtcaacgaaacttgacaatttttttaaaaagtcaaacgaaactttgtgatttaaatgacaattcgaaagttcatgtttttttcatcccaaatttgaaagttcgcgcattttttgacatttttcccgatttatttctataacttatgaaattttgattgaggtctccaaagtaacatttaaaataatgtgattctgaaactatcaaggtaagtaggttttaaaaataaattacgattattatgttacaagattttatttgtagctatgagtataagcttcaactagattttaaccagcggtacaccgcgggaacaatttattttttaaattaatatatataaaagtttgtaaattgtatatatttacaaaaaaattttattttatagtttacaattgttattaagtaacgtcctgccaaacccgtcccgccaacccgtcctctaaaaaaaactcatttattttattaatgttgatcttatttatgatatgtttatgaattattgtctaaatattttgtaattttgtagtaattaaatgctatcaaatatctctacggtttgatgattataatcatgtagaaaagcaatatcaaaaatgataattttgtagtaattaaataatattaaatattttggaagttttattttagtaattaatcgtgaagttaaggtagagagattttgggaaaattgttaaatgtcaaatatttaattagaagattttctttctaattatcaaaaacaattattaaatgtcagtggcagccgctgtaaataaatctcaaatctagaatttatttcacaaagtgactgcaaaaatgtatatatagatgtcatatcataaccaaaattaaaattataaatggtgaaaaaagtttattttgtatacctgttataatatcattgcaaatatattctgagtgatatttactttgaaagtaaaataacggaaatgagattatatctaaacttgatacactagtaattactagtatttgaaaatagcatatatgatccttaactattgttacgtagaaaaataataagaccaaatgtgtagaccaagtaggcatatgtatattgttactcgattggtaggatccttgaagttttcctatgaacttatagtaacgaacaaacattgtgattatgactgtgataactgattgatatgtgttagaagaaaaagttttaggaaatgtacttatgtaggacatgtgtatttaggaaaatggaatctgaacaagtgctgctttaaagaaaattaaaaaaaggtgaaaaagttttcaataattaataatctttaatttgtagaaagatagcaaaagaacctttttcttgttaaactttattgactacaaatgttatattctttgagtcatttttgtaacatgtttcaaatatgcatctacatatacatttttgcagttattttgtgaaataaatcttggagttggaacttatttacaatgggatgccactgaatctattactttaaatttaattgtggaaattataactaccaaatatgaatttaatttcagaaatattaaccaaaaacgattgttaccaaatatctaaaccaatccctttagatagcaaaacaattaaattccttatttcttatctaaccaataatattaacgaaatcttaaatccatatattatgagaatcatttaaagcaaccttttaaattgactcaaactatatatcttttaaataaaaatataattaaaaagaaaataacaaaataatgttaaatttctcgggacaaagttatatcgtagatcgggtttgggtcgatattaaaacggaacgatataccacagatgaaattctaaaattaaggattaaatcacaattatatataatcttaaaaagttaacaaaataaacaaccttaacaaaacatatataacttaaaatttaaatttttagttgtgaaaaatcgagtatgaccatattgacgaaaaatatgtgggttcaacgtctcatatcgaatatatgtgtagaatcatatcattagtaagatcaacattaataaaataaatgagttttttagcggaacgggtttgacgggacgttataaaatattaatatttgcaaactttttatatacattctaatttgcggtaaaaaataatatatattaactttaaaaaacaaatcgtctggcagtgtactaagggtaaaaactccaattacataatctattattcaattatacaaaatatttttaatatataatttttagaaaaaaaaaactatctccgcggtgtaccgcgggtcaaaatctagttaaggtttaaattagtatattaattgatggtaaaagtactgttatttgtaataatacgcagttaagtgagtttttattcccataaataaagaaaagttcttcttatataatgaagagtacccacataaaggtgttgcattagcgtcgtgcaaatttcttatatttagagagaaaaacgcagcttataaaatcaacataatagtggacataatgtaattgcatacgtacggaagatagagacatcaaaatgtttggtagtaataaattggggaaaaatagacgcaacaaaacttctttggtctttcctaatgagaagatttcaaggaatattttgctttttgtgaaccaaactgattctcttttcctttcatcgatttgtatccattagattatcaatttggccacatgtataaatttggtttttggttttctttcacccaaattttaagaaggtttctatttcacacaaatatttatacttctcttatatacccctaaaactgatagaaattttatgcctgttttataactaacttcaattcatcgtaaaaatatttgggaattttagagaaacacttttattggttttttgagttttatttattctttaaaagatttgtatcattagtattggttctattggatgtaacctgaagacaaaatatgtcacggtctcacggaccaaatattatttatactagctatagtcataaaatcttggatatgatgaagtgacacggaaaaaaatccaaatgttgacatatgtgtgaacagaagaatatttatatagtctaaatttccgattttatttgtgtaccttacgtgttataagtcgaatagaaaactttaaattatgtaagtgttaacattatagtgatgtttgcactggatcaaaaaatcagttaacgttaaaatatatctaatttatgattatcaatatgttatcagttaaaagtaaatatgacataaaagtttcaatggcaatagctggtgtgaataaaaagtagaataaaaaacattcgatggatatttgatgaagtctcttccagagtttcagtttttgaagtccatttgatggagctcttaattaggcctctatttgatgagttcagttacatttgtgatcacttataatagacatttgtttagatgaacccaaagcccattctcagcccaacttaaaaggtttaccgttaagaacttatgattactatgactggtttgagctctatgccaattctgacgctggcaccctctgccgttataggtggtatggagatttacggggttatatagttacgctcggtgctctatccgatgcagttgtggagacttactggtctgatggaaatgtggaaattttgtggcaaaatattcaatgaaattacagcaaacgatgatatggtcgaagggtataaaatcagaaaagtgtactttcaatgtggtcttgtagaacctccgactatatatatatgaccaaattgagaggaattttgttttttttcaatcgagaggactaagtgtataatcatcttttttctatatgagtgtgtaatcatcttcaagaagcgctagagacgtttgaggaaatgacgaatgtaataatttgtgtggagaaagagacggattaaagaacttgtcaatgagtatagaatccatcgaagaccaacatatgaaaaatgtcattaaaatttggcagcgttagtaactgatataatagctagccatccaaatgcataaagttttcagaattacgagttcgataacttaacatgttatggtctctactctctaacccgaaaaatggttttcttggttaccaaacaaataacataacatgaaaatattgagctcaattcacaagttaaaaatgacgacaagatattctcaacaatggctagtgaattttgagatcatggtttcctcctggataattttgaccatgttaatagcttaagagaagaatcaatgtgtcatgtgtggaaactaaatgacaagtctgtttgaaattaattgattagttatataacatatcaccgaccattatttatgacattaattaaacaaaacaaggaagaaagaagcatcaaatattatacattaagtaattagcgaaatagaagaaaaatggatcagtacaacttggtggtgttagatctaccaaacttcttggacgtagaggaattcgtcaactcaccggacctcctccgtagcatctgcctcataccatcagcgacatgaaccgccggattatcttttttaaacttgccacaaaacgacacgtgggccttgacggcttcatcaactgtggtcatcttccggcgactcacttcgtccctcacggcttcggagcagagaccacagagccacttgttgtcgaagttagatttgacctcactaatgtagtcttgtgtgcaatcttccattaacccacaacactcacatctcacggattcgatctccattttcactaaagaagcctataagcttcaatgcaaacaaacaacaaaaaatgttttttttttttggttgatggagaatggttttatgttgtgggtaacgaaaacaccaagttaatgctttatatgttgcattttttggccggctctcgacactttcaataattaatataatactctagatggatgtgtataattgggcagatagagtaataaatctaacggttacattcgtttttttctcaaataatataaactatatgtatttagtaacaaaacgatgacaactaacacaaataaaaaagggcagtcatgaatttattttctttcctttttgggcggtcgtaaatttttttctttcttttttggacggtcgtaaaaactgtatagtttttttaattgactgattaatatataaaagttaataaaatactgagtatatgaaaatatttctatagtctaaaacctatatgaatcattgaatctcaatctatgtgtagatctctaatcaatcaccggtgttgtcagataaatttatcgtgggttcagtaacctattacgtagccatgttcggacattatggtgtctcaatggcaatggaggaaaacgaatttggcgaaaaatctatgggcgctttttaaaatcaaatgtgtttacaagttacaatgttacattttcgtatgtttttgtttttcttatgagttataatatgggtttataaaagcagtcattaccaaaaacttataaaagttataaatatgaagaagattagaaagaattagccaaaaaaaaagaaaaaagagagagggtagaggagttgccataatttgctccatgttctaagggacatgagatggtggaaatagagacaaaggtggttggatttaggagggtccctcacctacccaattataccacacttctctcaatctcctccaaaattgttatatccacacacacacatacatatgattcttaccattatctatctatatataaacaacacatatacatgaaatatcttcgtatatatgcttttattgttagttttcttgctttatcgtgtatattcaaagtagaatttgttcgggttatgacttatgagatagttgtttttgcttataaagttataatcactaagcttggagttttttttctttttcttttgagaatgtttcttgccgaattaacaagataaattgtcgctgaatgatatatacaaatgtggtgtctgaaataaaaggaaaaatgtggtttttgatttactacgtacgtaaatctaaacgtagtcttctaaatacatacatatgaatatgaaattcccataacgttcaaactttaaagatgggtcggcttaaagatccaagcacactcgtccccaaaagaaggaacaataattaaggcctatgagtcttctagccacacacaaaaaaaaaaaaagatgttctaaaagctaataatgtagtagtatcattactgtatcaaacaaaagttgttaaaacaaagaaaaattagataaaactaatctgcctatcttactcccactttttcgaatatatcattattttagacctagaaacgtattgagaaaaatttattatttatttaatgttaaataatttctaatctaaagttaaataatactacataattagaaaaatatatacacaaggtggtctgtggttaaaggttttgtcttggagtatagataatttattcaatggcatactctcgaggcataaactgtgggcagttaaagttttgttgtaataaataaaaaaagaaaagaaaaaggagaaattgaatgcaatgtagggttagttaatttcagttaccctatttgtcatgtcttctctcgacagttgcttgactaagcttgtgactgactttcggccatagatttgtctatatttgccatgtcatcatgcaccactaatgtatactaaaacaaacacatcacatataagtttgcatcatatttatttttgatatgcttgctaacaacattaatacttataggagtttgtattttgtaagccgttccatgtcaaatgggtgttttgaaaattcatttaggattcatgtcaagtgggcttcataagaatggataatacatgtaaataatataagatatatttacagaaaacatacaacatatctaagaaactacttgagcattttttcccttaaacaaatataaagcatttgagaataagatgcaacaagaagagttacaagacatgagcatgagcgttacttccgacgttttctttcaataatgctgacaacttttttctccatgcattgaccacttttctgaatcatatttccataatgctttgttattatataatagtattactctataaaccttataatgttttatcaagtggttgaacaatgaattaaaggttttaagactaaatttaggcttcaaactcataagtatgcatgggggtttccattttttttcattagtttcttagaagtttcaaaacatgtatcgtgctaattgaggttaagttcatttatatgtggatagctaggttttgactatggaagatagtaaaatcactatttgtaatcatgtaaacaccttttaacgaattacggtgtaatttatgataaaggagaaaaacagaaccaaaaaaggttttcttagtcaaaatcggtgaaagaaatttacgtggcaactcaagccctgatattaagctagcttttgacttaatgattcttctagcaagttaaaaatttattagtcacaatatgtaagcttagccgaaaataaagatggatacaatgttcaaaatcaaaacaggattagtaattatatatatgaagaaacaaatagaactgaaaccataaaagctcactgcagcctgcagtggccagtgagtataatagagaaccaagaatggctacggtcggacaataggagctctatgaagactgaagaggctttgtttcaaatactgaggttaacactcttgaatatttggcttcgagttcacctagagggagtgtgggtcatgtagttttgtaaatggtggactgtcatatatagaaaaaggatgatgcatgtataaagtattttatgaattaacacaacattagattttgcatcatgtaattatctttttccccatgcttagacttttctctctttctttcttcattgctttttgtttgtcaatgatgtgctcttaaattacttgaagaaaaagtaagccaccaatgattatgaggacgaacatattctacatttttgtagccatgctcgtgtgggtttggtttcgagttactttcaagaatcatgtcactaactttaatttcatgtacacaatcatatcgacctatatagagttttacttcacacgcataacaaaatcttaactattgattaacaaagtttttatatattctctccgttttaagactttattcttttttcataaagaatgtcgttttgtatttacagtatagtgtttaacataaatcttaattttatccctagtatttcgcttacttaactagaaagtgcaaggttttggtgtatttataaacattataatagatttcgtaactaatactatcgatgtaaccgtatcaattaaaatgtggatgtattcagcttttatgatcgccataaacgtataaatagtggactatagaaaatcatttgaagttaataagtcagccatatatacacacataccaatttattgatgagaaaagttggatatctaatccaatcaatctataatgtgattggttgtggtggcaacataaatcaactttgttggattggtacgaatatatgctagaagaattttttttctaaaaatggccccaatattttagtctgttcataattaagaacatcattagtatctagttgactaattaaaccttcaaacttgactcattcaatcaaccactcaacgtgaatcatataatgattctcatccacaatatttaatactataatatacatagttgcctgccatggccaagttggtctttcttacatatattctccgaaaattgaaatcaagctcaataattgaagaaacataattaaagaaaagaaaagattgcaaatgattatagctttggccaatataaatgatgatctagtaaagtcatattaattacattaacaaacaaaagtcagaatcagttcttattattaggagataaatactatataagagattaggaacataaagtaaatagatcaaaggtgtacatttgagattagatcatatagttatacactcactgtcagaggttaaagtcgagtgacatataatcttataatggtgtagatattgaatgctatatatatatatatgtcctcctcttgtataattacatgaaaatgttatataaaaacgataataccatgaatcacacaaccaattaaaagcgatatgaatcttgtgaatgaaacaagagtcagctatagttgccatgtgtgcatatgagaccaacgatgttttagtaaagggccatacctatatgcatgtggggatgcctataaacccaactagataattaaaataataataaaaagatcaccatagaactgatacagggaatatagaaatttatattttggattcttttgtgtgtgactagtaaaaatcttgagacataaaagcaaaattagtatgtgtagaaaaattgattggtggatacaagaacaggtttcatatgtccaataggttcattgggttccgttcaacctctcgaccttgtagcaaaatggaaatgcttgtcctacccatcacatgtctcattcatgtatatatgtcctaaaatggataataatcaaattgtgggatatcttgataacaaaaaaaaaaaaaaaaagaatggtaaatcacatatgctagtttgttttcggttacatgttttgtctgaacaaaatgtctaaccaaagaaagaaaacctcagttataaatatatgtttgacaattttgtataaattcattatcatcatcaacctgttcgggcatgcatgtgatttgataattaatacaatgacgctttgattggagttttgacaaaattagcggaacagagaagcctttacttattgacctaattgagctaatattcatttttttttttgttaagtaacttttgtttactattttttatgaagtataagattcaattaatggtcgcatgttaagtagtagccagaaataaaattttcacgtgtacatgtatgcataatgcatgtgggtttgtctttgttacccctcgaatttgtttatttgattttgttttcgatatgctataaaatatggtgtccattcaaaatactactaagcaaatttgcacttatataaacgtggtttggttgggattaatcatgcacctttccaatgatcagataacactataatagtaatatatatatataaaaggactaaaattgcctttgtaaactcttatcctagagctttctcgcacatctcattctttctcgagttttgacaagctttcatttgaagattttgtgaacccggattaaagtcatgggtcacattaactgagtgatctacatccgcgattagcctagtcggacttggctgatatgatagtgaaaaacttgagttaaagacatggaagctttagagaattttgaattacttcatcatatgtatctatacagtttttaccaaatggattgttcaccggaactgtaatgaaaaatgtactaattacgaacctctcaaaatacaatcaagcctccactcgtaggacaaattgtcaaagagagaattttatctggcccaccacgtgtattagccaatcacgccgccgctcgtaggcccataagctgacttcaaagttggattttgtaagacttcatgggtccgacttttacgagttgcggacttgcgggaacataaactagtaaactattcctaagcatataacaagtaataagtgttatctgtgtctatgtaggttaagtgcatggaaatacaatctagttgatatgtgttcaactaaataaatcaatgatagtagaaataccaatcgtaaccataccaattgcttagcttcaaacataataataacgaaatccactatatatagaacttcggtttagtatggtttgtttgtggattgaaccagaccgtttaagagcgcaattcatgttatatataaaagtcagtcgaaaataagaatgattgaaacgggctcgggctttacttaaatcatgatccagaatgttaaaaatctgacccttaacaggcttaagcttttgaatatatatattttttttttgtcaactaagctttcaaaattgctttaaatttgtttataattggagtggtgaggatcttatacaaattttaatggttaacataatgtacctcactaatttatatcattttttggaaaaaataatcagagtttttaatgttgacaacgaaacggtgtcagtcattcttgtataattattatctcaaataaaattcaatgtgctcatttaagatagtcactcaagtaagacataaattattaggattttgatgtatcaattcaaattagatgagggctatataatagtgtaatgctcttcgaaatagtactacaagttgtttatatcacattgtctcttagataaagaaaaaacaaaagaaggatgtgaaaacacatagagcttcttgatctataacatcatttccacgtaactagccattgaatatcctcaatgtgacatatctttgcaactgtcttttacattgttcgattgtcatttcattgtttgttatcttcttcatatcaaaacatagttacttatagtaagaaaatcatacatgcatctatagctcggtgactagttagtaatctaaggagattttcaaatcacgatttcaaacattgaagacgagaaatagactaatttacatgtccgagtatcaaaacacgaaactaagaattatgtgtcttctccttcttgaattttgatgctcgtgttttagttttctgtcttgacaccgcaaatggaattgagttattgtgatctctactgtttattaaagattaaaagtaaccattaaagtaaaacatgtatatatgattatgcatgtagacacataatacacatagataccgataccaaactcttctccaaaccaaaacaaaagcaactaaacaaaattcaccatatctaacgttttattaatcatagtcattatcataactttttttttatatatagctcaaataaaaacttatttcatttagtatcattttcctctgacatcatcatctctatggacctgcattcactgctacagaaagctctatctcccctgcaaattaaaatcaaaacaaaaattacttatttatttatttttaaaaattattaattaaaaaattaaattaattagccattctaaatattaattttctcataatttatattaaatttcacattgtaaatgtcaccatttaattgaaatgtaaaaatatgaaaataagccaaacctgtacatgaaaatgtcatcacgaggcccaagactcttcttacagttacagcaacaactgagaaaactgtcgggtggggaataatccgaatccgattcattaaccgggtcggagctccggaagaaaacgacgccgggttggctctcaacgatacagttatcgaatatatgaatggttctcgggttaggcccgtgacacgtcacgcatgtgtaatcctccgataactccatatcgctcgccgggaaatagccggagatgattctgggagacccaagacccgactcggaacccggtttcttcgtctccggttgagaattcctcgttttgatcccgaaatccgacgaggaaatcggagaatccgggacccggatccgaagctgagacccgaatagaattgtcccggatctcggtccgggttcgggtgtttcgtcttggattagagaatcgacaatggcgagtccgattcttttgggttcgagtttgagacgggtttcgggttcttgggttttcgggttatcggatccaaatgggtttttcaaaacagagaaaggtttggtgtcgagaattgaagttggactcgcgacggcgtcgttttcagtgaagcttttaaagctactaaaagctgtgaagagcctcggaaacggcgtcgttttactctgtttctgattctgactctggtttgtttccgccattaaagcttgcttgcttcttgatctcttctttagcataattcactgctcaatcacacacacacacaaaaaagatcaaaactttataacaatcaaaactttataacaattacacaaaaagatcataacatgtaactcaataacacataaaaatcataactttgtaactcaatcatgcaaaattgtgtgaactaacctggaagatcagaaagttacaggttgtggaagtatgagagaaaatgaagctaatgcaattctgttgcctccatgattagagaaaaaaatatgaaagtgtgacaaaagagaaaagtaactgaaaagacgagagctttttttctacaaaaatgttatttttttgtataactcccgagtttctcgcactttcttcctaaaatattttatttatcaagtgacatgaaacgttacactagagattggagaaaagaagaagaaacaaacaaaagaaagaaattgatccgtttatttgtttttgtttgcttttgctttttataaataatttggttttgtatgtttagtgggttatagtttcgatgaactgagaaagagaaaagaaaacaaaacatccccactgattctcttccatatcctcaaaattcgccatgaagttttttcataagcagaagaaaacagagagcactaaagagacacacacttagcttctctatcaaataataatacttatatgaatcacatatatagagggagagagatttacaatagaaatcagtgggtgaagaaaaccacttcaccagtgaaacttcctaaattcgttttattgtataaattattattgattttaggaattttgtctttttattctttgctgatttattattttgctttttgggttatgccaaggaaccactcacgtcgttttctactgaccctttcgtctttttattttattttggaattttcttatagttttctttctatattattttatttgtttattttagagaaaaggaactttagaaatttaatgagaaagaagttgaataatactcgtgttgtatatcgtactagttacgactaatctatcaatggaggagtactaatgtactatcacaaatattgaaatatatgtgatttattttaagtattatagtattatataacttttcgtattttgattagaaattcacattatagtgtactaaaacgttttcaaaacagaagtttgcaaagttgtttacgtcttgcatgtcatttaatatagaagaaaaatgtacttctcacttgcatatggtgattaagtaaattgtctattactgttaggtgataacattacatatttaaaaggtgtgaataagaaagatattgaagaagactgttttggagatggaaatgtagaaacaaaatatattattctacttcattttcatctaaaattatagatgggatatgaaagacagaaagagatcctttgctagtaaaataatgtcacatatgtatatggatttatcgatcatatcttcttatcgtgactataagtataactttatccatcaaaaatttctcttaaccgcagtttcttcaacgggagtaactcatataaacacgaactaagctagtttcttcaacgggagacaaatagagatgatgaatacgagaacttttggttctcttttaaaatcattatttcatatatactttttctcgtgtaatgatgttaaggtacgttgtggtggtgatgatgactatattgttagcatgggagctaagtgtgggtggactcggtcgctcagaatcgtaatggaatgagatacgatcatacgtacgaatatatttcacaatcttaactgaatatctcttttgctttcgtagctggctagtctctttgggtggacattacacacttgttatattatatatgtataacacgaaaaaaatatcactacttaaaaccaaaactagtgataaattcgtatgagcaaacttgataatcattactttaaacaaacactattaattgctactacatactctatggtccataaagtttaatgttttaggttttattcttgttccataaaaattgactaaattttaacccgcggtataccgcgggacgatttattttttaaaagtaatatatattaaaatttgcaaattttatttttataaaatatttatattttacagtttataattgttattaagtaaggctataacacgaatctatgagacaattgttgaaaaactaaagttgtaacccctattaaaacagcatattaataatattttaaaattttataaatattgattcaaatacatccaccatataacccaattacaaaataaaactcgttctataatttctttacccgtcccgtgattttttttttaaagtagtaatttttaaaatttaagaatataaaagttttgcaaattatatcattctctaatacatttatattttatatatagtaacattatacataccccataacatttttggttttatataatcttttctaaattaggatgatttgatatgtttaatattagtggtcttaaaaaataataaattaaagatttaacccgtattgaaacggtatattaattatatttaactttttttattaatgttgattcaaaaacccgtcactccaaatccgtcttgccaaaaagccatttattttattaatattaattttattaataatatgactctgaattataatctaaacattttagctaataacataggagtataccatttttatttaataggggaatgtaccatatgacccgaatacacttttacccaaatccaccaaaaaagtcttgcaaaaatagtatagagataagaaacgatagtcggttttgataggtataagattagcaaatatattagttagcttaaattagttaaataatacaaattgaaaaggtatattacactttattcgaatatagtatcaaaacttatataacacatagatttgataaatttttaattgttgaatacttttttttgtgctaatttttatgtgattaagatttaatttaagatttaattgattttgtatataaaatattaaaagtaaattgtgagttgtatatgttttgttgatattatctatattgtttagtgtttaagattatacacttgtagtttgattgttaatttaagagtttcacatgtagtataccatcttgtattaatatcgatctaaacccgtcaattctacgattttccagcttgtattaaaaattgaatcacatcatacacataaaaaaatctaatatgttattaattattgtagtatataagattataaattttcaatataatatgtatgaaattgaatataaatatttcaaattatgacccgttataatattttttcatgtattgaacagtttatattcgttttcaaaaattcaaattatggcatatgcgaaaaaactctaatttttttttttataatgatgatattatttttcgcaaaaatagaatcatataaagatgagaagtgaactataataattaataaaaaattaatatgataatttagagatcaaatctaatttgttgattttaataggttacttttttggaaattaatagtgtatttcgtttttctaattaatttaaattaattaaaatttagatatcaaatcttatatgttgattttgattggttattatttttgaaaattaataatgtatttcgttttttaattaaatttaattaatcaaattagtatttgactttttaattcttaaaaagataaattaatttactctttaaaattttatttctaatggcatacctatgtaattacttacaaaaattaaggttatatttaaaatgtacttcccaaataatatagtaggatattataaattaatattattattatttttattagtaaccaatacagagaaaaatagaatttatattattaaattaatagaaaataataaaaataatataaaatttacttttcttaatttatatgaaaaacccaaaacgtcatttttttaggaacagatgaagtatatatatattagtacgttattactttttggttagttgttgatttatatttgataaaaaaatttaactttgcggttctagaaattacattttcaagcaaaatacacactaaataaccatgactgatttatgcaaaatacacactaaataatctgtatacccgtgttgtaacattagtataatgtttgtgatacacattgaattttgtcatctctacgacacaataaaaaaaaatcaaattttattaggaattaagaaagcgattaaaccatcgaaggcctcctccaacacctcaaagaaaaacacatcaaattgtgttactaattaaagttgcgatcttattttgacaagggttttcagtggttccatcatcttttttgaaaccatgactaaaatttataatttttaaagtataaacatttccggatttggcaaaaagtttccattatctttatggaattgataactgttacttgcatatatgtgtgtgctgtgactgttttccattatacaacttaatggaacaaaattaataaattattcaataaccaatcacagttcggggacaagaaatcaagaataggtttaagcagtgtttgtttgcaaacttgataatcatcaatttaactataatagtgtgaagtcactcatagtggagaactgatgaagcatcatgagtcgtgtcatggctcgtgaacacaatccatcatatcatcgtgaccgtccatgagatcagaatctaatctctctgttgctgtcagagaaaggtcccgcaatataaccctctgagttactaagagttggctccacgtgtagtaagtagggaccatataagctcacatcagcattcactgcttcctgtcgcatcatctatcttttacacagaaagtaaaaagataataagtgaactaaaacaaaataagagaggtaataatggttatggaataggcgtgaccacacgatgaatacaatttgcaatttaggttttggaataactcgttgattaagaggttgtgttgcttggttttttttattgaaattgttggaattaaagaaaaaacaagtgcgtttgttacaaatatatgtgtttcgatatcttacttatatactgactaataattttaagaaaagaaaccgtaggtatttagcaaccaatctataacgacttatgcaaactaagaatacagatattaatctcgcaagaaactatcacttgtcgatacttaaggatgtcatatgtaagatcaaagttgtataataaaataagcatagaggtggttgaatatgaggttgacacatttaagatttgataggacaagaattgtaaaacatatatcaatttgattttgacgacactatgcatgacttctgttcaagatgcatgcgtgctacttgatactttctcaaagactttcattcacacacttttttttcgcattacttcctgaataattaaatatatggaccgacttttatgttccaaatattaattgttttcatgtatagtgtatgattcatccgacttatatagtgccgaatattttctgttctgtaattgctggcgccatgccactattattatctattcctaacacataagtattcttgttttagtggtttacaagttctgatttttcaaaaatctgaccgttcaatttcaacttgtgaaatctatgcgacaaagaagaattttttctctctctcttttttttttttttttttttgaaataacgggagtatcttaaatcaaaaaataaactaattaccgtagcttgtaaaagaatggatatatttgccattaacatttcacattcatatataaattttcgtcaatatcattatccaattcatgacgttaagattactactatagagattattttcacgaacaagacagaattcagagaaagaaagatatgtggttgagtcaccgtagacacacgacacgacttaaacttaattatgacatgacaagaacatgtagacaaccatcatttgttgccgtaatcatctttatctcttcaaacctaacgtacgtttgatattgtaacatttcagattacggtaaaaaccggatattatttagttactttctccattatttttaccgttaactatcacacaaaacaatcatctttaacgtaactatagagaaacatgtctctgatgactcctttgctaaaaccatacttctcaagtaaaccctcttttcgaaatccagctttctccaaaaccctttgggacgctttgttctccacctccaccaccgcttgtagcctcaccacctccggaaaatcctccaaagcttgttcaaccgccatcctcaccgccgctgtggctatcccccgcccccaaaactctttagcgacagcgtatgcgaggtcggctcggcaccgaccatcaccggagtctggcttgacggatacgtaaccaatcgaatgaccgtcttggaggagagagatggaacggcgccatgggtgtggtatagccttgtttaagatgtgttgtttagcttcttctaaggagttaacggagtcccaacggaggtaacgtgtgacgtcatcgtcaccggcccatttaaagacgtcttctgcatcggagagattgaacggccggaggaagattcttggtgattccatgatcatgtaaaattttgttagttttataaatctcttactataatctaataatatacacaaaaaatgcaacaaatgtaaatatttggaagtgatgattctattaggattgaaaggcccattaatgatttgggcctattcttatcggttaatgatgggtctcagatttagaacttaaatccaaattataacagagagtaacgcttttgaattttgattacctcttataggctttttcaaatgtagaaagggatggagtgtaactcctatataccaggaatgagaaagtgagaaagctggctccttaacacaatgaagaccacattattgacacaactgaaacaaagactcgttcaacacaatatattgtgacacacgctcggttagatgtcctcctaaacccgttatgcatctcctgcaactccatcaccttactggtacatttttcaatcaatttcctgtaacataaattcacgatatattatggatgcatcagataacataaagactacgtactacggtactaggatgatctttcttcataccgttattacactgaatgacaagaaaagtgtcaccgtaccaaaacaaattactggcagacgaagaacttgtgtttggttaacattgatgataccgagattagaacctccactcttgaggaattgacaaaacagtcaacaaaggtatgagctatatttagtcaggtagccgaaacaagtctaaatggtatgttaatgcatcaagttaaatgaaaacaaggaggtaaatcattaaaaacacaacacattacttttcattttgcatgcattcgttgaaattttgtgcttcttatatctactaacgtcaagagcttatctcacattaggtctcaatgtttcataacgatagattattgctttgtcccataaaatgataaaattctttttataatataggattttataaagttgacataagttatttgtttccttttggatatctgttttgtgcatactatatctatggctcttgagtttgaacccgaaacatttagtttaccatctccttcccatgtctcagatttggatttgtggcttttctttagacaattaagattgcctttttgtggctttttaataatcttaaatagaatgtacaaagagatggagttgtaactcctacaaaccaggaatgggaaagtggcaaagctggctccttaatttaacacaaggaaaggaagaccatgtctttcgttattgactcaactgaaacaaagactctatcaattcaaatactttcggttacggacaacgccatcaccaactggtacacagatttttcaatcaatttcatggacataacataaattcgcgaagagtgaagattggtgtttattcataaactagtgtttttgaaattcttaccgttgccacaggcaccataaacgccacaaagctctggcagatcaagaagtttttgggaaacaacgataccgaagctagggcctccattgttgatgaattgacaaaagcagtcaacatatgtcttgcctactgtatacacctcagaacaacacgcgaaactaggagtatggatacgattatcagttaggtaggggaaacaattcaactgcatctgccctgtctctttcaagcactcgtcctcgtccgactgagcagagacgcttgtagaagacatcacaaccacgaaaactgtaagcaacactaaaaccactcctatcttcatgtttccttgatgaaatacgtggttggagaagaatcttttgagttttgttatgatcttttcagattcgtttggtttttcagagtcttgctagctaattggtactatatataatataatactgtgtgttttgtgttcaattttgttttataatatgaacaattagctgttatttttccttgacttaaccaacagccaacttgtagccattattaaataataatttaaatacaatacagttcgtattactataatttttaatgtcaattttgtttggttttggctacaaagtggacatcatcttaaccacgtcttgtaatacattttttatattcatcagcatcattctatataacaatacaatatgtttcgcaatgttattttgtatgttatttggtttgattaaggaacatgagatgattattgtataatataacgtgttttgtattatttatttttttgtttgacaaaatgaatgctgctgatgaataaaaaaacgtattatcatctcctcatgttcgtttatgcctgattgttttgtcatgtccgagagcctatttttaattttggctattacttttgatccgctattccgtttgatccgaaatcaccaccgttggaacagccaattcaatttcctatgactttgatgaagggctcgaaaacaatatcacaaaggaaagtcttcatatgacgtgatctttcaagtacttcatattgattatggataatatcatatcatctctcttgttctttccttcatattccgtcattgtttggtcttttaagaaccaaatatcctctaaaacctctcttctttatggttctcactccaacacctaaaatggatgaactcaatgcaaaggctatcttgaagaagtctaaatggtgtgttaatgcatcaagataatgaaaacaaggggataaaatcattaaaaacattcattgcatacattccttgaaagtttttattcttcttatatctaacttcaagagcttatctcacattaggtctttatgtttcataacgatagattgtttgctttgtttccttttggatatcgttttgtagtactatctccggctcttgagtttgaacccaaaacatttcgattactaccttctcaaattgtgttatggaagttaatgattattgtaaacggtaaaaagatctccgttggtacaaagaaatatcactttagggagtaagaaatcatacagcataaattacatcgcacaaaatagagagtaacttttctttgggcaattaaaattgcctctttttggctttttcactatcttgaatagaatgtacaaagagagggagttgtaactcctataaaccaggaatgagaaagttaaaaagctggctccttaacccaatgaagacacacattattgacacaactgaaacaaagactcgttcaacacaataaacacaaacaacgattacatcagttcaaatactttcggtttgtgacacacgctaggtttgatgtcctcctaaccagttctccatctcatgcaactccatcaccctactattatatttttcaatccatctcctgtaacataaattcactatatacataaagactacatactataggattggtgtttcttcataaattgatgttaagaaattcttaccttcgttacacacactagcaagataagggtcaacgccacagatctctggcagtcgacgagcttgtatgaagttagcattgatatcgagaatagagcctccactgttcaagtattgacaaaaacagtcaacagaagtcttggatatgtccagcaacgaaggacaacaatccgaatcatcaggcaaggaaggataggaagaagtcaggtagctgaaacacggcttcagtgatttcttcaactcgtttttgcagtttgactgagcagagacccttgtagaagacatcacagccatgaaaactgtaagcaacacaaacacaaacaccattcccatcttcatgtttctttgttggagaagaatcctatgtgttttgttttgatcctttcaattttgtttgttttttcatagtcttgctaattggtactatatatagtactgtgtgttttgtgttatattttctttataatatgaacaattagctgttatttttgtttgacttaatcgaaagccaagatgtagccattataaaatacactatatttcgtattactataaaaaagttaagttgcaaattagtcactttttaaaacttaattggaaaagtagtcactttactattcataatttgcaaaatagttacttttcactgtttgattcgtacacttagattgtacaccacttttagtgtacaaatgtatataaaaaatacacagcgtacactttacatttgtacactaaaagtgatgtacaatccaagtgtacgaatcaaacagtgaaaagtgactactttgcaaattatgaatagtaaaatgactactttcctaattaagtttgaaaaaatgactattttgccaatacaccctaatttttaaggctacacgttttagttatactaattactatgtcaattatatactattttttttttgtaattttatattgtaccttatgtagccatattttccaaaaaccgtttactgatacacgaaagagattattctattaggcttgaaaaagcccattattggtttgggccttttcgcatctttcggtacttacggaaattactaacttacccattgtggttttaatcactctttcttcttcaagagtctgtctctctgtgcaagcttcgtcacacgcataaaccctaaaaatcgaaatcaaagacccaatctctatttgtgaaaccatggatccattatcagtcctgaaagaattcacaatccgaggagacattgataaaatcgagagagttggagctaattacagattcggatcggaatattcgtttccatgcgcgacggagactgcgtaccgatcaaaaagtggaagtctctacacactagaagcattagtacactacgtgaagaatcaacaactgaaacatggagagtatatgcaatcaacagtcaaaaactcagtcccggcggttactttaccagatcggaaacctctcctcgattacctcaccggaagagtcgcttcttcagattctattgatttcctcttgcttcaacagcaaaacgcacagagtcagaagcagaacgaagagtatcgaccagatcaagacaattcagcttttgtatcgcgcgaaaacgcgattgcagatatggaggttgaagatttcggtaaatccggtgaagatgttgattacattatgctgattcgatccaacgaacgtccattgaagagccgtgacgcgattcttcagtgtaagaatcgagatttctatagtgtgctggtgaattctaccaagagagaagaagagagacagaggattgagtctcatcagaggaaagatggattagttgctaagagtaggttaatgggagctgaagaaagaggtattgtagggtttagtagtggtggtggtgatgataatggttatgatgctaatcctaaatctaagcttcattttaaagctgggaagattggtgaaggtgtgccgattattcttgtcccgagtgcgtttcagactttgattactatatataacgttaaagagtttcttgaagatggtgtttatatacctaatgatgttaaggctaaggagatgaaggggttgaagcctgattgtattacggttcagaagaagtttagtagagatagggagagagttgtgactgcttatgaagttagggataagccttctgctttgaagcctgatgattgggatcgtgttgttgcggtttttgtattggggaaggattggcagtttaaagattggccttttaaggatcatgttgagatattcaataagagtaaggaaatatgattgttggagtattagatgctgaaaagttcaaatcttttggtttttgttttgagtggttttagctgacagtttgtctattgtttgcagttattggattcttcttgcggtttgaagatgatagtatcgaatcagccaagacggtgaagcagtggaatgtaaagatcatctcggtgagagatttgacaccttttttgtttgctgttatgttagagttatcattgagatatgatttaactgaaacaaggaacttcttttgtgttttttgaactaatcagattagcaagaataagcggcatcaagaccgagctgctgcattagaagtctgggaaaaactcgaggagtttgtgcgatctcggtcgcattcttagtacctaaattgttgtatcatctttcatcattttttcttctgtaacattatatatataacatagtgacaacaaagttgttgtgcaatgtggtggttttcaattaatgataaatcgaaactgttcattagctttgcttcacgtctcttggtcttttggaaggtgaattaagatcaatatattatatcttattgctaagatttgcatcatctccattcgattacaaacaatcaatgcctattcaacgcttagagaagggcagagagcctgcattgcattcacaggatttagagacttgatactttctggttcttaaatgtggcaaacgtttgcaaaaactgtgaatgggggtagtatgcgaagaacacaagccctcatggtcatcttcttctcgttttcttgttgttgttacaggttgaagttctttagatgatgtttcagggagactagcggttcttaattcaattatcttcagctctaactatggtgaggaagtttcttactttcatttagcttgtgctgtaaagactccgatgatcaaaccatggctcttgtcaactaaagtttgaggtatggaaacaaacgtaatgcatcatttcacatgtttcggctcttgttcataacgagagaggaagtattgatctcaaattctctcttgtaccttttattaaatgcagtatttgattttaacttatcaggattcttgcttttcgtatgtgaatagtatgtgcgcgtggttccggtgtggatattgctgtcttctgttggtttcttcccattgcatatagcggttgaaggttggttcttctcatatctaacttgaaaagtttatccctcataaggtttcatgtttcataattaaggctagattgttgcgtgccgcctaaagtctgtcatattctataggatgttttgtttcatgcaaagtgaaacaagtctttgggatatctttttctatttgccatctctggctcttgagttttgaacccaaaacagttagattgctgccatctaaacttgatatttgttgagagagctaaatggtctgttcttcaaactgtgttctggaaagtaatgtttattataaaaggtaaagagatccaaaatgctctccgttggtacaacaaagcaatatcacccggagagtagggatttacagagcataaaatacatcacacaaaatcacaacgaaatgtgaataaatagggacaaataaagaatgcaatctgagtggcacaaaagcgtatgggaaaatagtaactcagaagattgccatgtaggaaaccgcggagaagaaggcaataagaggaaatgagaacttgatagagcttccatcagacgatgggggtccgtctccttctcctactggtacggttttcgatccattacctggtcctaaaataaattcccgatatggatgcattagataacataaagactgtattgaaattggtgtttcttctttatatctgttttaagtcatttacctgaagagtttggtgattctgcaggagagtcagaagtagaaccaccaccaccaccacctgcaaaaacagaattccgcgtaagattcgcaagaactaggattggaacaatcttcactaacctatgttttgaaagtcttaccggtattacagcgactgacaggaggagtctgaacattacaagccctaggcagaccaagagcttgtgtttggttaacattgatcccaagctgagagcctccaccgttaaggacttgacacaaacagtcaggagaagactggactactctactcaactgattacagcattgctgattaggagaggtagagtttccagttatgtagttgagacacggcgacatgctaatcaacgcgtttgtgcagcttgactgagcagagaccattgtagaagacatcacagccataaaaactgtaaggaacactaaacccatttccattttcatgttttcttgaagatgttgtgtttgaagaagaatccttttgagtttgttttgttggtttttgttatgtttgatttggatattgtggagtcttttgatggtataaataaggaattgaggaagcaaaggtggcttaatttgggtgaccaactctttcctacttttctaacagtttttggtttgttttgttcagattcggacaaaatgatgagtgttgtgttgtgaacagagaactggtccgtttgtaatatttggggtcggtggtctttgtgacggtctaggctttggttgttgaactacttcctttgattaaggtttatggagttttgctatatctacacaataatacataattgttttgtattattgacttgaccaataacaggtgtcgaaaattctcagttagtacatcatcttttacaagtcttttgacgttctagaccaaattatgttgatttttgaatcaatggtgagttattttagtcatctggttgccgtgttttgaaactaagaaaagttgaattatataccgtaaagaagaagataatactaaaaatccgaatacgacctacaatgaaactaagaaaatcagtagccaagaatgattttgagtcaatggtactaaatggcaaaaaacattacaaactaaataaatgacttttggtggacgtctaataaagtaatagcaatgaataaaagtaaagtttttgcaatagagtctttcatttaattgtaaatggatgtcttgttaaccaaacaatattttgattgttttcattgctatgtgctttattgagaggatgagagcacatgcatgtcttgttttgtaagctgtacctttttttgtcataactcaacatgatagtaatggaatggaatctctttgatctcttgttaagttaccaaaacagaacaaccgtgagagagtggttcatctaatacaataacaagacatgtatctaccacaatcctcacatacacatgtacgcatcccattggccaattcacttccaccaacgaccccaattaacaaaaaccaacatgagttagttattagtagttgacctatactcacttcttttatcttccctccactctctccaatctataaaaccaaatccaacaattgcttccttctcatcacacttcaaacacaaaaccacaaagctttaaacttccaaaagaatacaacaaacaatcaaagcttaatctatccaacaatgtcgaagattatttcccttgtggtggcgatgatcgcagtgctagctttgccgattcgtggtcaacaacaacctctaagccaatgtactccatcaatgatgaccaccgtgagtccttgtatgggcttcataaccaacagtagcagcaatggaacttcgccgtcgtctgattgttgtaactcgctgaggtctttgaccaccggaggaatgggatgtctttgtctaattgtcactggaactgttcctttcaatattcctattaaccgcacaaccgctgtctcacttccccgtgcttgtaacatgcctagagtccctcttcaatgccaaggtaaataaaaccaaatcattcccctctaatcattacatttaataaacttgcttgaatctattatctaacaaatgttttgatcttccatctttttacagccaatattgctccagctgctgctcctggtaaacaatcaatgacattattatctcaattaatcacataattggtttcttggaagataaactgatataaaaaattctgttttggtaataggacctgctgctacatttggaccatcgatgtctccaggaccagagacggatccaattgttccagagccaactccggcagctcagacaccacagtctgatacaacccgaccatttacaccatccgtcgacggtggagctccaacatcagacgacggaggaagcaccagtcgaccttctgagactccttcatccgcctacgcactctcaccatctcttctcttcttcagcatcgccctcgtagctctcaaattctactgatgattccttttgtttctttgcattccttatgtgatttgatttatgcatcgttgattatagaaagaaaccatttatttggtcattgctttgtggaataagcttttgtgtatactgttctctgtttcgagtgagatttattttgtgttgttgaagtaatacatcatcatttttatggaatcgcaaacactattgatgctcaacgattaaaaagtgtcaaaacactaactcccgacttaaaatcaaaagcaaatgtcacagacacataacatctgaaaaccaaacacaaaaccaactcagacaacagcagttgtgacatcctttacggactgacgccaagcgtaatcacgagctccatctttgtcaacaatcttgatcacaaagtttggtggtgcaacaacgagtcttgaccggatctcaagtatgcatttgtcaactagttcaatggcttcttctacagacatgtcactgcggtaatgcctgtccatcgtggagagggagaagtaggagccgtaaccaaaagctcccttgtcgactttgtgaagagttgcaatgtagtcgatgtagtaaagtgatgcaccagactcatcgtcatagccagccatcaggatattcaccgaatacggattctgattcaatggagcataaagaaaacacacagagatatctcaaattttccgccatcaataataagtagccaatcataaacaaggaaatccagagcaaaggccatatgagtttatcagcaaccttaatgttatcataaccacaacatcacagagggaagcttcaattcaagctttacaatatcattcttacaaacttaaaattgctttaacattcaattatcacaggcacataaggcttaagataaaaaaacataaattcataaatctcgcatagttctatgaccacaagaccaaataaccaaaaccgttccctaatggcagagctaaaagaagaagaagaagaagagcttaccttcctcaaagcagtagcgagctctccgcgagtgaaattggcagcagcggcggtagtcaacgggattccatttctgaatttgtacaaggacacattcttctgaacgtactccgtaaactgaaccctaatcaatcccaaaatccgaagacagtcaaaattactacctccaccgctaaattacagagctacagagagagagaagagtatcggaggaggaaattaccggtcaccaggctcgccactagcagcaacaagcttgtgtgagtcaagtaccatgatcttgtcttcgttgtttttgtgaagaaggatactatgaaccgccgatgtatcagcagcaacgatggcgaatccattcccaacaagaccgaatacacactccatcttccgtctaca

SEQ ID NO: 1043 - DNA, 71327 bp, Arabidopsis thaliana
atcttcattgatgcaatctgtattttgtgcattgagcttgagctgttttgtgatgttatgttctttctgttttgttgtttggttcttagaacatttggacccggtaaatgttaagatagctgagttgagagaggctttggaatctgttgttgctgagcagaagtatttgaaagctcgtgacactcgtcaccgtcatagtaagttttctccattcgtcttacaagcctcattcccttgattacccgagtaacttgcttagatgcagtatgacaatataatgagtttttagacagacatcattgaatggcgaaagatgcaacctttatacgatctaacattgttctgtgtttggtgcagcgaatgagagcacgagaaagcgagtgatattctacacagtaggagagtacattttccttgccgcagctagtggacttcaagttctctacatccgcaagctcttcagcaagtcggtagcatacaacagagtttgaacatagcaaaacctcagagcgaggtcttgtgtccagtttatgtttgaatcggtgatcaaaacacaatcctaaacagtgttagttaatttaaaagcttcaatagcgaaagacttactttttgtttttggtttctacacttttataagtttactaatgcagaacttgatgaagcttttttctgaattcattgattagtgaatatcattatcttgttattatcgtagacaaattgatatgagatccttaattatgataccaaataaaaaccaccactaaagtgaaagaaaaaacaaagtcaaagtaatatacaatatcatacaaatatctgcaaaacgtggaggaaaagaaaaatcgaataattcgatgattctctctatcaaagaaacgaaaaagtcgtattgaagttttgccatttgtttataaaagaagtggctgttcaacgattctaaagtcatttactttaccattttgatctgttgctctgtttcactgtgcgtgatcgggaagaagaagaaaatgttggcgattttcgacaagaacgtggcgaaaacacccgaggctcttcagggtcaagagggtggatcggtttgtgctcttaaagataggttcttgccgaaccatttctcctctgtttatcctggtgctgtcaccatcaatctcggatcttctggtttcattgcttgctctctcgagaaacagaaccctcttcttcccaggttttgtacaatagtttattcctcaggatgatgttttcttcttctgtcctagatatgagagatttgctatcttaatgtttcactggcttgcaaagatagtttaggatatgtttcactgaatctgagagattgagatatcgatctgttgttatgttttgatggaataatgaagttatatatctactttgttgtgatgtttaaaatgtgttgaaactggaaggatgtgattagataagtggtggtgattttttcaaaacaattttgtgtgtgtgacagattgtttgctgtggtggatgatatgttctgcatattccaaggacatatagagaacgttccaattcttaagcaacaatatggactaaccaaaacagctacagaggttaccattgtgattgaagcctacagaactctaagagatcgtggtccgtattcagctgaacaagttgttagagattttcaaggcaaattcgggtttatgctctatgactgctccacacaaaatgtcttccttgccggggtaagtttgaattctgcttctttactatttgacacttatttctgcatattgtaatgctgaggttattattattatacgcgtttcaggatgtagatgggagtgttcctctctactggggaaccgatgctgaaggacatcttgttgtttctgatgatgttgagactgtcaagaagggttgtggtaaatcctttgcgccattccctaaaggtatgtagcaagccgtttttcgggttttgaagacatctcactgttctttgatctagtgcaaatatgaattaggatgtggttgtgtgtatgcataatgcaggatgtttctttacctcatctggaggtttgaggagctatgagcatccatcaaatgagttaaagccggtaccaagggtagacagttcgggtgaggtttgcggtgtaacgtttaaagtggattctgaggccaagaaagaagcgatgcctagggttgggagtgttcagaattggtctaaacaaatctgaactagctgaaaaaggcttgttttattttttacttgttggactcctgtggctgtgttccacagatttactcttttcctgatattctcactgtagccattctaaggactaatggtgctcttattgctattgtacctgtacttggtaacaaggaagctaagaataaaatattttataaacgtctaatgattccagtgtatgcatatgatgtcatattgataaaaccagagctgcaagaacatgagctccaacaataacaattcataaacaacctttggtaacaaaacaaaacctaaaactgtaatgaaacataatgacaggtcttagactcttagtaagagcctaaggttaacactgcctgcagatttctccacattctctttacgcagaaacgcctcgggtaagacttgagccatccattttcagacctctgttgtctgatgctgctgctgcatagtcctgactgttttcccttctccttgaagtcatatcaaggccaacaccaccagttttagactccattgcactttcgttgctttctgctagagtcgcgagtttttcggtaatctgaaaagccaaggattgtgctctgttatgttgcacttcatggaagacgatgcattgagttggctggtcccatgttgcattaagctccttgttgatcatcatcttgctcacaatactatagacgtgtgactcagagatgtcaaacattttggctagctcagctagacttaaggacttgtaacaggagctcgagtatgtgaataaataagtccttagagccacttcactgatactagctttcaccatatcgagtatgctgtcgcggttcttgaacagtctccagatatcaagagagttcaaaactgaaaacgcttcttggaagtttcctttgatcagggctctggtggctgcaatgacatggacacgtacattttcagggggtgcagtgaacgcttgcttctcacttttctcgagcaggcgctgaatattcttgctaatcggtttgtgtttggaatcatgcgagtttgctgccatgtttgggacttcaagtagcatggcacaagtaagataaacagcctccaagagctcgaggtttatgttcatatggtacggtatttgtgttctcctctccataagcatctatagttaaaacaaaaaacagagaaattagactctactaaaatgaaaaagaacataatatgttctataaggtcaatatttacctgctctgttgtcttctcgtggtctcgactttgcgagacaccttgaccaagcaactccctaactctattcccagagtacagctcagagagacagctatgtgactcagttatcattccaacccgaaaagcgcaaagaccaagttgtgccattgtcctgttaaagagaatctgtgtagagatgtccatgtgttgaatgttttcttgtagatgactcatcagcaacaagtctctagcagtaacaaaattgtccattaaagcatgttgatagatatcacatagcattgctctggctttggtcctctcatctccatttttgtagataaaggatacaagtgtatccatcatagctctgctgctctttgcgaaggtaggcttacgaggaacaatctccgcaacaacaatgaatgaagaagaagaagatccactttcctcgttagcctcctcaatttcctcatcagccaatttactcatagcatcaaaaacttcttgaggcttgtaatagattgactcgactagtataaaggctacctttgaagcagctttagaatcgcctgtccgctccaagtagtcttggatactctgagcaagagccaagaacataggctcatctttcaacctctcaacataatcattggtgtgaggatcaatgcactgcaaactcttgaaaaactctgtctcaatcttctctaagaatgcaaccaaatttcccgagacccgaatggttccatcgtatgccgctggctttgaagtttccttctcatcaggttcaacggtatcatccacaacaatgttatagtacttgacaagaatgtcaagtatggtaagcatgttaaccacacatttcttccagacatcgataggcatgtatccgctgagaccaccagaattcacattaaactctgctgaaataacactaaacaagatttcaaccttctgtgcaggagtcttggcgatctttgtcaagtccatatgcttctgcgcatgagtctcgccgggtttgagtttaaggctagaacttcttcttttgctccaacgagcagccctaatttctttgaacttcttgttgaccatgttccaagttatctcttcatgatctaaactaaacaacatctcccaagaaacattatcagcagaatcctccaccacctcctcttcatactcatcatcgtcttcgatttctggagactccctaaatcttttgatatcttcttggtactgcagattgttcttcttcagtttctgtctcattgcgttcaaagccttggagttactagtactcatcttctcctttgttttcatattatcttcattcaagaaatcttccaacatcacaagggtcttgatatacaaagtcggagtctttacggacttactaatctgtttgttgagtttctcaaacgtttcttgcaagtaaacacaatcattgatgttcatggcatgcttcatattctctatagtgttggccatctcctcaaaacgtttatctttttttggcttaaccacacgtttagtatccataccacaacaaatctcaccgtcaggtaagtctgcaaggtaacgagtgttgttaccctcaacctcttctttttcaaagtcactctcatcttcactttcacttccactctgtaaacgaaacataagcaaagaaaaagcattaagaaactgttacaaaaaaatataggttttgataagtaaacaaaggtctatggaaagaaacctgagcgaaaaaacgagaagtcgtcgtcatcttcgttagcaaggagaagaacctgatacatcaaaatataaaactttgagacgatggagatataattgcaggggggacacaaaacatagatgaagaacaaaaaactcgaacctaaaatttgttcaaggaaagatgaagaagaatgaaattacctttgattgatttgagacgatggagagattgatgtgagacgatggagatgcttgactagagaataacgaatcgttaagaagagaggcgaattagggtttactataagagaatattacgtgattagacacttttttgaaagtttatccgtaattaggcacttaaaaatcattaggcactttgaataattaaaattacttgttcaccctcgtatcgtcggttttctataaccaaacaaatcaaatctattttcactaaaccaattcagatttatggagtccacgattttgtagttgcctttgtgatttaaattttttttccagaatcgtaaaaatccaaatccaataaaaaatcctaaattacaatttctcgaaaaggggactccggcgacgggatatccatctcctccgtcactgtccaccaccactgcttttcacactacactctcgtttgctctttcaaccgtaaaacaccaaacccaattctcttgtcatttcctctaaatctctgcaatttcttaaatcgatttggatttactttgcctgaaaatctcttaactcgtactgtccaaactcaatttcaatttcaattgaggttacttcgagaaaagttcaagaatttcggaacaactaaggtaaagttttgtcatgttgacttcggagatcttgttcgtaattctgtgataatgtttgataacttctctgcccagtttgtttgaaattcagtacttgaggttctctattggacagaagatgaacatatggactacaacacttggacaatccgtaatggacaaccacacattttgtttgcagcgtatgtgtcgttacaaaattgaaaatcattgtccacgaccatacatgactgcacagcttggtgtttgataattcaaggaaaaagccatataaaggttctatttcttaatcttacattttggaagaaatcaaatcattgatttaagaaataatatgtaagcttggatgctagagctttaggtgatcctatggccagattaggatattgatttaactttgttcttactgctactcaacattgattgtctggtattaagttgtaaaagagtaatttgacttatccatttgtgttgatataattggtcattataatgtgattagtcaatagaaaaccttagagtacataatatcaaacttttaactttgttaatttctttaggcgagtgggtgaatacatcagttagacttgcttttgcacatcatgtgatcatcgttattgatgtcatccaaagaaatttgtccattcatacgcaaacatgaaggtactgttgtttggacactccttactttaaaaccccaccttagtttgcaagtcattacttgactaatttactttaaaaacaaaatttaggttaggaacattgtgtcagatcctattttcgatacaagtgggaacatccaagtcaacaaacctacaatggggtaccaaattttattaatcgtctactccttgttacgttggacatgattttttggatactttcttacattttttccttattgaaggtcgtgtttcttatggtttttctgaccatcttcatttctacttcaactcaatcagaacattttggagaggcttcctgcatcccaatcattgaaagatccccaaactgaaaaaaaattctaatgagcaaatgaaggtctacatgtacactaaattatctttatgatttacagtccttgtaatattggacagtattttttggatagatatttaaataatcttcttattggaggcatcgctttttgttggtgatctagtatttgatatcagttccaaacttgaccaacatactcaatcatctcccacacataatcccaaagttgggttatctccaatggaagtatttcttatcatctacaactgtctatcgatgcactctatctatcatttgtaaatatgtcttagtaaagtataataatttcacaacatcattattatatctttcagtataaaatctctctctatcaagatatggatctacacgatgttgtggataatcaggtaggcataaaattaaataactagaacatgtatatttattattactgaaaagcagtcaatttttactacaacattcttagttctattattaattgtttacagaaaacataagattgctatcaaagtcttgttagttatgttgtgaaaccaatctctgaagacctaacataacgcaagttagttatgtttgcagacaaatccatcttctcgtccgtttaattgttatatgatcggacggtcattatttctcattaacttctatttaaactgcaaatcttaccacgttcatttgatccgaattaacccattattctacacgtgtttggtacacacaattacaaaccaaaaccaatgaccggttattcttcttttcgtgattcagtttatttggggtataatggtctattttcactccaaaaacaaagaaaagtgtctcaaccttggaaagtgcctgttttgtctaaactttttcccaaagtgccttattacgggacattcccttactataaaacctaagaaccgattgattttatagttccaaggtaaaaacgaaatttaccactaagaaaaatgtcgaaagtgaaactaaaaagtaaaaataaaaacaaaggcggtgatagtttttctagtaaacaaaaccgctataaaccgaattgaccgaaccagaattaattgaataaaaaagtaaccgagtcttaattgtcacataaaccctaaaattttaaggacttggttactttcacagcaaggaccgagagatttttcagaggaagagaaaagggtttgaaacaatgacgttgacgatctccgatcttccaagggatctgaagaagaaaatattctcaagaattccgttgagatatgtgagagcattgcgattaacctgcaaagagtgggaaactttaatcaaaagtcggagcttaaagatcgacgaagaggagtctcagatggtcgcgttgatggattacaatctttgtttaatgagcaaatcctttaatggaggagatccatctacagagattaaaggcaaacttacttgctttgacgaacaagtaaaggtatctatgttgtttcattgcgagggtttattgttatgcatcttgaaagacgataatactaaggttgttgtttggaatccgtatttggggcaaagaaggtttatccaagttagattttcacacatcccaggcggatgggaccagttcagttacgctctcggatactacaagaataataatatgatgaaatcatttaaactcttgaggttttttgattatttctatacctccaatgattttgttttctatgaaatctatgatttcgactctggtttatggaaaactcttgatgtcactccatactggcgtataaggttttttgatgatattggcgtttctctcaagggaaacacttactggtgcgctaaagaaaggaagccagagtggaacgcagacccttttatcattgttgatcacatcatctgttttgattttacaagtgagaggtttggtccgcttgtgcctttgccgtttagagctatgaaggagagtcttgtgactctatcttgtgttagggaagagaagcttgctgctttattttgtcgcgatgttgttgttgaggtatggattacgactacgattgaattcgataaggtgtcgtggagcaagtttttgacctttggtgtgcgtgactgcccgatgatttattcttgtacagggagtttcttcattgacgaggtgaacaaagtcgccgtgattttcgggcaaccgttgaaacgcgacaaagttttcatcattggagaggctggacaagtccgagatgttgatctcggagaacctgcccaccaagatagttggctatatgtgtgtccttatgttccaagtttagtgaaaatcaagcaacctccaggatgcaaaaggagaagacaaagcagttcagaaaaccgtcgatataagcgaaacatgatgagacttgtcgaacttgaaaagtatcatattgccatggaacccaaaagaggagacaaaacaatatgagagttttgcagcaattatgaaatcgattgatgtgcaggaaaaaactggcaaagtgagaaaacgagatgattaaaattattcatccctttcatttctattttacgttacttagatgaataaaaaagagaaatttaaagagttttttcatccactaaaatagagatgaataagttggagaggaataacacattattcagtgcaactgattaatcaatgatcataatgaacttttacttgttacttgttataaagccattattgtctttttacaaacgaaccagagttgttttgtttgcagctttatcagatacatagattggttttgtaagccgaatcaagtaatgatcgtcttatttggtaaacaagaaactaagaataaaaagacttaattaaaacgtctgattcgatgcagaaacaagcagcaagttaagaacagacataattcgtgattatgacatataaaagagttcgctcctctaatccttcgcgtcagcaatgcctccttgagtaatctggaaactgtgatttcttcagttaaggaaaaaaatgaagtcattgcattatatgaaataatcaaaaacaaagcaagtgtgtgtgtgtggatttggttaaaaggatatggcttcagcttcagcgagattcggagcatcgtagactttgcagacacgtgtatcgcctttgcctttcctgaacaagagcctgatggtggctgcgtgagctagtacatgaccacctgctggcttttttgggtctgatatgaacattccaccacctgggtcagctatgactgcaaaccaccaaatgaaacagatgatacttgctaagttagtgcaaccaagaaacaaaaaaagaattgatgctttatctcattatatcaaactagtgtaaagtaaaccttggttagtcatgtagacagcaacgttgaactcctctgcaattttgattagcctggaaagcatctgagctagtttttgctgcaacacagaaactgggactattgagcaaagccagattgtgccaatgataatgtaagtaatgttgtgggaggcaagtttaacctggcggtctgcgagttctcctcttccagtgaaatccactcggaataaagcaatgatcgagtcaacaatctggaaacaaggtcagaaaactcagctaatttaactcatatttgaatggataactaaactaaaattatcagacatgttttacttaccagaatcctaaatggttcctcagacatttttgcagcaaggccaagaagcaagttgtactgatgctcataggtataagcacgagcataaatgatctgttatatcaagatgaataagatttttgaatgtcagtcacagtcctgagagtaagtaaagatgtgaggttaataatgcttacattgtcaagcacagctcctggatccattccaaatctttcagcaattgggacaatcctatcaggacggctacaaaatttaggggttaaggaaaaatcatggaatatagaaacaatctaatgaagacacaagatctggtcagaagatttgttataagatattaaggatacaaggttccctctgtgtcaatgtatgccacttttccattccctcctttcatgtttgtaggtagctgtaatacatcaatacagaaaatgaataccaatgacattgagagacagagtacctcaatggtttatatgctgaaagaaagtaaaatctcatctcatgcctctgaaatgtaaacaagacaacatatatttcatattgagactgtaggaaagaaaccaacctgcgtagtgacacaaagggtatgtgctaattgggttttcccagacctgaagtgaaattaaactctataagaatacaagctattaacaggaaacttatagagcttggctcagctgtttctcacctaaattccccaaaagcctctgtgatggctgaggtttcaattccacctagcaagaaatgtgaaataattaaaccagaacttaagtagtgtgatcaagatggcaaaaatctaaagcaaaacttagcatacctcctaagagatcatcgagagcttgacaccctgtagtgatttttacaactgatttcctctgtaaacaattaaaaaacaacttgtaagtttcaatatctaatatgaaatgttgaataggatatcaaaatctaatagttctgttagtgggatcaagcaacaatgagtctaacctttataagagcatcacttccagtcatatatccaaagttctgaaggagaaatggtttgacaattaaaatgacgcaaatgcagaaagtaacactgatatagcaacaacagatggaaacgttaaacttaccacaattttctcagcagcttcacagattttgtcaactttggcctcagataaacctttgattccagtaaggttctgcatcaaacataagtttaaacaatcgactcatgcaaccaacatctacatagtataaacccaatgagcaaagctaaataagctggttaataccttcttggtatgcatcatgagaccattgcaggtatggatcccagcttcttgtagctttttcacatctcctgcgtttataccttgtgcgatcactgacacaagcaaaaataaaagtcccgagatcaaatcagctagagattttagccagatacagaaatcaaacaactatgtacactaatatacactcgaattccacaaacagtaaacgaaatggaccataaactattcgttaccaaggagaaccatgttcagaaatcaatatcgatcctagattcatacttaaattcgaaatctaacagagattgcgagaacattcctcaaattagatgaacgattctagatctgatttcataagacccagcgattaagcaacaacgaggtttagataaacaaaagtgggcgaaattagaagagataaacacacagagacgattccaaaacagatgatgaagatttgaaacgaaaaagtgaagaatcgtaaaagttgaaaacgaattcaaatcttacatttgtcaatcatctcaaatagatcttcgtcttcatcattttcttcacgctcaacgagctgcatctggctcgtttcttcagctctatgaatccgaaacaacacaaacagatcaggatcatcggaaaacaaaataaaaacgagaagaagcgagtcaggtacacaaaacttaagacaaagcttaaaccaaaacgatgaatggagaagaagaagaagaatcgtagtagagagaaagagagagatcaatcacttacttaagagaagccatcattttctcgctctaagagtctctaagcttggaagagtgagagagatagaattttgaaattcgaaatttgaaaatctttgctcgatttgcttcgagggttcaaggtttttaatggcgggttacggaattgaaagcgtgattctaattccgttgatttgaatttgggttccgcaactgaatttgttttcgtttgtgtgctcttctttgttatacatgactttgtttgatggctgcgataatgccacgtcatagttatcatccgtctatcgacggtcaatagaaggaatctaggtgaaaaaaagagaatattacactcttaaacacttttttaaaactatttctgtgtttaggcactttcaaaagattaggcacttttttatgtttttttactaaaataccctcttaactaaaatattatcttaacccacgttttctctctttctctctctctcttcatctctctctttctctctctctctctcttcatctctctctctctcttcacctctctctctcttcatctttgtaaaaaatgagaagaaacttcttcttcttcaacaatggcggtttgatttgatttttgctctctctcatgtgtcaaactcgtttcatctacgtagcatcgagatttcagttaatcgaatctcctgttatcatggacatgttatataaaatggatatagatcagtaaaaaggtttccgaatggatatatttaaatggattcgttattatggacaccaaaaaattgtttgttgatttttttttcagtttgcagagacctccaccttcaaaaccttatggacatggaactttggtttctttacaaaacacggttaatcgaatctcctattattattgacatggtatatagaatggatacggatcagtagaaaggtttctgaatggatatatttaaatggatttgttattatggataccaaaaaattatttgtagcaaatcaaccgcatatagcttgtttttaggatgttagacatgcttctccaattcttcatcttttactcttaacatgtaagaccaaaagatttacaaatctcaccatatcaatccataatatacaatccatgatgcgtcatccataatatgtcatccatgattcatcatccataatgtgccatccataatttgccatccataatggacatcaccaataacaaacgccgtaagagctacaaacacatccttagccaccaatgaagatttaccaaacacaaataattccaatgaacaagatttcaacaagaacacaaattctttttaagaaaacacaaataaccctagtcatacagaattactcgccaaatcaatgagaacacaaatgccttgtaataaatcacaaataaccctaatcatctagaattagtcgccaaatcttacttaaattagatccatcttgatatctcttctaatctatgttgtatgcttagttgtttcctattgattcccaacttgattaaaaacgaaatcaccaaacatagccaaagaattcgccagaactccatgacactcttccgtagccaaagaatcgttcatcataaacaaacaatcaaatttttttaatccatggaaagaaatcacaaacctgtccaacacaaggagatcctccttcgtctagagtaaccataggaaaaacctccatttactactattatcatgttcatgaggaaagttgtgtggattaaagaacttcacagagaataatcgattaatttcatgagaaacgattttcaacatctctctgcttcgtttttaaactactatggatttatgaaaaaacgatcttcaggaaggagaaagggagaaacgattgtttttttagagagagagatttagttctagagacgaagagaaatacctttttctaatcagattttaacatcaaaaaattaatccatttattgtctttaatctcagccatagatcttaatttttatttttcaatctaatggtctatattaataactacgtatctaaattcttttatttttttaattgtttggttaagatatatatttagttattgttttcgattgtttagttaagaggtataaaagtcaagttttccttcaaaaagaaggaaaagtgcctctaacttggaaagtgtctatattgtctaaacttacgtttaaagtgtcttatattggaacattccctgaaaaaaattagccacttgcacttcataacggcgcacattagacatttgactcacattttatcgataaaatcaaatgcatataggcccataagcccagtatactaattattcggatgcatataggaccataggcccattttactgaaattacagaaaaataaaaataatatagatgcatataggcccaatctaatatttgtttgcggatccactaatcaaattaattttaaaaagttggggagtttaaccaacgatctctattattactagaaactatacatttctaccaactatcatattatccttttgaaatatttatccctcgaaattgtatatattgtgagacctgatcaagttcaagtttaatttgttagagctcatgaaagtttatggtgacaagccattaacaccaactttgagtttttttaagataagtgtagtgaggagtcccaatgtcgtcgaatcaatagtaaaagatagcggtgcctaattcatgacatatagaccacatgtcatttgacaaagagatatgatccttaacccttagaaacaaaaacccaagctaagatcatagctaatattttcaaattaattcacatacaacaaaactgataaagaaccgacttgatttgatttggactaaaaaacgattcttctagttctaggtcaatacgtagaaccggatgttataactttaagagcacttcacaactcatatattgtaaagtatcaatgtttttacacaccatgaccttaagtaacatgactctaccattcttcttcattttttatgcatatatgcttaattatattatatcacattgattttgaaaaagaatcatcgaagttctctagtgtaaaggtatatgtggttggctagatacagacagaatagtgtcgattgaaagagcacatggatgctcaacgaatctccctatatcaaaagaagtggattacaaaagaacctttttatataattttttctcatatttaaaaattttctttggattttattatattactctacagttgcctctcacttcacatatgcactttgattatcatattcatataccatcatcactttttgccataagttttttttctcttaaagtgaacatagtaatatccaacctaaatcaaaattttatgtgctagctatttcttagtttatgcacatgatttttcacatgaatcaaccggtacatgtaatcaaagcatgagaaatgaagaccaacaaatggctaaacaaatggcactctaggtttagacgattattttaaattggagtttatgtatttagatgcatttgacatgagtgttcaaagtacacaatctctaaatgtacacttcaaattttcaaaatattctcgaagtaatatcatggggaaataaaaagaaggagaagtggtttgcttttatgggtgtgaatctataaatgggatgtttcctcctcagtaaacactcatttctttaaataaaaacagaaaggggaccatttgcatgttgcatcttctattacatagactcatccccacttgcgaattcactacccccaccaaacgttgccgttttagtaaactccatactctatgtaaggtacgtacaagttacaaaaaacactaatatatgtatgtatgtatatacatggtcctagctagctagctacaactcctagggtacacataccggagccatcatcatcaatttatcatcgacatcgatttatcattatgatcatcatctctctctccttcaatatatgtagcagtggcagtaatgtgggtgatacgtttgtataaagctggaaagcaacatttggatccactctctgttggcttaagcatgcttcttttaactcttctcatgtattctctctacatatttgtaacattataataactcgcaatttgcaacatatttttatcacatacttgaacaaaagaaaaattagtacacgacaatttgtattttaatgaaaactgttatatcatcagaatctcaaaagtatatatgaaaatattaaaaaatatcatatattagtttgtgataacaatatttctacatttatttgttccacattgaaattaggttttattaatcttccaagaaaaaaaaagaagaattctaattaagttgcgatcaatatgcttcaaaaagttggtagcaattgttatttttttataaaaaaaattcaatagtaaaatatgtattgaactttgccgttatatacaaaaaagaactgtactaaaacctttttacatattttacagtacactgaattttcatgatattagaactaaagaactttgtttttaaaacataccacaaaattatagcaaattaactttagtcgtagtttttttaattttattataatattgttggcaatcaccgattaggtgtggcttattaacgttggttggaatttataaatatgaacacttttatttgacttcgggtgcaaagttaatgattttatcagactatcagtcatcacaatcaactaactctttatttagcatctaacgttgcttttgatactaaagaaaaagaagaaaaaaaacatttaaattatagtaccattgtattcgatagatgatccaaaacaaaaagataagttcgagcatcacatatataggtctgatcaagtacttctcaatttgcatacgtatacatcaaactgttacatcagcctcctcgtgagccatatcgaaacatgtatgacaaatttgtatgcctattcttcgcaattatattcgtgtatcgaactatattatttaatttatactatttttaattaattagagaattgatacacgagtaatctcatagctgattttgtctcatataaacggtgttaacaaaaaaaaagaagaaggaattaacgtacatatgctttagtacacgaacaatatcgcttcaaaattaaacttgtttatgtaagtttcgtacaaaaatatagcatagcttatagttcactatcactacgtacgatgaaattcttcaaccttttatatattcactattaggaaacggatgaagtatgattaaaccaatataggttaattcttttacgcaaaaaagtcaaatcattaacaaatttaaaggattaagtttcgagtagaccgtgacaaatcactaaactagaaattttacttcagcagcttgaagcttataagagtaaacatctttacccttacttttgcagttagtgttgtttgacttattggtaccaaactaaaaccttaaaaaaaaggaacaatgaaatagaaaaaacttctagaccaatcagatttttttctttttatctctaccaaatacaaaaagtcgttgtcaaagattgtccatatcaataattttcaatatcttgcaatatcgcgtagctgtcacaaaccaacagcttgcccagaacctatcgaattttaggtagtttttgcatagaaatggtatcatcccattgttagtgataaggaatctttttgaggaaagttgttttattattcaatttttctttctatacatttacagcaataaataattaaataacaccagtttcagatactttatttattacatcttctatattaaaaaaaaaagttgtaacgtctagagctattaatcactataccagcggtaattggcattgtggtaaattacaagaacaaatggccgtaaaacatgtgaagtcggtaattaagcatggatactgtatgtacatagataattatatatgtcacttttagataactaaaatatttttgtgacaaagactggcacttgagtcaataattagagattaaaaaatatataaatctcatttatatatcatgagaatattccatatgagctcacttaggtatcacatgtattggttataataccactcacatacaaggtttttcttttgttacttttcctaagaaaatttctataacgtcttataaataaaaactataaaaatatctccacaaaaattcttaatgtttttttgtgtgagttaaactgttatttattggtatgtaagtgagttataaagtagttgcacgattagtttatattgaggccagaaaaaaatgtaatgcttcacatagtattatatagtctaagagttcccgtaggttatactttatgcatgtgttaacctcactttttcatggcttaggtcttaataatattgaatatgaatcataaagataatgtctcagcggtggagttttgaaaactatattaaacctaatgatgagtctaataaagcctagtatcaatcaaataggacaacaagaaaactgtcatttttttctctccgacatagaaaatatagtccataattctgaccatatatataattaaacagttaatataaataaaccatatatttcgtactattatgaatgaaattaaattaacttaattaaatcaagaccggatgcaaaattacaaatcgtccaatcttttcaggtaaatgtttgatatccaatattaacaattttcatagtaatttacaatatgaaagtataaaaacagaaaattcatccattgattaacaagtcaaagtggtagaaattttacacaacatgttattacatgcacatccgattaaaatctaacatcttctagaacattaatcacattatataatagaaaacaatcaataattattcattggaattattggttatcaaaacaaaactttatttccaaaaaccaagaataagaagataaaataaagaaagaaagaaagaaaaaaagagggtccccatcaatgtagtagagaagtaattaatagagttacagaaacaagcaaaaacaacacacaaaactaatctgtctctgtaagatgatgagattagagaagtgcatgaggctcggagaatcggcgtgacattattcaattttattcacggttctactttggaccacttttctttaacgccttttgtttgtcactcgttctttttttctttctctcgattttatttcactttcgacccttaaactctccataaattccgaaactgatccctcaaaaacattattctatctctctccttcacgttctcctccttatcccttctatataaacactcgtcttcttcttcacttgatgaacagaaaaatctctctttctctttcttgatctgctacggtgaagtctatggtgcaccggcatctgatgaagctgccagcatgatctaattagctttctttatcctttgttgtgtttcatgacgatggttaagagatcagtctcgattagatcatgttcgcagtttcacccgttgactgtcgcacccttctataaaccctaaattttctctctatcttttttagtttgattttcaagacactttgtttctcaatcttcagtctgattttgtgagcttacttctctttctgaggctatatatatttctttttcataagaattttcactatattgttgtgtgtatgtggatctgaagaatttatgttttgttagggttatagagttgcatgactttaggaaaccctaatttggtctttgacaaattgagtatatttttttgggttataaatatgaaaatcttcttatgatgaagctaggaaagaggagctttgttttttttacaaagattatggaatttagcaaattcagttaattatctataattacgtttttggggatctcaagatagacttcctagttcttctttttactcatatctgttttaagaaaagactttcatgtacatttttttattttttttggcttatgttagtttagggtttctgggaagaagttgaaactgaagttgtacactattgatacatatgtagtttatataagttcgactaaagatttttggagtttatatatagcagttgcccggagctcaaactctacttcctgatagattaaccacagatatgctgttaatcagaatttgaagaaaaataaagaatctgaattttttgaatagtttactagaacaataatgatggttgttctaagaaaaatgttgtgcaaaagacttttaggctttggagtcattcggatttggcctcgaaaaaaatggatgctttctgtaatttggatggcctcatggatcttaaagatgcatttagataaccagaaacatggtgagtgatggaagaatcaaatagtgtttcaaattaaacccaagaaaacacgagatatacggataagtcaatttttactgtttcattgctggaaatggtccccttcgcatgtttaagataatacacataaactagtgtcaagactcaaaatcactacattttaattgtaaaaatcaaagttaataatataagttttgttcattatcgaaacatttctcggcctcatgcttgatcaaaatttctttagtagccaagtacaaaaacgatcatcaatatcttcttccttttttttgcttttaactcagcgatcgtcatcaactaataggtacgtctattaaagggatgatatgattcggttaatgggattttgaaactttggcttttctatatgtatgggaaaactccaccgaatgtacaattttttctttttttttgtcaaatttaaaaatgagattctccaagttgctttcgtctctttcagactttcctttaatggttttagttcgtcagttacaaaagaaattcgtctgtatgtacataattacatttgtggatatatttacaccaaaatgtatcactctctcttccgtatcacattcaattttctccaaccgttacttttacttctccaagaaaaggtccagcatttctttgcctttttcttttatcacgtacgtttatatatacgtgtgtgtgtgtgtgtgtgtgcgttttaaaagatgacttagacattttattttctttaagaaagctttttaagttttaaagcaagagactatattaaggatcatcgtaagatttagcaaagtctaacccaaaaaatacattaagggaaatttttcagcttaatatcaaccaatttagagatttctaaaaaagaaaattaaaactttttttagagatttatatttttaaaagagatataaaattgcctacagaaaatcttcaaataagccaaaccagctcagtttatgaatcattaaaatgaaacttccttaccaatataatttcaaacgaaaaaaaaattccgtatcgaatttttttgtaaagaaactcattttagtgggtttttataagctagactgatgaatttggtcgaagtacagcttattggcatctaactcattaaatgcaaatatcatacaaaattcgtaattacatgtaaatttcttccaaaattcgtaattacatgtatgtaataatctaattttgtgtgtgttagtgatattagaaatattattgaaaaaataatataggcatcgtgtgcaattttcaattaccttcacaaatgaagaaacattccgagcatatctccttggcataatgagtgggattttagagttaagccaacgaaatttgggcctaatttttcatcaaatacttgggcctagtcatcggttatgtcattgctacttatataagacccataggtataccgataaagtcttcatattgagatccaaaggccgggatcgaacaagttttgttcttattgaatcagcgttagacgcagccttgtctttattatgttcttcttcatccgttagaaaaagtatccgtatgatgtccattcgtttcatttgtaataatttgatgaagtcttcttaaagacatttggattggagttagaatgttccttcttttatttttcttcaggacacttggagtctcggattagtcaagagacttcgatcatattttctttatcacctcttcttcaatttatatggatcatctttaggaaaactataacgtgttaattgtgaaattatgatacaaactttataattcataaataaatatgtctgtgcatagtttttttttttaaattatccggataatgattatgagagaaaagcaggtaggtcgatcatgaatgtttaattttggcacatgttgaatgtgaggtcccagccaccaataaactgatcaagtcctacattatccaattcctttaattaccttaaagtatttacaaaatttgaattagtcaaatctttgagttaagacaccaaatgattttacaaaactcgaataatataagaagagtatacttgttgtaaccttggagtactacgaattcaacaatttgatgaagtgaaaacatagttaagaaatgattgggagattattcatctaaagctaccagtctaccaactttccagttttgacaatatttaccacgtggccctgaggaacatcattgtcagtttatcaaacactccatatttcgtggcagcttcgggtcaagaatccaaattggtattgtcacttggtcaggtcaaagttgaggagcttttatatatagtataatcaatgagtcggctaaaatgtaaaatacatgttctaaattaaacgtaataaattactataatcgtatcaaatttatccctcttatcaaattagtactttcgagtttcgatattgtttttctttctctgggaaactatatatatttacatttctagaaagaaagaaaaaaactatatattacattttatacgtgctaagcctagaaaagattaattacaaagaaattatacattttattgatcaagtggtgcttaaagcagtaaaaacaatttgaactcataaatcgtaaatacgtcgacatatttcgtgatctccattaatttttctttttttaaagattgacgcaaaataatattctgaaaatgaaaaagtaaaataagaggggacaaatattcgagatgtgacgtggcagatcgagtggtttaaatattctattagcaagtggtttgtgtaataagcaaatgggtggtcgaacctgaccgtattcttggatctattcaactgtagcatcagtccaccttccttacctcatctttcctaactttttaatacctttttaatttgctaaaaacatcactactatttatatttgatctctaattactgtttcaactctgaatattccgtaatccttatattaatatgtccaaaaatatataatttctggactttcccttgagatgggaatatgaaagaattgcatcatttacctaatcatatgaacacaaatagatattggaaaaaatgtggttttatttttcatgttttgttcgattatctttatctttatcccaaaaaaaaaaaaatcattcgattatatctaaaattcaaaatagattacagaaatataatttattagcaaaacggcatgtttaaagcgtttgaagttattaaatcattagtaagaatatataagaatgtaattagtggaaatacatagtaagtatcattggtttttgccacatatggtgagcaattttttattttaagaagggaaaatcaatttgtacatagatttatgtcacttattcaattgaataatacagaaggatttaaagtctaaagtaaaaacaggcaaaataataatatgtttttttctttgatcgctcagattatcgtattaaaatttggattatgacataacaacgataataatacaaactagttggttatgaactctgaataaattattttaaagaaagaatactactatttaattataaaatgactctgcatcatatcaataaggtaacctcgttattataaacgtcacactacacactattagtattttaattacacagtgaaaaaatttaattaattactaatctctgtccaggtacataatattattccaagatacggtccttcgttactataaactctataaaaaccaattttcacttccaattgaattgggaacaaaccaaatctctatctctctccattagagcttgaagcagccatagcctaacaaaaccttcaacaatggcttcaatggctgccgtcttaagcaaaactccattcctctctcaaccactaaccaaatcatctccaaactccgatctccccttcgccgcggtttccttcccttccaaatccctacgccgccgcgtaggatcaatccgagccggattaatcgctcccgacggtggtaagcttgtagagctcatcgtggaagagccaaagcggcgagagaagaaacacgaggcggcggatttgccacgtgttgagctgacggcgattgacttgcaatggatgcatgtattaagcgaaggctgggcaagtccactcggaggtttcatgagagaatccgagttcctccaaactcttcattttaactcgctacgtcttgacgacggctccgtcgttaacatgtccgtgcctattgttctcgctattgacgatgaacaaaaagcacgtatcggcgagtctacacgtgtcgctcttttcaattccgatggtaaccccgtcgctatcctcagcgagtaagtccttcttcaacatactcagattcaaattcagatcatagattgttggagaagacgaaaactgagatttgaatttgattttgaacttatctctctttgagattagttaaatacagtataatctcgataaagtaatactcgataaattaataactatgtattcacgattagacttagactagatctgattaatcttgagattagaatttggctatatgtgtaattggttactgaaatctgtttgtttttatgtttgatcagtattgagatttataagcatccaaaggaagaaaggatagctagaacatggggtacgacggctccaggtttgccttacgtagacgaggcgataactaatgctggaaactggctcattgggggtgatcttgaggttcttgagccagtgaagtacaatgatgggcttgatcgtttcaggctttcgcctgctgagttacgtaaagagttggagaagcgtaatgcggatgcggtgtttgctttccagctgaggaatcctgttcataatggtcatgctcttcttatgactgatactcgtaggagacttcttgagatgggttacaaaaaccctattcttttgcttcatccgttaggtgggtttacaaaggctgatgatgttcctttagattggaggatgaagcaacacgagaaggtaaaaaaagttattgattgttgtgtgtctcttgagtgtgagtgtgtgtatcttgaaatgctaaatgtgtttatgaatgtaaaacaggttctagaggatggtgttctcgatccggagactacagtggtttcgatattcccgtcacctatgcattacgctggtccaaccgaagtgcagtggcacgcaaaggctagaatcaatgctggtgctaacttttacattgtgggtcgtgatcctgctgggatgggtcatccagtagagaaacgtgatctttacgatgctgatcatggaaagaaagtactaagcatggcaccaggactcgaacgactcaacatccttcctttcagggtatatacaattcgaaaagattcacactttttgtttgacaatgtagagatctaattccttggtgtaactgcaggttgctgcatatgacaagacgcaaggcaagatggctttcttcgatccctcgaggcctcaagatttcttgttcatctccggcactaaggtaatataccagtcctacattgttaaaattcttcatagtttgtttataaaacaaacctctaaatgtttttcgattattctagatgcgcacattggcaaagaacaacgaaaacccgccagacggttttatgtgcccaggtggatggaaagttctggtggattactatgagagcttgactccggcgggtaatggtagactaccagaagtggttccggtgtaagacaaaactgttcgtttcaaattgtaacgtttgtgttgtgaagccttgtagcaacaatcattgttgtattgggagagaagcctatgtataatctggcttgacctttttccaaataaaatacagaagaaaaaaagactgtttttcgtttgcaagataatttacgaaacttgtaatatttgggcctcaaactttgtaccatattaatgaaacgattgtttttacatataaggatttacgtatttttgacttttgactacatctttttctatttaatcactcacttttttttttttttttttcgccatttaatcactcacttttgacttcatatatgtattctagtagtcgtacccaattgttgtaatgggccttcaaaggcctcttgtagtaatgggcctattaatttgtaaataaccaaacccgaagtttcgtctcctgagtcatttcacgactgatgtttttcttctccgacgctacaatcggtgtctgtttccgaagttgttcgttccattagagcttcagatttcgtcgtttggtaatttcaagttagagctacttaatcttttgatctgtcaaaccaatttctcagataaattcactctagggtttgtgaagaacgatgatatgatcacatttcacaatgcaaacggtgctaagcttatagtaaattaatggtggcttgatgcttaattgaaaagtcggaaacttttttattcttctttattgtttgagattcatttcaatggttgacatgtatgccaagtgtttgttaaaatgtctaaaagaaaacttcaagttgatcactttggtaaaattggttagcttgtttctgtagaatgcataatctttagtgaaaatgtgattgactacttctgattctttgaaatgtcactgtttcaggctgaagaaaatgttcatcaaagtgaaattgccatgggatgttacgattccagctgaagatatggacactggccttatgcttcagagagctattgtcattcgtctactcgaagccttttctaaagagaaagcaacaaaagatcttggatacttgataacaccgacaattcttgagaacatcggtgagggtaagatcaaggaacagaccggcgaaattcagtttcccgtagtttttaacggaatctgcttcaagatgtttaaaggagagattgttcatggtgtggtgcacaaggttcacaagactggtgtctttttgaaatctggcccttatgaaatcatttacctatcacacatgaaaatgcctggttacgagttcattccaggcgagaacccgtttttcatgaatcagtacatgtcccggattcaaatcggtgccagagttcgtttcgtcgtgttagataccgagtggagagaggcagagaaagacttcatggctttggctagcatcgatggagacaatcttggtccgttctaaaaagattgtaatcttaattttcactctatatatacatgttatgtaaaaacgctgttcaatgaaaatgatcaatctttattcaaatctgttaaacatactaaaagaaaaaacaaatcaatgcttcataatgtatatactaatgtaagatcaattcaagagcctctttcatgatctcttcttccatttcaggtagctaaagaagtgtctctctggaaccggaacagacttcactaaccatccaatcggccacgatgcagctgcgatggcaatgcaaactccccattgacccaagtttagcctctctgtatcagcaaatctcttgagaaactcaaccatcacaacttgcaaaaccacagtcacaactataattccaatgaagagtctgttcttgtgtaaccctttaaacacattcttcttctccaaactcctagcgttaaactcgttgaacacctgacaaagcacaaatgtattgaagatcaaagtgttcttcactttctcagtcacgttgaaaatcgatcttcctctaaactgaagcaccaagagcacagagatttggtaaaacgcttgagctagtagattcctccacatgatgtttgtgatcaatggcgccactctccctatcggtttcttcttcataagatcgtttgttggcttctctgtagctaaagccaatgcaccgagtgtgtccatgatcagattaacccacagtaactgaaccgctgtcaaaggaacgtctccagctgaaactgcagccacgaagttgatcactagagcagctacattgacagtgagctgaaactgaataaacttctgaatattgttgtacacgcatcttccccatttcaaaaccgttgcaacagaagcaaagttatcgtcaagaatcacgatatctgagctctctttcgctacttccgtaccttgaatccccatagaaagtccaatatcagcttctttcaacgctggtgcatcgttagtaccatctccagtaaccgccaccacatgacctaactccttgagacatttcaccataagaagcttatcaaagggtgaagatctcgccatcactttgattctttcgactttctctaatctttcttcttgagtgtagtttcgaaacttttctccttctaacacagcttcactattcatctcatcttcaggtgtcaagattccacactcaacagctattgctctcgccgtgaaaatgttatccccggtgatcattttgatgtttacaccggcgaattgacaatcctcaacagctttcttcactcctggtctacacggatctttgattccaatgatcccaagtaagctcaacttctcttctttcaacttcttgttgtcctcattgtcttctgaatacgcaaaggcgatgcaacggagagatttagctgccatagattgaataatcttctcaaactgaatcttatcatcttctttcatctctctcacaactccagaaccatcacagaacgttgaacacatagctagaatcttctcagcagctcctttccaatgaacaacattgttctctgtgtttacgcctttcttcttcatcaacacaccacttctcttcttctctgaattgaaaccttccacatgaacaacatcatgttcttcaatcactttctccatacccatctccagttcctcaaccgcccagctaagaatcgctttctccgttggagaaccagagaactcatactctgttcctgctttagccttaaacacactccctgtagtgttcattgcaactccttgatgaaacaattcaacaactctctgagacacagaagaagcttttcctgattcgagaccgaaccagaaatcggttaccttcatctggttaagcgtcaaagtaccggttttatcggtacaaataaccgttgcagagcccattgtctcacaagcagagagctttctcaccatagcattatctttcatcattctcttcattgaatacgccaatgtcaatgtcacagctaatggcaatccttcaggtatcgcaactacgatgattgtaaccgcagctgcaaccatcttaaccacagcgttcactatctcatcgctcttcgtagtctttccgttatactcacggtttccgctctcgtctttcgtggttcccgtgaagtaacgaattaacagaaccaaaagaaccaagaaagctacaagtaaaccaactttacctatggaagaagtaagcttatcgagacgagactgcaacggagtttgctcgttagtgtcacgcgagatatgactcatcatttgtccccaagctgtgttcatcccaacggaagtaaccgccattttaccgaacccatcagctattttagtcccggagaacaaaaatgtgtttccggttaggctaacctcgacatgatcgctttctccagtcatgcttgattcatcaacgtgtaacaaatgtccttcaacgaacactccatcagctggaacttgatctccgatgttcaaacaaacgatatctccaacgacaatatcaaagatcgaaatctcttgacgacgtccgtttctaacaacatcgatcttaatgttactacttactttagagagtttatcaaactgtctgttctgtctgaagttgctgaccgcagagacagctaccaccaagaaaaccgctacgaatatacttcctccatcgtaccatccttcttttaatccatgctctttgataccaaacccgagagagagcgttgcgcaaccgagaaggataagaatcgttaagtccttgaaagcttccaccacaaaatggaaaagacccttcgatggttgtcttgtgtaagtgttggacccgaacgttgaacgtctacgttgaatctcatcaccttcttcgttgatcccgagacgtgtgttactcttgagagctgagactaagccattaggaccaccaagagactcaagtttctcttggttcttgttcttgacgagatcgtttaaggtttcagtatcaatcttgaagtgatcatctccatgatggtgatcaagatcaatggcggtgtatgaaagagaacgagggaacaaaccgggttttcggatagcgtgtttggcgcaattgaggagagttcttgaacagtagagcttgatcaatgctaattgccattttttgtttgatttgcttagggttttgggaagttccagaagaacctcaacgcccaccttgtccttcttctctgcatgatcagatacgtttctccgcattgtttctggtatttgctgaaccggaattgataaaccgaaaatagaacgaaaaccaaaagttgtaaatttgttgttttgtgaaagcgatgggtaagaatgcaaaacaagagttgatgttgtgatgtcaatacaatctgcgttggttttttatagttagttcattagtcggtcatttttgtagcatccacgaagtttcctagcaatcacaacgaaagccacattcaccaaaaaaatctaacgcttttaaagctcaattaatattacaaaatgaatgaatcaacaaataaatttaacattataaatcgaggagtattaaaaatattattcaattaagcaaaaataatccaaatgaatgaataaatgaatgagtatcaaatattaatccacgaaagaataagtcaaccaaaaataaattaagtagatatttgcttgattttctcaatgatccaaatcccaattgaacagtgaaatttctgagaagcaacagttcgaaacagtttcgagttttttcagggaaacacgtgtcagcttgagctttataagataaactcaaaactcaaaagtcttttgacctggataaatttttttttttttttaaacagagatgacctgtatttttttactatagtatataggatatgtatgaagtgtgtatagaccgtgtttttattaggtgtaatatctaacattcgttattatcaatatgaaggaaataagagaaagttggccaagtagtggtatatcgatcgacatgcctacttttatacatgtaagtatagtatattctttgattaacgattaagttattgaatttgataattttaatttatttctattaacttcttcaaaatactttattaaacatttaaagagtttgatacgtgtgaaattcgaattaatctcagactgtagtaatggctgatcctaacatgaaatctatttaataataaggtgacacgtttactattaaaaacctaattaactcctacatcaagtggaaatattgtggcttgttcatgtgttctagtttgtggtttcgaatacacaagttatttgaaaaatctataaaacttgtcctcgtaatactagatatcaatcatattacctagaccctacgttatcaatcttgtttatccaaacgttactttttggctatatattattacctactaacaaattacttggaattgttgtaaagttgttaccaaaaaaaaaaaaaagttgtaaaagtggacagtaactttttgacgaagtcagggctttccacctcgaattatccgaatctgatcgtcaggcgtagagaaatttcatatgttgtggaaagaatttaaaggtattgcttattttagttaataagcaataataacttaggaaaatgagaaccaaaatttctatggggacttaatgtagcaagtctcaaccactattaatggattcctcgttggaaccactcatcacattttcgtctacgttatatatttcccgtcaagagaaacaaaaaaaatggctagatatgacataaggaagaagacgtaagcaacaaagagtcataagaaagtggaaagatttgggaataaattggtatattatggcgaaatagggttatggttagtttacaattgagaattgacccaattttttaactaatttgtggattacttatagctgaacacatgtattttgcttttgcactttgtagatgatattttttgttttgttttttaatcatctggttttcgcttaacttttttttatcaaactatatttgctgcactttaaaacctataggccataagcccaatacaaataaacatattatgaagattcaagaatgatggatagtgaaatttaacatgtaaaatctaccattcaggtttagttttaggctgttggacatttgtgaaatcgaaaacttgtcttggacatttgtgaaatcgaaatcgaaaacttcttgataaaaaagaagtccctaaaaatacatatcataaacattttatggggcccaaaaaattctgttctttttttttgtttataattgagacttccgtcgttcatataacttttcttcgatagtacgctactgcaataacaattataaaaaagaagaagcatattactataacttatccaatgtggaagaatctgtggtcatttgttattgactacaaattatatataagtcaattcttaattcttaacgtccgttgaccaaagtcattttatttgtattgggcttatgtatagtcggtccacttttgttctctgagtctctgacgctgatgttttgttcttgcaatagaagcatgcttttccattcacacggataaaatttagcatcatagaaagtaaaaactgtcaacaagaatagtgttctctacattacattagcaaagctaatttgatcatttcaaaggtccttcttcccagctcattagcgtacacaggtttgcgtaagtatccttagatgtaaatcaatcctttgtaatttgtatgatctgcgatcaaaattttgttaagcttataaaaaaggaactacatcaaaattgaaaacactactaactaaaggaacaccaactgctaaaaaaatcaaactaaccaaagctattttatttatcaactccattaatccacaacaaacaattaatataaccctaaatcaaatcattccccttaacagctcttcaattctcaaatattccgctcagatttatactattcagtcataaaaaagaacaaaagattgatccgaaacgataacggaataatacccatatatatgctaacgaaggagcctcctatcctagcctaccaaaagtagaagaaactgaatcaaatctaattccattttcttagaaaactaactccgaacaaagttgagaacacaatttattaaaaaaaaaatgaatatgttgtttggtcaacattagtcaatgccagattttgatgatcgaaacatcaaagtatgatgattatggtgttggcaacattacttatgtttgttcgtgtatgtctgtatgtgatgtcaatacttcgtataactaacgagacatttttaaaatttgcatgtgtgacaatgtgttcggttgtacttcgtgtagctgataaacatttttccaatattaaatggtagccaatttaaacgggaacaccaaactcggaatgcacgaaacacaccaaaacacccaaatattaagcaacacatgctatggcaaatatcttctatgagcttacaacagattttcttagtagcaaataatagctaaaatttatgcttatcattcattgataggctagctatcttaaactccaaaagttaaaactaaattaaacgaaccaagaccaaaaacacatcaaaaccatgcaagcaacaactatatttataagataatatctttcagatctatcatctgaaagcccaccgcagtccgcaatcaccacgggcttgttatcctttgctgttttaattatgacctccttctcaatgttcttcataagataacatctttctgacctataatctgaaagctcaccgcagtccgcgatcaccacaggctttgaaggcgtccttgttgtcgtagttatgacctccttctcaatgttcctcataagatccaatccttcaacaactttgccgatcacaacgtgatcaccgtccacttgcaagccatagtccttcatgtggatttggaactgagatccgttggagtcggccatggagatgatacctggaccgtcttcgtggttcaagataaagtactcgtcgtctaattcttcgctgtggatgggttcgttttcgaagatgatatctcctccacaccacatgagatcgggaacaatatggtcgaaggttgatcctttgtagtggattggtttaccacactttccgatgcctctctcgccggtacacagacccctgaagttctccgccgtccgtggagtcaagtcagcgaagagctctatcacgatccgaccagcgggtttgccatccacggtcaaatcaaagaaaactttagggttagccattgtcggagagaaatctagtattagggtttctatggtttagcacaatttttataacgtaaataccataatggagcaaatagttcttatatatcaataatatagattttccttgtacaattgctatttagtttaggaaaactaaatccaacagttgaagggctttataagcccaataaagaaaaaaaatctttaagtaatgttaaaaacttaaaattcagagaaacttgctagtcaataataacaatttcatattggataattaaagcccaagtatttgtgaatccatctctttttatacagtactttcgatcaccaaaaaaaaagaagtgatgaagaatatattcatccaaatcatatctctagttcttattattttagtatggttgaactcaatgatatgatagtatatatatttagatcacatgtaaatctaaaacaaattagtggggaaagaactagtaaaatttattttacatcaattttgtagttgtaactgaaattgtataaatagcggttgtataatgctaaacctggttgggcttggtatatttcagcccattggtccatactggttggttataatttgtaaatggcttattcgttgattatattcggctattcgtctcatagaagcatatatatctcttggtcaaagtcacgcactaaaatttggacaaacttcacatcgactgaaagaaacacactatacatcagatacatagtaagaatccacacgcctaaaagaaaaatctacttgttcaattgaatataaaagcttaagattaatttataatgcgatattccgaaaaaagaagaaggattaaacaaatttataaaagataatacaatgaagagtaaaaatgattaggattttttaaccattgatcatcatcatcctgacaaattcatcataattgacttggccatcaccatccaaatctgcctcttttatcatttgatcaacctcttcatctgttagcttctccccaagattaatcatcacatgcctcaactgtaattatatatcaaaattacaaagattatagaattactatctactaatgatgtttattgttaagcatggatcatggccaatgcataagatatcgtccgtcgaatagtttttgtagataaataaatctatgaaattcagaaacaaaaagatagggaaaaaagagcaactctaactaaattgtaaaaataaatgtaatagatgaatactagtctttgttgagttcttatattccaagagcaaaaatgttgaactatatattcgaacgaaaatgcatgattaagaagaagaaactgggtgtgaaagtataaacatattatttacgcttaagtgagacatatgctctgcccaataaaccaatagaatcataaacacattttactaaatgttatcaatatttttaaatatttcttttgacctcgttatctccaaaaagtcataatgccagctagctcgaagcctcaaacaatttagctttttacgacacaagacacttttcaattaattaagaaaaacataattagccatatcttgttgtcattttctgctccaagttatgaataagacacataaaggatctcttgtaaaactcgaaatatcgtctagacttgtgatctgatgttttcattaattcaaaagattctaaccttgatttagctatcaatttgttgtcattttctaactaaatgcacaattgttgataaaaataagaaaatacataaatctaaattccgagcttgtgttctactcaactcaagtaaaataaaaaattaatactatttgttttttgaaaaattggttcatgtaacgaaactagacaaaataatactacaatcagttaacacataagtaacatactcctttttatgcttccaatcattaattaaaggagtattagtatgaattagaattaagagaagaaagagtaaattatttgcttacctcactggcagagatgtaaccattttggtctttgtcaaacactttgaatgcttctttcagctcttcatctgcatcagtttcctataaccacaaaaaaacaaaaaaaaaacaatcaatatatgttaaaaacaaatatgcttcattgatgtaacattttagaattgaacctggagttggttagccatgaggttgagaaactccgaaaattcgatggtgccgttgccatcggagtcgatctcagtgatcatatcttgaagttcttgctcggtagggttctgatccaatgagcggatcacagtggcaagttcatcagcagtgatgcatccatcaccatctttgtcgaatagacaaaaagcctctttgaactccattatctgttcttgcgtcagttcttgttgttgttgttgttgttgttgttgttgttgttgttgttgttgttgttgttgttgttgttgttgaatttcttccatccaattaaaacttgcttagtagtcttcttcagagagaaaagagaagagaagagaagagaagagaagagaagagagagagctgaaaagctttgaagtgcttcaactctcattctgttttcttatttgtagaagtctttgcgactttcttgctttggactcattcacctttttccacttcttttcattaaaagttatattgcacaaattattggaaataaaatactggagtggcattttcgtaaataaaattattctttttgccatgctgaaattaaataataatggcattcctgtaatattatttttcctaacaaagcaaataaaggatattttagaccaaaatattactcatataactcacatttttgatatatcattctagtaattaaacctaaaatatgggtctccctagtaaatttcccaattatttatttggaattttaattccagtcacatgattcaaaatattatttcctttaacaaagttttatacgaacttagagctttttttttttttgaaagggatatttttaggctaactagtaatttgattgaaactctttaaaaattctttttgtactcgtaatattatatatttgttttcttattatacacggctaacttgaaagccttgaagatcagaatcacgtcaatattcttgaaagttactatagtgtggtaaaaaaaaaaaaaaaacaatttttgtcgcacaaaatacatataataccaagcaaagacattatgcagatgggttgtgaattgtcttctctgtttaaatagtgttattttactatttttacgtaaatttttaaaataagaaaaaaacttacaattttctttgttacaatattcaaactaatttttcttctctaaataaattaaaaatagagaaaaaatttgaaatttgatttaaaaatacaaaattactttttgtgaaatgaaagtagagtttcaaaaacgatactatttgttttgtgaaacccaaggaatagacgaagagtatgtagtaatttgttatagtaaaaaaaaaaaaaaaaaattataaaaacatgaagtatgtgtatatgtaaaataaatgggtgtgggtttcaacagctgtaagatagatgacgaggagacaaagagcattgaaataggtagaccgagcacttgcgttacgggaaaacgtgtcgatctcttttattcctcaatttagtcattttcttgatttattttgaataaatgtgtaatttgataaaacaaccatcatttatttagaagcaaatcgtactttttgaatcttctacacatatatatatatgttgccaagaaaaatgtacatcttgtggttaatctgtttcttgtaatcttattttcagttattgcattataatctataaatatagttcgacagaaagaaaaaaaatcctaagtttcacaattataatttttacaaaatatttttttttaaaatgtacttgattaattgattatgtaagttacatttgaaattgtatgaaggtgttgcaatttgcaaagttcatctaagaatattttcatattactattaatagtttgcgactttgtgtagataaagacttttctaattaaattaaaagctgactcagcttcaacgaatcacacaccattttgtgtagactttgcataatgataccgacatctaaatgcatgcttaaacttgttgactaagctgaattggccgtgtcgcaaacaatcatttaggttcttaatcaaattagccattgtggaaaaaagacagaatctaatgcgtaagagtgattaaaacaattcagaatctatctggaccaaaatcagacacacaaaaaaaaaaagacattttgatatgattcagtaatatttctacatatgaaatacgtaaacctgaaacaatttcttaacccctttaacctattacctatacaaaagaggaaattaagtttatctttaaatttgtccaaaaaaagaagaagttaacttcaactcggataggatttcgaagtgttaaatgatcgcattgaatcctaaactattagaatttgaacctcatatattatggttttatttctatacaaaatttatgactaaaattccaactgtacagggatctggtgattcccaagacctaaattcaatactattgaacttttcctccatcgcaacatgttgacttgactagaatgtagatattcgaaaatattaaagggaggaaatgatgcatacgataacgatacgaatatacaatcatttaaatgagcaagttctttttttgattgatatggtcttgatagaacttagtgatttaataacttttgtacacaacaatttaaataatcaaccgtattcttgtttacatggtcttgatataatttagtaatgctagctttatggtaccattatcattacactaactattacacaagcttacgtatagtgtttggatgcgttttgattttgtaaagtcaaaagtgctaaatgtaaagttgtatatgacccaattaatgttattgcttttagttttgtcttttgtatttgaccttttttgtcccgcaaagattattgtagatgttgaatggcatcttttaaggggttgaaaacaatttaatgccgtatatattaagaaggtacactataaatcgtactagtgtgtttttgagtacacatttacataatgatgtgaaataatagttagatttagttagagtacttgtcatctgaattagggttaaaatatgaggtctaacctaatcccaatctgatcaaagagactgaaaaatgggatttttttgccatttaaatctatattatttagaccggttcatcatacagtatatagttggtttactctctattttaatggccatggactcatggacctattcactgattatttcctcattaatcaattttgtcaaaacttttggttatgattagtttgaagtcaaaacatgtacttttctttttttacaatgaagactataaaaaagagcaacatctatacagtttatgttataccgattagttcttaatgagtatgaataaaaatttcgtcacttaatgtttataaatagaaatggaaaatatgataaacaaatgagaattgtgatagacgaaattctaaaagtcgtccaaatattgtagatggatttcgtggtcctttgtacatatcatgttgacgtacgcaatttaacactatttcatcatttctctctagtttttttttttcttttttggttaattcaaaaatgtcaaattgacaatgagaagtgtgtggttcatccgaattgatctctcctaatttgatgtatattctatcaaataaataaacaatcgaataattaaattatttcagtatccaacaattgatttgtctttggccttaatctttttttagtgactgaaattaaaaatggaaagaaaacagctcgcacagcttggtacgcggtttcactcttttgtcacccgtccaagatcttaatgagtggtcgagactcagagatggcattacagattcatcatatgtaatattgtacggagattattgctataaagattgataaatcaaacgtagtttcgttctcttgaaaaggttatagaaactgacattgtcagtcgaatactagctgacccaccatgccaccaagtaactctatttttctttgaaattgcaattttgattgttaaatgtggtttatgtttatgcttataaacaaagaacagtcgtttaatgaccaaaaataacacagtgaagaaagccataatgggccgttaaacatttggtatacaggcccattaacctttaatcgaccttcctcgtttacaacttttcctcttcgtctctgtgaattctctgaaccctaccaaacaaactccaattcgtgtaaaaaatgaaacttgctcgtcagattgaagcaatgacgatctctcatcttccaacggagttgttaggccaagtccaacgccacgggaaaacgttaaaataacgtgggcatgtttactttttcactccaatcagacagtataatttgcactataatagtgtgattctcttttttttacagtgtaacactatatttggtgcactattatagccacggcaaatattaaaataataattttttcttttgtgttaacattattatatattaaaatagcttatttagttataatagattatatatgatttgtaatgagatttaagtaatctaactaaggcttgtaactaaaaaataatttataagtactatttttgtaatctttaatgtaataaaatgatggattagtagaaaatattaaaactaataccgaagttgattgaaaatacaataaaataaattatacatttataacataattaaaaaatttaaaccacacaaacataaaaactaaatgcaacgagatatgttttaaaaacataacaaaagcttcacaaatggttaaggaaaattatttccggttccgctaagataattataatattgggtaaaatcttcttggttatttggtgatctttggtcttcaccttgatccggttctccttgaacttgttttccatgaaatggactttcttgataatgagatgctcgatattgagatccatgatattgggagccttcaccatcttcttcatgttggtttgtttgcgctcttttttccaaaattctttttctctcattttcaatatatgcacgagaggatggatcagttatagaattcaaatctgcaaataatattttattctcttctttcattctagctacctcgatcttctgcctttgaatttcatttctttcagaagtacctttagtaatagctttgataagtttatcattttgctccaaaagttgtttaaactgttcttcagattgttgttttcgctttgcttttttcaaactcataggccttgaagataaactaaaattggcatcttcactatccatatttagatcaattgaattcataccaggggaaggtgatgactcggtattgattgaaaatgatgaagatgacgtaacggggccatcacgcttatggaataaaacaatattacatgatataatgacatcttgtatcataatgcataatatgatcatcgaagatgagcgtgatattgatgcaccaattgaagaacgggtcgaagttccaattgaagaagttgagatgacgggtgatgatgatactcgatttcaagaatttttggctcggcaccgacaaattaaagaccgagaagctcatattgaacttagaaatgctttaattaaacatttgtggtcgcaatatactaattctgagaattagtacgatgtaatttatttttattatgtttggtttatcgattgtaatattatattaattaatgaagaataaaataatatgttgtgtttaattaaataatatgttgtgtttctttattttgtattaaatttgtttaatgtaataatttgttgtctaacatttgtttcaatattattaagtatttttaaagtattcatattttaggttaataatataataatagagaatagtatttttagtgtgacttttggtgttgtggttggagatgaaaaagaatttagtgtgaaaatcacaccaaatatagtgttattctaacacaattttagtgttgtggttggagatgcccttagaagagatactctcaagacttccattgaagtctacgagagcagtgagatcgacttgcaaaaagtgggactctttattcaaaaatcggagctttattagtaaagcagcagcagcaagagaaggagagtctcagatggtcgtgttgatggatcacaatcttcatttagtgagcttcttcttcggcagtgatacttctgtagagattaaaggtaaacgtatttgtctaaacgacgattcagattcagaacaagtcaagatatctcaagtttttcactgtgagggtttgttgttatgtatcttgaaagatgataactttagtcttgttgtttggaacccgtattggggacaaacaaggtggatcaaacccagatgttctttcgaaataccccagggatgtgacatgtacaggtacgctattggatacgacaacaagagacgcaaccacaagatcttgaggtttatagattatgaattccattaccctcgagacaacgttgttttgtggtatgaaatctatgattttgagtctgatttatggacgactcttgatgttactactccacattggttgataaattgtggtaaccgtggtgttactctcaagggaaacacttactggtgtgctaaaaaaaggaactctgacctttttctcaatgctgatcatataatctgttttgatttcacaagtgagaggtttggtccgcttctgcttttgccgtttagtgatttggatggtgttgttactctagcttgtgttagagaggagaagcttgcggctttagtttgtcacgaggatgttgttgaggtttggattacgattaagattgaggccaatgaggtattgtggagcaagttcttgacagtgaatgttgatttgggtgatgagattccgagttcactgacatatggtagttttttcatcgacgaggagaagaaagttgctatgatttttgataaaactttggatcgcggcgacacagttcacatcatgggagaggctggatatggtggacaagttgatctcggagaaccggttaataaaagacgttgcccacttgtgtgctcttatgttccgagtttagtgcaaatcaagaaacctgcaggattccaaaggaaacagcaaagcaagttagaaaagcgtcaatatgttcgaaacatatcgaaacttcgcgcacttaaaacccaaagttcttggacattaagtatgtcacttgaatgtcatcaacagtaagatttatgtttcttggctcgtacttcgatttattactgctatgttttagactgatactttactaaatattacatggcttcatcaggagcttggtagagtgagaaagcattgccagccgatttttgcccgtatagctccgtctcagtttgtttcgggccattgttgaaaggacttcctgtgcgcttttttgtcgatcaatagtttagaccgctcttttttgttgccactttcttgcttaggggagtctttagatcgagttttcttcatcttcttactaagagcctcatcgcttaaggtttagttgatgcgatgaatctcgaaaggattatgcttccatgtttttttcctttttttggcatgggaccatgtttgtaggttttgcttcttgtaactcctaaactttcattttatatgatatttacattcttatcaaaaaaaaaaatatatatattacatggcttcatgctaaaggacatgatattaatcagatttttaaaatttaaagatggtggaacctcaggttttcgataatataatttagagatagcttctgttatctggcctagtctctacaaagtttttaaaaccgaaccagcgactcgactagatggcattgtcgatatatctatctagcagaatttcagtagcagagtctttttagtgagagggtcaggtgcattatcagtccttggaaacatcaaagacaagagcaagttgttcatgctcaaactaaaagattaccatccaccattttgggatatatattcaacttcttactctttgacatcttggaagtcttccacatcctcttcttcttaggtcgttatcttcataaacatcttcttcagtcaaatctgcctcaccttctgagtagcaaatattttaaaccagaccatttgtacttctgactattcttctgtccgatatgtatctctttagaagatcttggtgcataatggcctaatggggatcatcattaattaggaaataaaaatcaattcttatatgtgctgagaaaaaaaaaaaaaagctttgaagttaaaactagaaataataaaacatattggattaaagataattaatgtggatccatggaatgatcgatcatgacgagaaataaaatattatggggaatatataaagaaagaaaaatgtgcaagatgattagtatgaaaataacattcccttagtttcacaatataagtgttttggagaaatttttgtttcgaatgttttcaaaattttatgcaaattatagatttttttatttttataattatatatatatattatatggtctattttatgattggttaactttttaaaaaaataaacatgagttattgaggtttcaagaagaaagttttatgtttatggccatcaagactgaaataatgttttgtttttcttatttccgtcgactttcgtctttttcaaaatcgcaacttttatatatatttttttctctcgcctttcgatcatcggaaaagctctttttcaagtctccccaactcataactttgaattttctatttgccccctcataaaatttgcttctattctctttgtttgttggagttctcaagatctgtttgattctgaatccttgtaatttttgtatccaaccagtaacaaatggggttttgtgaaggtttatgagtttcccatattcaaatggcgatcttttagtctgagtaaaattgtggttcttatctgtttttgttaaagtttcgatttttattttgagggttgaattcgagaaattttgatggaagcgggtagctccaattcgtcgggtcagctatccgggcgggtcgttgatacaagaggcaaacacaggattcaagctgaactcaaaaggcttgaacaagaagctcgattcttagaggtattttactctcctcttaatcttaaaccctttcttgtttcgacgtgcttgggccttttggctgattatatcatataattacagattggatcaatctgttgtttttgtgcttcggctctttttggatggaatagtataaatctgagtggagtacggtagagactttcaaagtttgaaacttttttagttttgggaatcaatttgatttaggggtttttgttgttgttggtattcaatgagtgaaaaaaaaaaaacaggttttgttgtagcagttggtattgtggggttgcttttagtgagttaatagtacttgtctcttgatatagttcctttttatatgcttaacaagattggatcttagattaatggaatcgatctgactttaagaaatgtagtgtagaactgtctccttttaaagagatttttgtgatgctaaatgttacttgagtgagagagtagatcctttgcgaacaatatgcttctgttgataaaacaaatcaccagggtcagtaattaggaaggttcaagaatggtgaggagtgaaactgaaatgtagtttaagctcttgagcatatttcattcaggtgtaataatatcttgactcttgatcccttgaggtttaagctcttgtctacgtagctgttatgacatttgtgaactcaaatgcttgcttaaaagcgttacaaggttttaactttcttccttcatttattatattcaggaagagctggagcagcttgagaagatggacaatgcatcagcatcctgcaaagagtaagaacttgttacataactgatatccggttcacgaataatcattccacaagcttgactagtttctcgaatggatgcaggttcttagacagtgttgacagcaaacccgatcctcttcttcccgagtaattcttcttctgttttctgatagtttcatttcaatagactgtgagatgattaggtctgatatgtttgcttttgtgactacttgcagaacaacaggtccggtgaatgcgacatgggatcaatggttcgaaggccctaaagaagcaaaacgatgtggctgctccattctttgatcttcctttccttctctcaaaatatttttgtctctacttcttccagaagagtgagtttgtgtttttacgttcccgcggcagtgaatttgatgtaattggcaaaaaaaaaaattgattcatttgtgcagtaaaaaatctattgatcttgatgtgtctcttaatttaagaagaccacagtgccaaattcacgccaccacaagaaaatctagcacagtggccgtcggtgatccccacaccaatgcatctcagttccagattgtcttggaaaagttctcgtttctcgatggtttacatgtcgtgttcgggcaagttgttgaaggactcgacgtgctcaggagcattgaagacgaggttggaactttgaacaggattccttccaagccggtggttatcgcagactgtggtgagctctgagagaggctacaatggtgtcttgtcttgttttaatggttgctctgtttttgtttttagttcgtttggattttgagtttggtggtagttttaaatctgaaacaaaacaagatttttttcttccatatatgaaaattctggacacagtttcaatgagagcaaccaaaatagttgaagcttgttacataaaagtcaagaggatacaatgttaaagaacatatgaaggagacaaaagaaacaaagaagaatagtacgtactctctctgattcagttctggtttccccttaactcgtggctttaccggtaactttttgggcaatccaaccgagcccatcatacaatccttctccagtaaccgcacaacttgcttgaatatgccaatcatggttcttgatactgtgaaggttaagtgcatccgtgatctcagcaggagtcattgcgtctttcagatcctgtttgtttgcaaaaactagtatgaccgagttttgaagatcctcatgaccaagtaacctggctagctcatctttcatgaaagagattctggctctgtctgtgctatctataaccacaatcacagcatgtgttccacgatagtatgttgcccatgaagttcttagcctatcttgcccaccaagatcccatacctaaagacaacatatcataaaagtaaacatcgcctcaaatattcgattgccagtgtccaacagttagtttttgacaggaaacaattcaaactttagtaagtttagttacgtttatattcatcattgagttttgacatataagaacacatgcagattgtcataaaacagagatgaattcatctcaggccatgactttgaccactgtataaagatgttccaaacagtcctctggcaaaaaaactaagctaatgggaaatagcaaacagttcctccggtataacaaacaagctagataaacaacatctacaaaaatttactatacaaaaccataaatcgcacatacgaaaacgttcattatgagtttctgacaccttctcaaccaatcatgacaagaacttagacaaaaacatcatccatttttcaacgagaaaaatgcacacacccaagcaagaaacatagctagggacaataacacaatcaaaagatggcaatggcaaatttaagaaacatccataaagtttcaaacttctaaaacacgtccctagataagaagctaagaaacaacttcacccaaatgaataaagaaagagtccagtacctcaaagcgaatattcttgtagacaagctcttcaacattgctaccaacagtaggatgagtagtaacaacttcacccaaatgaagtttataaagcgtcgtcgttttaccagcattatccaaaccaacaacaacaatcttatactcttttgcaggaaacatcatgaaccaaaacctcgacatgaatgctcccatctcctccaatttctatcacaaacaagatcctaatcaaataaaacacatcattacttttacgatcaaattgttctacaaacagagtgaaatcgagaaaccctaaagatacatcctttaaattgacccatcaattttacaaacccaagtaattgaatcagagaagcccagatcagatttggatacaacgatcccagattcgataaagttaaccaaatctaaattatatatatacaaatcgggaaatttgtgatcaaaccttgaatcagctagaatctgaagattgcagaggtaagaatcggagatcaaaaaaagttcttcttctactattttgtaagcttttgaggttccttccttaaagcagatgggtggagagaagaagaagaagaaaagtatgcgggaaacaatgtcaaaactgtaaatatgatgatctaaattattaataacttttaatataacaaatattaaaatgaaaactatatagtaatgttttcttttacttacccaaacggctgcagcctctaccgtaatggcaccgaacacgtcaccgccattagccacgacgccaaagacgaacattgttgaagacttgaaatccacaaagatgtttttaaacgagaaaaaaaaaaactcaaacgggcttagggcctttccatatattttagattataacaattacattttctcggcccacagaagtatataaaattaaatagaagtaaattatattgaggatttaaaataacaaatttaattataatttgaaatcatggttataatacgatcgtgtgaaatgttaattaaatgcttatattgattattttattattaaatttgtgctaattttggtaacgaatcttatttttgttattgtatacgatgatttaaaatatatatatatatatatatatatatatatatatatatatatatataatagttctagaaaagtctaattggattttttagatcctatcatagttgatagttctctttttgtatatggctagcaatgcggaatcgactctctacattagattcaatgaaggcttggaatgtgaacttgaatcgaacatgtgtgttatgtaacactcttatcgagacacgagagcacttgtttttcagctgtaagtactcgtcggcagtctggtcctccctagcgaaaccactactctagtgacgattctctacaatatggcaagctctagtcattattattacttctgatcactgtaacagaatccatatattcttcctctaatacagttttcaaataatggttcattcgatttggcgagaacgcaataaaaaaaacacacaataaaactctgattcttatcacacatcttcctaagtgaatagataagctggaaaaaaaaaaaactctcaatcatttgaaaggagaaatatagtagatacgaaccaaatctccaaacatggtttgcatctaaaagtccttaaaacctctcttgtataatctaatttcaaaacaattttggaaaagttacatttgatgtatcctaactttattttttcttggtcgaatttaatattttattaaaaataataatagtaataatcacaaaatctaatttgatcattcttaggtgggtaggtacacttattttacatacagcctcgacggcaccaaaacatagaatatatatataaatacaaatacaaatattccaaatataacctctctcccaaagtcctatcatatcagaaaaaaaaaaaaaaatccaaattcaacactctcacacttcgatatctccgccttcattctcctcagagccaactgtcctgagatttcgatttcgatttctccgatctctcttcctccgtcgccggcgaaaccatgtctcagtctattcaattctccactccttcacacactcctcaccttctccatctccctcactcacaattcaaccgtcctctctcctctatctccttccgtcgcttccctctaacaaccatcaaatacacttccatcagagcctcctcgtcatcatctccttcaccggatctcgattcatcgtcctcatcatcatcctcgcaagtacttctctcacctaacggtactggtgctgtgaagtctgatgagagatccgttgtcgctacggcggttacgactgatacgtctgggattgaggttgatactgtgacggaagctgagcttaaggagaatggatttagaagtacgaggaggacgaagctgatctgtacgatcggaccggcgacttgtggatttgagcagcttgaggcgcttgctgtgggaggtatgaatgtggcaaggcttaatatgtgtcacggtacgcgtgattggcaccgcggtgtgattcgtagtgttcggaggcttaatgaggagaaaggctttgcggttgctattatgatggatactgaaggtagtgagattcatatgggagatcttggtggtgaagcttcagctaaagcagaggttgtttaatctcttcttattttgatttgaattcgatgtagacattgctgtgtttgtgatttagatgtttaagctttggtggtgatgacatttttacaggatggtgaggtttggactttcactgttagagcttttgattcttctcgtcctgaacgtaccattagtgttagctacgatggtttcgctgaaggtatatgcaattatgtttatgtaaaagtggaagtgaaaacattagatgaatattatggtgactgcgtatgaaataggaatcatttggtctttgtgtgtggtgtagatgtaagagttggggatgaacttttggttgatggtgggatggtgagatttgaagtgattgagaagattggtcctgatgttaagtgtctatgtaccgatcctggattgttgcttcctcgagctaacttgacgttttggagagatggaagtcttgtacgagagcgtaatgccatgcttccaacaatttcttccaaggtttgtaattttgtatcttccctttaagctttgaattatgattcactttacttggtaaatttgggagggatcaaagcaatggtgaagatgtacacttttggaaactagatgagtccatgttagcaaaacagatgatacctgagggaaaacatactcattttcactgatgatacctcaattctttatattcaggactggttggatattgattttggaattgctgaaggtgtggatttcattgctgtatcgtttgtcaagtcggctgaagtcattaatcaccttaaaagttatcttgctgctcgttcccgtggagggtaagtaaacatgctcaatatcaacacatcatactactgtacaggaaacatatgatctactttgggattgggttttgcgtcatgtattcaccatctttagttatagttttattttgatgttgtattcaactatgatgcagggaaattggagtgattgcaaagatcgagagtatcgattcactgaccaatttggaagaaattattctagcatcagatggggccatggttgcaagaggagatctgggagctcagatacctcttgagcaagttccagcagctcaacagagaatcgtccaagtatgcagagctcttaacaaacccgtcattgtcgcttcacagctattggagtccatgattgagtacccaactccaaccagagcagaagttgccgacgtgtctgaagcagtaagacaaagatcagatgcattgatgctctctggagaatcagctatgggacaattcccagacaaggcgctcacggttctaaggactgtcagtttaagaatcgagagatggtggagggaagagaaacgccatgagtctgtaccgcttcaagccataggctcttcattttcagacaaaatctcagaagagatctgtaactcagctgctaaaatgggtaaatttaggttctttgttttccatagaaggcaatatgtctttagtgtctcattttactatccaaaaacttgcagctaacaatcttggagtggacgcggttttcgtttacacaacgagcggacacatggcatcactggtctcccgatgtcgcccggactgcccgatctttgctttcacaaccacaacctcagtgagaagacgcttaaacctacaatggggacttatcccattccgtctcagcttctcagacgacatggaaagcaacttgaacaaaacattctcgttactgaaatcaagaggtatgatcaaatctggtgacctcgtgatcgcagtctcggacatgctgcaatcaatccaggtaatgaacgtcccgtaattctctctctttatacaatttcgcaatcccgcaaaagagtgttttgtttcctacttttgttactgtttttagactactcttacattagattccagaggcatcatcatcttcggtttgttaacaacagtaatgtgtaagctttgtttgtagtgtgtactgtttgtttttggttttcaataatatcagtaatcttattcaaatattcgattctatcatttagtccttttgttttatctttttgttaggatatatatgtaaacccaaataggatgagttcgaatatataccataaccctatattataaatagtgtatatataatcacaattagaatcgcctctccattagagaagatatttgaacaaacatgaaaagttgcaagagacctcggatgaagaatcaagagagagatttttatgaaactccgtcggattgttcggaagaagagattcaacggagttgcgagttcgtgaaaaaagttaaagagttggatgataagacaatcatcgttaaatttttaaatgcaatgaagtcttatcgatctaagtctttaagttacatcgatctcaaaaccaaagtcgcttctattcttcgtaaccacgacgctctgctccaagaattccatcagcttcttctattagattcacctatcacagagaaggattgtaactcggcaaaatcagacgtagaacgcacggttgagttgatgaagaaagtggaaggtttgggaaagggtttacacggtgcgttcctaaatcagctggtgtttggcggtgatattgtggatttggttgaacaactcgacgtgattctctgcgatcacgcatctcttaaagaggagttcatattgtttctagttgattcccgtttactcaaaaaaccgaaacgtggttttgaggcgggggcagaagagtataagactagacttgaaactgaagaggaattatcatcctctgatgagtttttaaatgggaaatacgtttcaaagagtcagtatgatctggatcaagtgaagaagaagagactgatgcaagagtaagaagacgaagatgactgatgcgaaagaatttaaggtaaaaacgaagctatgaccgtcaagaactaaagagcaatgtgaacaagtgaagagagttttgtttcttttatttttctagtcttttttttttattattgatttgtggctacattgtgattgtgattgtgaatctcgttatgtttctttgcattcgagtcttccaatgttgttttctattcaccaaaaaaaaaaaaaaaacgttgttttcttaggagggcgtaatgaatcctttttcaaagtttttatgcacacttgatttaaaaacgtgtttaggaagtttatgaaaacttctgatacactttggttatcaaaaagttcatgaaaacttcttaaaagactctgataccataaacataacaaacacaatgcctttaaatgttcttgtcctttttgcctattttcgtcaattttcacacttaacacacttatacattgatgccttctttgcttgctacgtaaactcgggattctacattctaaggatgacgggcttattttctaatgtttggcccatttaggcccgcaggttttaacccaacatcttcgaatatataatcatcgtcaatatattgctttttgatgttgttattgctatggaccggtgagagagatatattagttcgccccaatcaaagttaaaccaaatttttttggtcgaggcctcgagtgaaacaaaaaagatggtgctgtgagttacaaaaacaatcacttatttgtgtataatttgtagaactactacacttatatgttattttttccaagaatatctctattttaggttcaaatatataaatttaccctcagaactagttgataaatttaatttaaaataaataaaaagtgttgatcgaaagaataaaaaaatcgtagctctatctcaaatagtaatttctttttaaaagtagtatttctattacaaaaaaaaagaacaaatgtctgtttatctttttgaaagttattcaaaaaaaaaattggcaattgataaaatttctaaaatgtgatataaactacttttacggacttacttgtcacaacggttcattttaatatctttccgaaagttttggggtcctcttgaccaatcgtttctatgttcaatattccgaaattaaaccgtgaaactcactcaaagaatgattttaactattttgcaacaccaattttacactccgacactaatgagaaacatatcaacataattgaatgcgtcaagtataaaaactaagctggtggtttaaattaatccactagattagagaacgtaatttttatatagtttagattaaattaatgtaaatcaaataatattggaggatttgatcatatcttcccttctactgtttgcatcacttaaaccaatggtcccatttctattaaaatagaagcaaatggacccaatcatatattttaaatgcaaaagactcacaagttttagattaatcatgaaacagttcaataattcaattattatatatagtcagaatagggacctttaattaagtagttaatactttacgggtccgaattataaagacatatacaaacaatgtaataaattgataatagagacaacaacaccaacaatagcaaacaataaattaagaaattctatccatgttattggctgtgaattcaaccactaaattatgatgaacatcgtacatataccacccacttttatgataaataacaaatgtattattggaaataatttgttacattgcatgagaaaagtctgtctttggttcaactatttttaggttatcttctctaaatacctcaactaatcaaaagatccaatcttcactaaataagcaactctctttaaaatgcttcctttagcaaatatgtatatacgtgctttgttttgtctgcacaaatctgaattaccagaaaaataggaatattttcaaaagaaacagcaacaaaactccaaaaacaaaaagaagcaaaaaacaggtagggtaatgattatgtaaagcagtatatatatttgtgtaaaaaatatataaccatgatatcagtattatcattacaacatccacatagatatatgactataagtatggacaagaccttcattatcaaaagcctttatgtcttcttcagtccttttctgatttgctaaatttaatattcagatctgatcactgatctctaaccctaaactcatttttctcttatccatgtgtgcaagcaatcatataatatatatttttatttatttattttatttcaagggtccacttacttttatttttgtttattcgattctgcattttatccggattcagaattttaagatatggtgatcggtcaataaaaactccaacaataccattgtacttacgtctttgatcatatgtgatatataaatatttactctaaagtttattgactttgtatttattgaaattcctgaaatttcaaagcatcttcgagaatgcttcttatgcaacaaacttattgatctacatgtacgtttctatgtttgttgtcagacatgtgcatgaatgtaataatatgaaacgatataatgcgtataaatacattatataccggcatagtaggaagtgatcccaaaaaaaaaatcataataagagtgtagaaatgaatgtaatgaatataaaaaatttaaagagtagattgataactaagataaggttagatttaaacttatggaatattgaaatggggtaggccaaccaatggggatattttaagatgatgacgtttcccatttttattttgtactgtaacaaacttattaatttcttcttgttttgaaaaaataaaaatatatttgtttattctccgaaattttcgcattattcttaccatatgactttcaaagtgttatttatcgtcacgaaataacaaattatttcaaaagactcaagaatataaaataatagtccctatgtttcaaaacaattataaaaaaacgtttaagattcattgtgaattcaacatgaacctatgaatctcacaaaaagcaaagatttactacattttcaatttcaacctcacatactaggatgtgtttttaaattgaactatttgttaggtttgagcaaaaccatttattaaaacccaatccaccgaaaacgaaaaagagtcatacctgaacttctgcctaaaccaccaaattaaaaaagagttcgccaaacccaggaaaattaaagttcttacatgaaaaagagttatttaggctttcaatataatatgtttgcccaaaaaaaaaaagctttcaaaataatatcagatgtacaatttgtatatagtgtctttggatcagtgtagaaagtcaatagcttagttaattttattttggcacagatcaagagtttgaaactatacgactagatatgaattagactctgttcatgggtttggatcgtgttagacgttacatagtacatacgtttctatagatattatatttatttaaatggtcaaaactcaaaactccaatttcagagaacacaattaacaaaaaaaagattgatgagtgatgatgagttatgtaatgatatagtacaaaatctcttaatcatatataatcataaactctcttacgtagatgatatatatatccacataataaaaattactatcatattaaattttaaaacttaataaatgcttctattttcatgtttttttttaacatcaaaaatatctcttagatttatcaagtttttaattgatgtaattcatattgtcctggttcgagccccgtgaaagagatattaattgatgtaattcatattaacgtataaatgcacttaacattattcattaaattactagatttatcaagttgtttgggttcatgtacaacttcaactgtataagtatacacacttttagaagaaaacgaggaaaattttttctttctatcgctttggatactttatatgcaattttgatttgtgtttaagagtacacaatctaattgattattttttcttttgagaaaacacaatctatataactttgtaaaagtgaatataatacgtgcgaagataaaagaattacaatctattttatttatgttattgttaattagataatatgatattgtcataatatatacagacctttaaaagtataatataaacttcgagttaaaaggcaagactcgatgacaacaatattattgattgatgataaccaaaatatggagtctaatcgtatatactgtatattgtattcttcgatctctaacataagttacgttacatctatgtgtagcattcaaagtaggccaaacatgtttaatacaacaatattctctaaagtctactcaatgatagttaataagtcttgaggttaagtatgtttattacaaaaatacatacatatatacatcaaataggtgaacggtaaccgtgttgaattgtctaaccttcgctttctcgcgttattgtctttgccctatgaattaaacaacatgtatattaaaaacaaatatgcagaatttgtctattattattatttctacacagtaattatgcagaatcattcatccgtctatacaatgttctaagaatatttcagattatatagtatactttcaaaaaatttagagagttggattatatatagaattaccttttagatgaaactaattaaattcatgtgaatcggattgttaacttgtaaaaaattcctcttcagaaatttgtatacgagtagtttaatctgactgacctgatttttttttgtcaacatttgaattttacattattcaaattttgtgtttaatacaaataagcttaaaacttgttttttttgctagctatcagcttcctcattagctaatcgaattattgaaatacaaaggaaatgaaatcaaacgacaaattgattgacctgattaaagttacaattgaaaacaaattcattgggcttcttcttcacaaaacttgagacaaatcaaacggcataaaatatgtcaagtatatcaatatatcaacatcttgtagacataattgtgattaatttgttagtaaaataattgatggttaaaattttgaataacaattaatcaaggattttgaaataaaatcaaaaatgaatattattcctgtatcttatcatattaacatctataatacataattttattacaatcaaaatggtttgtactgtaattaaatatatcccctgaattatataataagataatatcatttaataaaaatcatggaccacaaatccacaactaattaacaggaaaaatatctctttaatttttgtggaaaggaaagtgtcgttattgtcaatattacttcacttagaaaaatagggtacactttctaattatcagttcttaaaatgttccaggaataattcgaaataacaaatttattaaaacataagaataaatgataaatacattctaaatatatatatatatatatatatatatattcttaatgagctagatttaaagacatggtagaaaaactactttctactttaataatatttaaaattcataaagctatgaattggctagttagttaaaaaaaaactactagtactagttagaaacatatagaatagacagcgtattactatggtttagaaataaaaataatgtggaaaaatatggacaaactcatgaaattcatcaaaaggtaggaccttaacttggcaactcccagagcctatcaagcaaaaagaaaaattagcaaaggctgcaactttccctaaattaattgaaaaatcaaaagtgttaattatgatgatcttggaaacagctgatctccaaatcagttcaaatgtggctatgtttctccaccaatgttcttaacaagatacgagcattgattcataaatttgcattttaccattttctaataaatccagactgaatcatatcacattgttagattataaaatcataaaaattgcatcacacaatcaagtattatctaccaaaaaaatactaataattataccatcttaatatagagaatgtttatacggattacaatcatgacttgagttgttatcgttgttagaaggggactttttttattgactcaactaacataattttatagaataaactatttccaataattgcaattcatcaactatcacaaaataacattaggattataacgaaatgaaataacaaatccattaacaaaaacgaaataaaaatggaataccaaattatttaaactagaaacggaaacggctaatctataattatcatattcaactgcaatttggcaatgttgatataaatactgggttggtatttaggtatttaagtagtactatttcacaatttaattccaggaaaaataacaatggtttttattggtaaccgggggatacgtcatctaggaaatttcgatatggtggttgggttaaggcatgacaaagtggttgattttgaaaccaaaggttgggtaaatactaatttaattgcctgaaaatcatgattaaggaattaaataaactataaagaaaaagccaaaaggaagaggataaaaaaaggtaatttgggagtggaaataattagtgttgtcaggtcccagaggtgtattactgttccctcttaattaatactactatttgggaatctaagaaataattaaggtaagaaacaaaaaactaggggattgtttaaaaatatatttgcacataaatgctgggattttgttacccattgtttcaacaaatcattttttctcaaaaagcgaaaaactttcatgtagatagaaaacgttaatgcatataatgacttgcaacaagccaacaatgcgtaagagcttcttaagatttgaacataataatttgcaacactgtcaataacccgtacttcaaaatcaaactttattagaatatatagcgaatgaagtaatgaaccatggtacttcaaatgtactactatcttttagagttagggttgaattgtataaaggatattcttaagcaatgtttggttagtttagtgtttgctttagctaggttagtttagtgtttgctttagctaagtaagacttaggcgtgggcattcgggttcagttcttttttttcgggtatcgagtctattcgggtaagaggttgagaaccattcggatattctaaaaatttggtttggatcaggttcgggtcgattcggttattttagtaaaaatttaaaaataaccaaaaatacccaaaatattttcgggttcagatcggattcggtttttttactcatatatacctaaatctacccgaaataccagattaccgataaatatattggttactttttatccaaatataaccaaatgtaagcaaaatacttaagttacctaaaaaaaatctataacattggttacttttatcccaaatatatccaaatgtatatgaattactaaaaaaatctagtatatttggatttataattttaattttgggtgtttgagatattacaaatataaatataactaatattttaaggtttacatttgtattcgggtacccacaagtattagattcggttcgagtttggttcgggtttttttgggtagtgagttctaggactcattcgggtaattttaaaaatcgggttcggtttggttcggttatttttcggattttcggttcggatattcggttctggatattataaaactaatacttaataaaattagatttattttgttacatgtatatacatggttatatatatgcacacagggggaaaaagtcgaaataaagtgataagaaaaagggttttgataacttgattgctgtagagggaaagtatcatcagcttttcgttttggggagacgaatctttgtttcttttttcgtgtttttcaatgttacttataactccattttctatattgctataacaatctagcattactcttttataacacacacacacacacacgaataatcgagtatctaatttgttttatacaacagaacaattactgtattaaacagagttccacaacacttaactatggtcaaataaagtttatgtacttgttttcttttaacttttgtagttgaatgttcaaatgactaaatgagtaaaacatgtacactatcaataactttaatacgttgacaaaaaacaatggtctagtacaaacaatataagatattgatttagatgcatggcacaattttggacatgaaaatcgaggcaagtattagaatacaatagtacatgattgataggtataaaaatacgtacgagtagtcactattgaaactcataatgtatttgtatcattgtcctctaatttaccagcagctaggataattgcatacatgcgtacaaaggaagagtcatcttcttttttattcgttttttaaaaccgtacatttctttaaattctcgattccacctttttctttttttactctatttaaacttttatttttgttgtttacttttacttttctttatatgaatagaccaaacggtcaaatatttggggccccttcttttgcatgatttttagtaaatttctttttgattaatggttgtgattttaatgtgggttaataaagtaaagcttaaagtctcataattacagcatgggtttaaagttataaaaattgtttaaatagcttattattctatattgttctcatttcaacattcagattattactgccataacttttactttttcttttacaactatttaaaaaaaaaatctcagcctttttcttcttttgtcctttagtggtcagtctaatattgttttccccaatttttactgacattatattattattactcaaaataacccgatcatacaattaaatcaaaatttaccaggacgagtagtgttaatagatttacttaagacacgtgttacataattattggattaaaatcagtttccaaaaaacgaataatccattttcggatatgcccgatattccacggtagtggaggacaaaaacgtaatttcggtattaccacaattactgacacgtctccagtaaaaaggattcaccaccacgctaagatgaaaacgacaaaaaaataaaaaaaccatctcctcccattaaaacggtaaaacaattaatatccgacgtggcatttacagtgcctagtcagcttttttacctttgaagtctcttcagcttcggacctctctctcttactcctttataagattaagccaacctctctttacccacacaatccacacacacacacataagaaaagaaattaacaaattatcacaaaaatacgttttcttgtataataatttttctctagatttgtcgcttaccttttgaaattctccggcgatgaatctcgccgggaaaaggaatattccggttattatttctgtttccgttactagtgactcttaccatcgccgtcatgtcttccgtgaacatcgtcggacctgaaaaatccttctcctagactttttttttttctttcttctctttgtattattattctttgcttcgtttttgtgaagaagatgatccgctgatttcagaagttttcttcttctggattttagctgagaggtttttggtagattctgtttcttcttcttcctctgtggttttcgaatccagttttggaatttttgaagattttgtttagtttctgttgaagagatctgagatatttgaacgaagcagagtgtatatgaaatcaaatctgtgaaaatttctttgaatttgaattgactttggacttgtgagagaagttagatcttcttcttcgtgagctatgccatttacgatgaagatccaaccgattgatatcgattcttcaccaaccgtagctagagctgaatcaggaaacaaaccggtgctcaaatctcgtctcaaacgtttgtttgatcggccgtttacaaacgtattgagaaactcaacaactacaaccaccgagaaaccattcgttgtcaccggtggtgaagttcaatgcggcggagtagtgacggagttcgagccgagttctgtttgcttagcgaagatggtacagaacttcattgaagaaaacaacgagaaacaagctaaatgtggacgtaatcgttgtaattgctttaacggcaacaacgatggttcttccgatgatgaatcagatctattcggtggttcaatcgacggttgcgacgcttctgatcatctcaaggtaaccacaacaacaacaacaacaaattcttaatctctcttgatttaaacatgaaactgaatttgaatttgtcgatctgaaacagagtttgattccgtgcacaaccgtcggagagaggaatctgttagccgacgcggcgaagattgtagataagaacaaatcggtgaaacgaaaagacgatatgaagaagatcgtcaatgaaggactcttatcacttaattacaattcttcaatctgcaaatcaaaatgggataaatctccttcgttcccagctggtaaacaagatcttcatcttcttcaacacaacaactactttttttttattcatgaaatttgtttgaactgatgaattaattaaatgttacaggtgaatacgagtacatagatgtgataatcggagaagaaaggttaataatcgatgtagatttccgatcagagttcgatatagcgagacaaacgagtggttacaaggtgttgcttcaatctctaccgttcattttcgtcggaaaatctgatcggttaagtcagatcgtgtttttgatatcggaggcggcgaaacagagtttgaagaagaaaggaatgccttttcctccgtggaggaaagctgagtacatgcgatctaaatggctctcttcttatacgcgagcttccgttgttgttgtcgatgagacggtgacggtgacggatgttacggcggcggatgcggcggtggagaaggaggtggatagtgtagagattgagctggtttttgaggagaaatgtttatctccgagagtgattgttaattcttcctcctctccaaccgacggcgatgatgacgtggcggtggagagagaagtgaaggctgtcaccggattagcttcactctttaaggaaaagccctaaataaaaaattttggagtttttttttttaatttctttttctaattttcaaggtaaaaaaattaaaaatatataacagtaaccatatattcgctttttttttttcttacatttttgtagtttgttttgacctctcttgtttttttctttacaaggggtttttaccactttgtactttagtaccgtccacggtgaaaaaaataaaaaataattactacttcccgaataaaaatgttatctataaaaatttagtacttccgaaactcaaaaacacctgagaaatcgtgcggtggataacatttttttaattttaatccaaattttatcggttttgtgtagtcttaaaacgatagcgttttgatatttgtaagcatataagggaacagaagagtatgacacgatctttagttttcttagtttctcatcttttgataaaacctttgaatttgttgattaattaaactttaagcgttacggatttgtttactaatctgtttatttaattttagattagtgacgacagcattgagaaaagagagaagctcgtgggctctcgatagttgtggagagtgccagagctgttcttgaacaacgtctcatattcttctctattcttttcttttttgctttggggttaatcttttttttataaggtttttttttgcttaattgttttgatttaatgatctttgtttcgataatctcatttttatttctttattggataactttagacatttcccaaaatcttgacacgttaaaatttggtctagtttctgtcaatttggctctccaactaactaataaaaccgtataagcttaggtggatattttcttgtttttagtctgaaaaaagcttaggttgatttataaatcataataatatggataatggaattttttcgttatgtatgttgagaaatcagcttagatactaagggagatcaagactgcccgatataaaaaatatcgagataagaaaaagatgtatataaataaaataaaatattatcaattaagattacaaactaaatttagaaaccaaaaattgcgagattataaatcgagtttgagatttataatatgtttagtttcagtcattttgatgggtcttccaacaatgtataagaggcaatatgtatttatgtaatttggacgttaattggattactattttgtttctatgattttttttttcttttcttttcatgttgcatttcaaatttgaagagaaaaaattagtggcttgtgcttgtaaaacgtgttagatatttgttcgtgcagtacccattggtatatgtattattttgccggatatcttgaagagaaaccacaatttttgactctttttgaagacaataaatcattttctgtttgtcttaaagatgtaaaatattcgatcgttttcactataaaataatgttatgatcgcattgatgttacattgtttaaatatttgtaggattatcgtgttatatctatatatctataatctatcatctattaataaacaaaaataataaatattttccaacacaaatttttcttatttaattgtcatgcggtaaattcttattacttggattgaaaacttttcatttcttaccattatcagtattttagtttatcattctttctttctttgtgtggttaaggtgaatacgtaaacttgtaatgcaataacagaattatgtggtgaaagttaattcaagccccatggggttggttaaccacacaagcaatgatcaacaacattatgattgatcatacgtacaaatgtttactactattggaacgtcgcttctttattttataggtttaatttttagtaacataggatcatggattcaatactcttaattagtttccagatcattcccaatcataacaataatccaaattttgtaatatggtccattgaacatttgtaagatatatataatcggtagatgatcaagttaaaagaaaacaaaatacgaaccctattggcgaatttctacgatttttgcaggaagcaaccaataggaagaacaattatgttgaagacatccccatgatgtgctacttctcaaactttaggaacatgatataaagtaaaagtacacacatatacgactctaaacccatccatatatatattaggacattttaccgcaacttatctaattgtagattcagtattgtatttttacattatatttgcaacggtgaattaatcgtgaatttgtgatacatttatccctcttccaatccaaaagtttacaactaaggaacttaaccatagccaacaactcgtcatctataatttctaaagattaattacctaagtcatttaaccaatttggtaaaatcaacatcctctacatttgttgtgggacgaaaaattgccttcaaagtgactacaaaagaacaaaaacaccacgtttaatgggtaaatctagaatatgattttagccgatcgtgtacattttttgtttgaaatttttatatatcctatttgatacgtttcatttttttttgttcttgttaattgagcccaaggaaacatgatcttcacttcaaattatacacttacaaaaaaaaattagtgatattaagtcactaaattgccatgtcttgtcagaacttttaaaagggaaaacaaaaattgggtgtttggaaatagttaaaggtcttttttcctccatttctgtcgaagcctaaaccaagtatttacatggacctaactatgttccaaatataagtatgtaattaaatatgttttttctttataaacacatacatactatatgatattatatgtaatatatcacaatcattgatgtgggggcaccagtcaattcatccgtaactatagtatttattatcattgttattattattttatatgtccatataacaaatgttaattgtatattcgaattatttgacaataaggtagggtcggttacaacaatttcacaagctgtggggtcttaattcccttttcttattatcatccactctctttttttttctggatttgacattatttgcacgggtagaaaaataaaatatatcatattaatgtcactatagtatttattgttatgaatatcatattttggtacgtttctcttttcttttgttaccaatagaaaaagagaaagtaataaaccatgggttagattaatgtctatagaaaacgactctccacccactcttttaaatagttttggagattatcttatctttgttaattcacatgagttttggctaatgagacaatcaagatttctgcactaaagaggcagatataaatggttttattatcttaatatatgtttaaagctattgcacaaccaacttgttagtatattgttgcaattattattatgattattttttgaaacccccacatgaacgttacaatgatttgtttatattataaggttatgtctatgtagagagacaaagaaagagaacatgataaagaggcatctttttataagccaacatttgatcattagacattttgaaagtgcttttcttcaatgttgaattcgaaaacttactacatactctcttgtccgtttttctcccatctctcttttaacttttggaatttacatgtcttcttttaccacattttgtcaaattgagtttttcttttctttaagctttatagatatagatgactagctaggaagagtaaagatgttgacatgttaatgtgagaatgttaagaatccatccataatttcttcatttatacgtattgatattagttttgctctttaaattacgtataggtgaatgttagatatttttttgttgttgtcaacgaatataagatttataaaaaaaagagaaaagaaaagagagacacggaggagatgtgaagagagacttatccactttgacataagacttggaatattaggtgacaacatgtgattcctctcctcactctcttcctttttttttttttttttttttttgccttaaaattcggttttattatttattaagagatacaaaagaactactcgatttcatcatattgatttggtcgcacttgcattataaatttataatcttcaaaaaaaaaaatcttcatcggttctattttcccttgatatctattattacaagatgatgtgccataataaatattattttctaaaaataccaaataatttatatcaatagtgttcaatccagagtttgattcaatttgggtttgatttttatgtatcttaagatttttgttttatatctagtagtaaaaagtggaatataatctaatatggatgatttgttatcgcttttgacttcgcttcgtatttgagtttagatgttagacaatttttaaataagttaaaattttcatttttttttaatagatacaaataatatatccagctagatcgttaagatatagttagacttttggatataatattcagttaggtttgtattatatcagatcggtttgtcttaattgaacacccctaattgtcatttctattcaaagaaaatatttctatactagattaagaaattaaaatttgagtttatataagcaagttctattgattttaaataaatatatttatgcttcttgtttgcatattgtttatttaaattaaattgatatatttaaagtatcagctatatttgtttttgataaatagtattaaataaattaggaatatatgtattaaattgtagatagttaatttttgtacacattgatagtgagatatcaatttttcttaagatacaataatttcaagttattacatgttgacaactaaagaaaaaaaaattctaaatatttttgtcttatttgagaaagaagtagccgagcctaaaaccacaacatcgatcaaaatgctataaattgattagtcatccacagcaagtctctagatatagatatactaacccaaaataaataagttccttataggcaacttttaagtaacgaaaccaagctattcaaactactagaatttgtcttttcaaaagcttgaattctagattttaatacatgttgaaactatcataatatcttggtcaactataaaaccaagaaaggtttcatcatttaaagatatcatgaacatagtaatttttttaaacctttgtgttttttttgttaaacacttaaaacttaatcgaagttagattatgttttcttatatggaaaagttgttattgaagtctttacaaaaaaaaaaaaatatgtgtacaatatgatcattgtttgaaaacaatattaagtgggttgggtacaaactaagtaaaagaacttcaccccttgtcgggtttatagataaactatggacaacttatgaatatatttaatacaccattctgaattattacctgttaagatcataatgatttacataaatccaaaaccaaagttattaaacatatataccaagagaatccaaaatgcatgaggaggcaacataaaatctcaattctcagacttttaatggattctcttattgagta

SEQ ID NO: 1044 - DNA, 2490 bp, Arabidopsis thaliana
catgtcattgctattaatggcaaatactatagactacaagtattaaacacacaacaaacaaagtatagactatagaatacaagtctaataactaataagtaataaccctcatatgtgagagatcgataaacggatttccattcaattaagtgatcttttttttttgttaaggaaaatctaatgatcttaactttataatctcaataattatataaaagaagcaaaccatttgaaatttgggtttgattttttgttacaatttgtatcgaatatataacaatcgatgggttttataaaagtcaattgaaaaggtggtttgtacaatctaccagacttccactgttccatacacttaggtatagaaaacaataattttaaaatatatacatatatatatacttttaaaatatatattcatgctacatagcctacatttaaatgtcaatatatatatatatgctatatttttcttttttcaaataacattaaaaatatatataaataagatctgatggaaaaaaaaacatctattttgtaaaaaattattctgttgctaaataaacacaattttaagagaaattatacgcctattttgtttttgtataagagcgaaaagtccaaaaaacaaaaaacaaaaaacgaaaaccaagtgaaaaaaattcacatggtccacaacgacatgaaatggaacagttagatttgattgattgactcaacatttctccttctttattaagtaaccattcaaaaacacactccactggtcatcttttccctctctgtccccatgcagttttgtacctctgccacaagttaccccttgccgctaacttctttcaggggtaatatcgtcttttcactccaggtgttgtccactcacaccaagaaccaaagccatcgtcactatattctctctgcccaaccctactgtactagtctctcctctaatttagttatattgttgatcactcactagatttgtttccatctttctcatttaacgataaattactgtatttgtctagatttttataggagtgtggaaatgagtcgtcagcttaagttagtctagctttttatgagttccaaatatatgtttttaagggtcatacataaaaagtcttccgttttatcctatagtagtttcaagcaaaagaaattgtaaaacatatttcaaagaaaatgattgtaaatcgattacgtaaacgtaagagaatagggccatggctcctacccatgtaactaggtcggttccttcttctccggtccaaaatatcaaggaaatggcggaatcaaaatttgttttaaagaaagcggtgttgactgttgactagaaaagttatgagaataagtccattgcaaattttgtagtgtgttaagtgataataaccaaagaaaggtaatctaggagtggtgattcatttaaaaaaaaatctatgagtggtgaataatttccatctaaacttaggtcaaagatcattgatttgccactatgcaaataaacatttttaacaactaaagtaattatactaattaataagattttatatcttatatatatttgttaccatataacattttaactgttttcggtcaacaaaataagaagtataaataaacaaataacctcattcgcccataatattaataaataccccttaatcttcatccgccaaaaacctattcaaagtcttacacacaacaataatgattttaagagatatacgtaaccttagtatttagcttagtgtttaactcaatctctatagactatagtaaaaacaagcttgcattattatttgttccactgttattagtcaagcgaaaacataaatgaaaagcaaaaaaagaatatttatatgactccattcaattcactcttttatagcaatgactacgatagcctctcatcttcttttttcctctccatcatcttctcttatcaactttagactcacaagcctcctctcatcttcaccataaccgaaaaaccaaacaaaaaatccttagataatcagatcttgatattatggatcatatcatcggctttatgggcacaacaaacatgtcacataacacaaaccttatgatcgctgccgcagccactaccactacgacctcttcgtcttcctcttcgtcctccggaggctcggggactaaccagctaagcaggtacgagaatcagaagagaagagattggaacactttcggacagtatctacgcaatcaccgtccaccactttctctctcccgttgcagtggtgctcatgttcttgaattcctcaggtacctcgaccaattcggcaagactaaggtataacatatacacttacatatgtgtctatctatctcttacatcaaaatactctttttgataattttccattgatatagaaccaaatgaattgaaaccctatgtctaatttggttctttgacctaaaggctaaaacgtatttttgttatatatagttgagaattggattcttatt

SEQ ID NO: 1045 - DNA, 78921 bp, Arabidopsis thaliana
gatctcacctgccatgactcatatccttctctactcgtttgatttctgtttgttccaaatctgtttctcaccttaaatttgattttgttttcaataagttctgtgttttgtttgcacgactgttcaattacgaaacttcgattcggttggcgtgttatacaaggctgaaatgacctaaaaaattgaaaatattagggttttgtttttgaattagttattgtcattgatttctccgccttgaatcgtatggttttgaagttgtaccaagactggagattttggatgctcctttcacgagttcttgaagggtttgctaaattttgtgtgcttttatcgattttgatctgaaagaaattagcattgttttctttaattcttgcttttgttatgattgcgaatttgcacgaggaagtcaaagagagcgtgaccgtgaaagggctctagctcgaaccggaggcaaaggaaagaacaaagatgatggattaactcctgagcaacgtcgtgaaaggtaaccaaatttgtatatgttcttgaatctgattacaacgttaatctctatggattgatcgatttcattgtgctttagagatgcaaaagcattgcaagagaagactgcaaagaaagctgctcaagccgctgctgcagctagttccggaggaggaggaggcaaaggaaacaataagtgagaaaaaatgatctatgcttcgatgtttgtaactgtgcttttgaatatgaaagtttggtgtttgtgttgagaatgttttggcttcgtttggtttgagtttgtatcaaaacttagacttggtgatgtactttgattaaaccaatgattactcttacaatatctatgattacaagtacatttgtccaaattctttgttctcaattgagacagatcttgctttgtttttacttgtttgatagtttgtttgttggagtggtttgagaatgatacagagtacatatgtacagaggaaaccaaattaatcatttgatacataattgataatggaatatggtttttgagaggtaaaatatatgtgcagaatcttttgtttaagttgtttctttagctgctcataaaatcatcatctgcatcatcaagaccaacccaactcatgaaagcaaatagaaactctctaaaacccactttcccttttcttccccaatccatttcttctgcattacaccataaagatagaatccaatgagtatatataatccaattcatcaaaacaatgagaattgaagagtgtgcgtgagattcatatgtaccaaatctcatgttggtgacatgtgaaggagatctttctagcggatagtcttcgttgttcaatgtctttatcacatcagccttgtttaatttccctttaccgtctttgtccaaaaacaagaacacttctactattggatcaaatatagactcaaccaactttggacccatctctctcgattcctaagaaacacactacatattttagcttaaatagtcaatatattcatcatcatgtcactgattattaccgtgctggattcagaggaaggtttcgccagaagatagatgagacagagaaggactataaactcattgaattgtatccctttgcttccatcaacgtcacaccaactatataaacctttcacttcttcatccgataaactcagctttagttcctctaaacatttcttcagctcctcgatatcgattgtcccgtttgtatcattatctgcgaatgtatccgcagaacaaaaaaaagttcaaaactaaagtggaatcttgctaaagaaaatacttaatccttcttttagcttaggaaacttcaagaaaaaatgcttcaagaatatcaagaaaatgtaccgtatgattcgaaaacgcttctgatgtttcttaatccttctcttagcttaggaaacttcatgattattgaatccatagactttaaactcctgtgtcccggataaatactccggctctccaccattttccgtgcaagcttcgcatccagctctgcatacttcttgttgttctccgagttaacacagcagcaaagcatgtttcctacacggttttttgtatttcaaaactatgaatcaaaccataagaacatagcaaatgaaatttcgagaaatgagaactcactcatgttaattctgatgtttgttgaaaagatggatgagaggaacaaggcgtaagtagataaagtaaagcataaagagtaatgaagaaaggcattacgaatagtatcaaagttaaaggcttaaactttggtggccctttcatcatttcaatgtttattatagattatcaatagatctttttcttatgtctttatagtttgtacctttaaacctttctcttgaatacaagaataattagaggcaaaggttaaaggaaacactaaagcttcagcttcaacattgaaatatatatacatgagtaggctaagatgaaaatgtgatgacaagtttgtatcgaataataatacaggcccctcaaagcaagtaaagaagagttaaatcttatctctacctttcccataatgaactttttccctctcctaaactttatccaatggtgctactaggcataatccagcctgattcataccctacgcccaaattgtctccacgttgacgcttcttcattgatgcagcagatatagagctcccatgtgtgatggaagtcagagagctttctactgaacagttggttgtgatgttgtttttgttgtctattgctactgcaagctctgacaacgatggcatcatcatcatctttgttgcatcgaagtacgggactgatgttccttgagagctattggagactttgatggctagctctgatagctcttccctagcagcctcaagtccagcaaaagtagcagcttgctcgtcaaaggccttgcaagctttttcaagaatcgattgcaggtattttccttgtgcctctatcctcagctggagcctccgttgcacctgcccatactaaaagaccaatcaaacgtttgcactttaacagcacagcctgttgcataaactcctacaaaagtggtcattgtttcaatctcaagggcgtgtttattcattccacctaggtagagatccaggacagatgttcatatgtacatcagtaaaagaacgaataatttggtagcaactccatcctaatttctggattggacatttacttttgagtcaaactttttgtaaacatggtggtttgtatcttcaatatcaatggcaagagaaatgaagagacctaacctccaattgatcgtgtagtcttctttggacttccatctgagcacgtagagcttcggtgacttggtaacccctggcacgcaaacaaataaggagggttcatacaattgtaattcactaaccagcagtacagagaaatgagaataaaaattcaattatatccatactcgttctgctcctgctgcgccattctcattgatgatgtcgaagatgaacctgtgtcctgactctcccctacacaagaagctgcagcatccagttcacagaattagtggagccacgagatatggacacacaactggaattcaacaaaacagggtcccaacaagttgttattcttattttccttttttcaaaatcaagtctttgtttgacgatttaaaccatgaacagttactaaatatatattgtgcctctcacatgatatagttctacgaaacttctaacaaatatgattccaaatagccatatgaataaagagtagaaccaaacggcttcaaaaacagagatatagacaacaacaacaacaaaaaggtcaactgaatagataccatctttagagttctcagttgattctttgccagcttgcctccctaggcggaatttctgtcgagcaaaacacatacaaaagagagaaacacaacaccatcaaacacccaatattactatgaataacacatataaatgaaacttaaatccaacctagatacaactcttaataccaaagcaaatttcagaatctaaggcgtcaagtcattgaaattctaggtgtggtctcatcaaccaagatagatctaataacagttaattaggaatcagttttgtttatcaaacctgaagatgtgatttgaggtggtagagagtgagacccttcactcccattgttctcataatagttttgggagtcgcttctgtaaattgaacagacagagtcagaacggtctcttcaaaaacatgtgtgaggtaaaagacaacacaggagttaaatcttagctacaaagcaattcacaagcttcaaaatatttagagatgacactgacactacttaattacaactgactaatttcgaaaaaggaaacaaatttatacactgcagaatctgcttctattttgggacacataaagagctacagttataaagatctcaattcaagtctcgagaacaacaaaccataaacttcatcgaatcaagtaacgagacatattcttcagaaatcagaaatatctaaactttgagagaagaatccatcaaaccctaaaaaaagtcgaattttgttaacggaccgagcaacgaaactgaacaaagagataagtagacaaagtagtactcactgtcaggaccaccgagctgagtaacggcgtcaacgaatctctcatgaagctcagttgtccaccggagacgaggtttagggtcagtcgttaaaaccaaacaagcgtcaccgggaagattggttccgtcaagaggtccatggtagtcaccaccaacgtgtccaccatcgagtggaagcgagcgaatcgctgagtacattttccaattttggtcgccgattttcccgggaaagtgagagaaagctttaggggagatgaatttgggtggtatggagattgtgggagtttcggatccgggtcaaacgtcgggtcaggctccggatttatggacagcgaagagacgggtggatatagtttggacgtattaggctccgatttgcgtttaaacatagaaggaacatgtttataatcaaatcccatttaattatttgtagcagaggtactttaattaaactattagtaataatataatcaacaattttataatatttagacatttgattgctctaatctaaattattacaccaacaatattaaactatttagaccctttttcttgcttatatgatattataataaaatagttattcaaaaaaaaaatccatgattgaatgagaaagaaatggtgaaggattagtaggaacccaattgtttatgcaattaaaataaagtttgaatacagtaagtcagtaatcgcattcaaaactaacaaaagtttttttgaaaacatacattgaacgtaaactaaaaattattttgtgtatagccttattcatgttatatcttatttaaattgatcgttttcttttacattaaaatggaaaaggcatgagtcttcttcttaaaaaaaaatatttataattgtgaaaatgttttttttttatttgtaaaataaaaaaacagtttcataaccaataaagacagttctcataaattctctttataaaattgtttagttgggatgtcactattttatactttcaattttgctgatttgatcaagtttatatatatatgtttgtgaatcatttattatttagctagctcgtcaacgctagctttctagaatgttaattagcgctaatataatgtagacattagtgaagctggtgtcaaatagtttctagtttgttatcaaaatacataattttttatattggaaagtacattaaaacctctatagataatattcgataaatcagaaaccattatatattaaaaagtaaatttggtcccgaattgagcaaatgtaaaaaatgatacaatttgataaatgataaaataatatatatttctgaaaattatatatatatatatatatatatatatatgatcttatcaatatcaaagtgaaatgaatcaaatttgatagaatttgatagaatttgtttcgtgatatgagaagatcgggttttataaactatacaatgtcttgaaatgtctatataatatagataaaaatgcagagagtgaacttggagaaagaaaatcctctaaaacattttacttacagtttttttttttaaattcttttattatagaaaaagcactacttgcatatattttattataggaaaataccatgcaaagaaattaatcatcctataagtatacataggtagacgttttaaaattcatttctaaaactaaaagttagtttaaatatttttatatctactagaagtaaaaacataattttatactatcgttttaataaagtaagtttaacatgaatattatatgcataaggcgctgaggattacctaatgtagaaagcaacaaagagttaaatcataggtagttgaaaataagaataataattaacgactaaatttcattatcatgtattaaaaatgtaaaactatctctatccaccaactcagttttgattatataattattgtgaaacatacgcccgtcatagtagactaatagtaacatgagtacagactcttgagttgtttgtgtatttaaaatcctttggttgttggaaaagaatagcatatgttcatctcttaattaatcgtaagtacgaataacgaaatattaaaaaaaaaaaaatggatacgattataaaaactcaactagggtgaaaacaaatcataaagtttatatagttcatgtcagtacattttcttaaataaactttcaatatatgatttaggaaaaagaaaattgatgatattgaactcctagatggagaatattgttaaagactttcgattccagatacgctttaaaatcttatactagtaaatattggtaacaaaacaattataatcattaggaacatagattacattgcaaaacttggtcattgcatgataaaaacaattgctggtaaatccaaaggttaaaaatttcgacaggtacacattaaaagaataagcttaatggtgtataaaatgaaaattcttttaatttttttgattttttaattagtttgtcaaaattccaaattctaaaatccgaactaataatatgtatcatttataaagatcataggttttatctaagaacatatgttctcgagtattataatttgcaatcaatcacaaaaaatataaagaaatttgatttaccaactctaggaaatttttgacatattatacatgttttaattaaagtagaataaaacaaaaacatagaagagaaaggtaccaactgaacaagttgaagtaacacatggctttggcgtatttatattgatgtctctaccaacttcgccgattatgaatataaatgtttgttattgggatatataataatgtagtacgattttaactgatattataggtttctgatgtagatgacaaaggttgtttcatgcttttctgtttcatcagttaaaatagtgcgattaacatgattagtattatgataataacttcagttgatacaatccatacgatcattcaagttgaaattgttaattccacatatctttttgaataaaaaaacgatttatttgttctatagtgttgatccatcataagttgagataaatttaagagctgttcagtgttcgttagggtgaggacaagatgcgactgtccgggactcaataaattaaaatatatttcttgaataaaacattaaaatacaaacaagattaatatagctaaatatattaaattaagcaaaacaaaacccaaattaaaactttgaattattggaccccaaaacttataaaaggcccataatattcttggaccattgcgatgcactgctgaatgcttgtgaactaggacaaccgagtaaaataacctgttttatatcctctattcaacgactgaattctcaatttttgacgtcgtgtgacttcactttcacaaaccacaaaaagccatcttcgttcattcagaagtacatacaattattgtggtacgtaattggataaaaccgaaaaaaaattcaaacaaaacgatgcactacagttatggcggtgtaatatgatttttacaaaacttgtgttttacaacacctgtcacaaatgtaccagcatccgcttttgttaaacacattcagagaaaacacaaaagttgaaatataaaaacaagttctctgaaaggtttgttatatatttttaatgtcaatgtcaaagctaaaagaacataaagcataacaaattactacatttggttaaactaaataaagagggatgatcaataagaaatctataaaaaatacaaaaattagaagcaaaggaaagatcaagcagggatgggcaaatcttcaacccatccaccacgattaataaagctgagatcagccaaattttgaatggcagattcactaagcttcttaacccacttcacacgtcttcctatatttgctccacttccaaagcatccatgttctgcaaagaccagctggttttcgtggcccacgaaattccatgcatcccatccttcaggaacaactacatcggtcaggttcgagttgtaaaagatcactcgagaataaccgcgccacggcctgcccaagaaggccatgcctgttccatatacgaggcagttgatgaagatgaatccatttgcatcgtacgggttggtccgtccttgagccgttatgtaaccggctagccccggttctagctgcccacctagcacttgtatcacacagctctacaacccaccaaacacaacttttatttaatgaaacttggcccgaataaataggaattttagttttataaaggattattaatatgtgaaaactacagggctattaagaatggttccattagctatgtatatttagttttttttcgaaaatggttatcaaatcaaaatccaatcaagaacattcttagtttggttcaatttttaatttatcatatctttacttttcataaaattaaacttcagttcgatattttcctttttgtgcataggaaaagtgaaaaaaacattccaatcgcagtggttagaaagatatatctagattgaacatcacaactatctacggacatctactgttaacaattccttggccattttaaagacattctaaaagtttcaaattatttagatttaggattaatatcatcctgtcataatctcaaaaccaacattattatgtgaagaatgtaacggatcacctggtaaatagattgaccggtaccaaagatgaaatcgaccgcgccttgtatggtacaccggtggaagtagtgccggccatcaaagtcccacaaggtatcttgaattccagcaaaccctaccgagtaaaaagccgacttatcgccgcctatcaacgctgccacggctggagttctagggttcttgttcattttccctttgctagggaaattataggaattctataaaaaaaaaaaaaaaatccataaatttattcaataaaaaaaaaaatcaacaaagaaaaaaggcaagagaacgaaagataaaaatcaccaccgtacggcgaaagtgatgcttttaacaacggtgttatcggcaagagtagaaaaggtagggctttgtgcaaccgagtaatggtcgtcccattcaactctcgttaacctttttccagctcctactagtactatgaacggtttttcatacggtatctttattttctctctttatatgcaagacatagagaaaaaacattactaagcactttcgcatatataacttcattacaagacatatagaacttcatgataattactcaatcaaaatattgctagactaacctgtaaagaccggctttaacgttgatgaagaaccaatgacgattgttgattggaacagaatcaatagctttttgtattgtcgtgaaatttccatggccggattgatcaacaaatacttgttgttggtatactccgaatggcttagcttcaatgaggtgaggtagacaaaaacaacaaagagcgatgagacctatgaaaattcgatgagttcccattattacagtttctgattttgattagatggtaacgaaacgtaagagttttaagagagggagggtaaatgagagtagtggaagaaatggaggatttttttaacaaggtcgtgaggttaatgcttttttagttaattgtaaatattttgatgaagattttgttactttgttttcctttgattatgtgaggtttttattgtgctattaaagtagaatctaaatgaaactggaaagtttggctttgtttctagatttggtgatccaatatcttggttttatgtgagaggtccgaaacaagaaaggaagttgtaatatttgttttgattgtggtaactgtaaataaaagttagtggtcgagactaaaattgaaaaattattataaattattttaaaaacttaatacatagtggttttattttgtatagagattacactgaaaaaatggtagaaaacttgaaatttgtcatacaattaatattttaggttaaatctttgtagatgactctatccacattgataaatgataagtatatctgtcttgtttggaaataaaaaggaagcttttatagatttgggcgtatttctccaaataataggaacaagtaacacattggaataaacccctttataagaaaaaaaaataacacatgtgaatgaacaatacactaaccctttatcaattttttgttttgttttaataatactactattcctttaaattttatttcacaaaaattttcaaaaaaataattacaattttgcatcctcagaaaaatatgacgtgttattttcaaaagaaaaatagaattctatatacaaactgtcaccctctaaatatttaccgctttttgaatagagatgagaaaagtctcaaactccaaccatttatttgaaggccattctaggatggcaaaaaaaaaagatatgtttattttcattttcttgttgacatctagtgatcactgatcaggcacgtttcaagtatcaaatatcgagagagtacttatacacgtgcttacactttttagccccaagaaaaatcgattaggagtaatcaccagtggtcctcatgtatctgtcttgccatattttcacataccttttgaaaacaaagactgtgtagtgatcccatttcttgttaaagtgctcttagactgtaaaaagagaaaacaaattctatgtacaaacattgaattctaaatcaactcacgacaaaagaaaaaagtaatcagaaatctagatcaactctctccattttcaaaagtaattacaatgattatcttaccatttaacacaataatacgattgacaaacacgaatcttttttgcttaccttcgatgaattaatataagctatataacaaaggatcttcaagtcttggacggatttggaattggaattctctggccttggactctgtcaagatcttacccccgtacgaacctacttggtgtgagaagaaaaccaagcagtgcttttggaatttattgtgtatgtgtcggatctgacttggattagagctaatggtgaatatataaagaagatgaagacaagagtttcgtctttgttgacgtacgagagaaagattaaagacaatcattttgagtctcctaaatgaatttgtttttctgaattctgacacttagtttctttagtcaaatcacttttgaaaaagtgtaaaagcgtcactttgtttaaccgaatggtcaattttttgaagattaaaactggctatttctaaccttttttttcttcatgttttcttgttgtatatatattggcccatttctcatagacaaatctcaagaaaatgatagttcctctccctcccctcaagaaaagttttcatgcattgtttttttcttttcttttttattttgtgaaaaaagttatttcaagtaaataagtggtttagcattctaaaccgcttgttcaaaacctacaaatcaaagcagcagaaatcacaacaacgagttctaacattacaagcgacacaatcatcactaaaatttaaattgcatgaaaaaagccccaaaaaaataaagtaagcactccctttaacttaaacactcttccaaatgcttggagaataaaacccaatatgtagagattattacgtactgtaatcttcaccagtgtacaaagttgtcgccgtgtgatgattttcaagtaaacacaatatttcccaggttagagcttccagatctgaaataaaattgtttccaagctttaacacttcaaatattgtgataaatatgttacaatatatatatatatatatatacacaccatatgtaacacacaaagaaaataaccatgatagattagatacaccatatatatctaacattaaaagcaaataatcataacatctaaaaggtaaaagaacaaacaaaagacaaaagctagacatctaaaatagtaaaatgtataacatcgaaccaccaatatcttttactctaagactttttaccagactcatatactcacacactcacagagtcacacacacacatagtaatgatgtcttgatgattagatagaccacattgcacacaaaaagatataatcatgacatctaaaaggtaaaaacaaacaaaacacaaaaggcatgtgaaatggataacaatgaaccaacataaacttttgttttaagggaccaacagaaacttatcaaaagtatctttaatcgaaagaatatttaaatagcagaaaaatatatatccttacatgttggtatttgcatgaatgaaactaaatatctgttggatggaacttgctatgtcttctgccgtaaacctcgtttcacttgttatctgcacatattttacatctacctcatgttagccattgatagttattacatatactttaacaatacaaatccataatctatgattatattgaaaaccctaaataaaattataaatgtgttttatgacagctaatccagattagataattacatgtattatttgatgagtctagattttgcatatgaaagctgaatatgaatgatgaattactttttaacatataaacttgccttgacattaaaggagtagaggacggtttgttccatggtagtgatgttagtgtgaagaatagagagatgaagatcctccaaagcagctatagtcttaatcagctgtcccggccttcttcttgaaagtatcttgatcatggcgtcaaaccctagcagcttcacctccacgtcagccaagcacgacttgttctccgcagtctcctcccgaagccctcctccgccctctagctcggttacatttcccgtaataatgagcggttgtgcttggttcgctaccgtagttatgggagaagaagaagaagtcgttgtcgttgtcatgtccctaccggtttctcctaagattcttcgacgcttctgtgattcaagacattgtaggagttgctcgagctctctcacaaactctattgctcctcctatgattgacgcttggtctccctattttatacaattaatatttggtgtagacagtataattagttgtacatatacatataaaaaaacattcacgaaaattctttctttaagatataatttatgaatatcataccctttgaacgtaggagccaggcatgagagatctaaggacacgaagatgctcattcatttgcttcctacggtttctttcgaccgcgatatgagtcatccgttggctttccacttcttcgctggtcttgctcgttctagctctcttcctcttgctcttcacctcctttttcgtaacattcttgttctccctatcttcttcttctcctccaataaaacgtagttgcacggagttgttgtcgttgtcatcgtcttgatcttctttttcttcaagaaacacattgcctatgtttcctccacactcacctccttcttgagacgtctgatgagaaggcatgagatgttgggtttggttatggtcctctattttgtcgttcaagacagggaacttcaagaaataaacggggtcaatcccggtttcttgatcgtcttggtttctggtctggttcaacgcaagtttcgaaccgaagtccgcaaactgcatcacatcagagaagttcattttatcaaaaggtgttgctccaaatccggaaggagagagttgatgttgctgctgttgtggcatcgattgcttttgttgttgttgaaggtttctattgaacatatagtctatcataccagagctgttatcatcgttaccgcctgaggattcacctaagaagtttggtgcctaataaaaaccagaattggagaatgaagttaatatcataagcaggaagatttgaatcttatacatagatatctatcaatttgtataagaaaagagattaaggatcttgaaatactggaaaaaaaaacgtacgtaccgagtaatctttatccattgctattcgtggtagttgattataaactgcttaagtctaatgaaggtcaagcttcttgacctgatgacaacaatccatgagcttcacagtcagttttaaaaacatatacatgaaacaaaaacacacgtagaacaagttaaaaccaaacctaggcagattacatgtttcaccatatacatatacatgtattttatatgtacaaaacaagttttcaaattgaattttgacaattaaaaaaaatgattaacaccaaatatattagagctttgtttagtaaggagttaacaaaataaaagggactgaccttgtatgatttgctagggtttacgagagatgtatataaaagacgcaagacatgcaagatagtagaagaagacggattagagaagacaaaacttaaaaaagtgaggggagctttttgtattgagaagtcataaatgagtaagcatcaccaagctcccatatttatagagagagatacattatacatgtgtacacaaggtatagcaagggggcattaaatttcttaagtatgtatattcgtaatcatttgtttctctaattactaattagggtgtgaatggtacacattcgtgacccaataaaaacaaattaaacgacttaaaaaaagatacgtaaacatgtttcaaaaaaaaaaaaaacaattttctaaagaataaagataaatgaaaatctacataagttaatctaaaatattgaggattagtagtaagtagtttgattgcagtggctgttttattctactatcatattcccattaattatcgagacatcattgtttttcgcaattttctatgcattctcttttagtttctaaaagtagagaaatatcaaccatcacataaaatgttttagaaaatctaaaaactacaaccaaaagatatcaatcgtgggaaaaatgaattttcgttactattgtccttttttattgctttgtaagaaagaaaaagggatgttattattgccctcttataattgttagagatacttaatgcttagtaaaaaaagcttccaattgtagcaggataaagccgtgcagtcggaagttctcaatgtctccccaaatgcttttgcagaaaatcatgattggctaatcaaaagatgctcattcaatcaatccctttgtattatgcacataatgtgtcaatattaattttcatcccatttgatatataaatatcattacatatatagttatctagttcttctctatcttctacatagaaacacataacaatccaaattttacggtcaaatttgaaatgggggatctagagcaactccctagcttattttgaacaaaaattaagttcaatattgactcaaaagaaagattattgaatattccaaatcatatcttgtttttgtaataaatactctatttctttttgcgttagacgtaagggtgaggagccacaaaatacgaaaaaagaagtaacgtgaaaacacacgtgtatcagctgatcacctctctatctatctatcttttttttttgtttgtcaaaccataaatgataagatttgagtttttagagttcacaagccaaggccgctctttttccaccgcttttcgtgaacttaatcaaatctctatacgcttctcatcttttagtttatttctatagtatttcaaattcaagcacttatattagttatgtgttgtcaataaaatatgatttctaataaaaatattctggtcaaatatatgaaattagtttcacgaacatgacctatactatttgtgtgtgtacgtggagacatatacatttaaagaaaaagacactggtgtggatggttacgttttaacttttaacaaaaagtggagtaaaaattcacgttgatcaatccagtgaactttttcgggaataagagtcgcggatccataggagtattttagtaggtgcatattacacaaatactatgttgaaaagaaaaaaagaaacatgaaagagcttgcatcgaagcatcaaccaaaaaaaatacttgctgcaaccattcccaattgagccaacaaaacaactattacgatacataacacccacaggccacaagcatcgaaatactgtaagatatatagattttaagatcaaacttcaatgatagcgagcgaagagactgattgatatactcaattcttttttaattccaaaagaataatttacattcttttttatcataaaaaaaagtaaaaaacataaaaatttgcattcttataccataaatttattgtcaatatacaagtgcagttcaaaccaagtaaacacacatatttattatatctatatcatatacatacttttgttttggacttttttttcccactcatatcaataaatttttctttgagtagtaaatttaacactaaaaattcactagtaaaaccacttagtgatggtgatcccaaaatcaatttccaaacttttatcaccaccaatatcattaccaattttcaattaatttcactcctttaaaaagtgtttttcgcctacttttttctttaagatatacaaatcttttttattaaggaatctaaaaaaagcatattgttagatgaatccaagtaaaactaagtcaacagttttgtaagttataagttgtaactctatagatttaagagaaatgaggtcaaatggcacaaaaaagctttcagtaagccaatgacaattgctctctcatatattttaccaagttaatgagaaacgtacccctccattacaccttatcttcctctttacaaaaatgttttttttttgtttttgcatttcatcgttttctttccgctttgttctcttaataatctaaattgattcaatcttgcgttctttttcttttttaacagtttacattttttatgtatgtcataattttctattttaaataagagacataaattacttgacatattagtaagtgactctaaaggagaactcaaagcttttatttagaacacatatagtaaactttaacgcgtaatgtaaaactattataggcatattcaggaattacgaaaaatttgaggtagctgcgtgagattataatacgagtactctataccagtttggaatcatacatgaagtttggaagcttcaggtacctagttcactactaataataatttgctttctacaattttgtatcggaaattttaattgagattgttaatttaaattttgtgtgccaacaaaaacttaacttttaaaaaatattttttaaaattaattgatttttcttatacatatgaatcacatattatacgtgtcgcttttttattacattaaaactaattaaaatttccgtttttacttctaattaatatactatataaatttttactatacataaaaaataattaggataaaactgaaatgtcatagaaactgtacttcaaacttaagggatatatattttgataaaaaaaatttatttattttaaaaatacctgttaatataataaatatattgtattaatgtgcgtaatatacagtgtaaccgactttctcagagtagaaatgttaaaaacaaaaaggctgtgaatcgcttggccttttggcttttattacctttttattgttttttttccagcgactttttctgtcgcctttcctccttctttttccctttgttacttttactttaattttctttctttcattctttatgtacaaaatacattataactaataattgatacatattttgattgactataattatattatatgaaaatatcaaagtttcttaaaaagatttataaaagataatttatataacaagcaattaaaattggattaatatctatcacgaaaaactgcttattttttttagtataaattattaaataaagtatgaaatgaaattgtaaaactgaagaattatgctttcgtataatttttagacaatttgatattgtctatcttttaaatatcataatatttgataattatcaaaaatatttcacttttctttttctaatatatgaagtatgaaggtttagatttgtatgcttattatttcattacttgaatgttaaaagtttacaggaattttttttatttgaagatattgattttatacttagttgagaaaaattattataacgtaaatctttaaaatactatttgaaactgatattattttaggaaatatttcattaaatgggtcaagccactagagagtaccttccgtagaaaataacaaacatcgaagtcaagataatatgatgatgaagtgttttctgaggatattcgcatgcacaaaccagtaaactagcctgcaagacttccttggaaccagaaaaaaataagaaaacgcaaacgaggaatgcgagttttagtaacaccggatttgaggaaacgtgatatacaatgttttcatcagctagttgaaatatggtgttcatggagcggaaatgtatgatgataggaaacttgatcgaaagacagtaagacgacgaagtatcaaggtcaaagaaaaattcttgaagatgtacataatagagaagatgtacatgagagattgatcgtatttatatactttaccagcctctggctcgggctactacatctggtagaacatggatcggtcatcggtgatgacggaattttacagtacaaggaacttgaatgctctttacctattttgtttttttgtgtgtgtgtgttatataacaaataatagacatgacgatcgtatggatcgttgataattgctttaaaatctcaacaatggacatagagcaactcgtcaatctacaagcttcgaaatctctattaattgttatataaccgaagctatttcgaaatctcaacaatggacattgacaatatccatccgattgctttcaactttatgcactttatttctccaatggacttagaggaactcgtttgatcctatttgatcccgacacatgtgaaagatatatgaataattttaaattcataaataaagctcgcagtaattaggctttgcgagaaactctttaggtatgaaaactcggtcttaattcttattagtactctaaaacttagattaagcaataatcccaagagatcaccagaactaattacatgcgtcgctaagaaatgcatctaaactaaaaaaatgatatttaaccgaaacatatataacttttaactttaaaagttgacaaggtgctaatccctcaatattgttgctaagtttagtttttttttttaaatttgttttttgattcttgcttattcgttttattgtttaagggtgtgacacttaacgattatggctaacttagataaaatcaaacaagtgttttattgttcttttgcaccccaaaaaaaagtgttttcatcattgttgtattggtaagaaataataaaaaaatctactacgtacggttttataattcattggaggtgaagtccaaaacttcacggttaaaagaaacataattcttttaacaaaaacttcaagaaacatatatataatccttaattaagatacgccaaagaaataattaagggagaaagaaagttgaatttgattgtgataggtgtcacggtaatcttacgtgagatgggtacgtaggatctccaaaaataaataatcatgcacttttatacgttacttttgagttttgagtttacaaatatatataagctccttttaatttattgcatgttaatgactcgtgaatcacgagtgtacattactttttataaagcaatttttttctttgaaaagaattttcttgtatcagaactggtctgaatgtttaacatcaaccaagatttacaaactgtttagtgatgaagctacaatgaaccctcaaaaatgctaattaatttggtgaaatagatcaatatcaactttcaacgacacacctttgtttttttatgaaaaaaaagtctcattttcgtttgttttgattataaacaaagttggtctctcgcatgcaatgtacgttcacgctgcaatgacaatagtgtacgttctttgttgtaatttagtcgagaatccatctccgacgttaggaacaatctatcatctttcctttttttctttgcacaaatatcgtaaaagtgatacccacgattatctacaccaaaagtggtcactgacaatgtacgaaaaaacttagaaaacaacttaaaaaaagacagttcaaaatgatggtatttgatcagtgagtagcttcttcagtattaaagctcaattacatttattcaacctatggttatgattatataaactctgttttctctccaatttaccctgaatatgttagcacttgtaactaacctaattctttctattaatttcacatttaaacaaacatatataaatggattaactaattcttggatccagaatttagcttaccatacttaagatcaatccatggatctttattataaaacttgaagcgaacgctaagactagtagagtcaataaaatagtaaaccaataaacctgaagcttttacaacaactaagcaagtcctaaaggaagtctccacacaaagttctgtgctttttaactctcgaatctgaattctgaccttcactatttgaaaaccattcaaacctatcattcttctttacctctgcgaataaacataactcttcttggtttcttcccgggtaagcccgactagacccgacatctattcttgtagacggttctgaagatataccgagcctcaaggataaatcacagaccctctcagttgcttcttctgagggctttataccaataggcatgccaatgattatgggcgcttcagggactctaaaagacatgtcagcttgctgcgtttgattattaccttcgtaatacaaaggatagaccgaacccaagttgactggagctggagcaggagcagaagcaggaccagttccttgtctaattgccaatggcttttgatgcatctgcatggattcatgaagaaacgggtaaccgcgaggagtagctacacgcttgttgctgttatcaagtacatcaacagggactgcagcttgaactgtctggcttggtttggttgatgattgttgagcttgctgacgatattcatgatggtaagacggctcattagtcgacgcagaaaccggttcctgaattttaggaccgaggtaagtccttccgctactatgtcgttggcttcttgaagctcttacagcaatacatcccaaattaagagcagctaaccatataaaaaaaaaccacatcaacaaacaataaacagtacaaagcactaacttctaagtagtttcaataaggatcactagagctaaagagagaaacaaaaatgacaattaccttcaacacatggaggcaaaagaggaccagtttctgtactctcatctcttctaataattgtatcaatggcatcatttactctattccacatagtatcagcatctgtatactcttcctaatggaaaccgaaacccaattgtcattttgtgaagctgaaaacacactaaaaaaagagaaggaaaatttgtttaaaacctcggaattggctttagagtacatgatttcttcagcttttaacacaaccacaggcaatttctcctgccattctttgttcttcctcgtcgctgcgctatgtgcttccattgcgagtctgaaatcaaacaaagaaaaccccaaattaagatacaaagaaaccctagcgtacggttttgagaaagatgagtgaatgaaaaaaacctgaaaatctggcgaataatcgaaccacgaataggttgatgacgatcgctatgccaagctcgtttcacacactcgtaaggtcttggtcctggcctcggcattttctccttcttcacacacttgagcagtgacacactcagctacaaatcgaagtaacaagtcactcactcatcaaactaatcggttcaatttctatccgggagtattttccgatcagcgagttcgatgtacgagtcgccaaatggtgtggaaagaaaaatcaaccttaaaactctttttaaccgatccaaggaaacagatctgaagctttgaagctctgaatcgtttggagatttcgtctacttgagctcataccggtcacatctccgtcatcatcatcgtcatagaatctccgattgttgtctccatcgttgccgcttctggaaatggaaatggaaatggtgtgattcgggaccgcttctttaaaaacgaaccagttttgtgatttgtctattatacccctatttgtactaactgtcgtttttttttttttttttgtcggcaactgtcgtttaatatggctttttactaaaccggaattgaaataaccgggttttgaacagataatattaatttcaaacgacaccgttttggagttgtgtctaacactttgattgattctgaaatctggattcgtctcctccattaaacatctctcgtctgataacaccgatccatctctttctttctctctccgtcgactctcgttcttaaagatgaaagctttctacgtattcgttgttgctcttcttctcaccttgaattatagggttcgtttttgttccttcgtgtcttgctctcgtttacggaattgcttgtatgtaatgacatggatctgacttttgtttgtgtatagggagaagcaagtggttctgttttcttcattgatggatccaacaatcaatatcttcgtccacgatcatccagtgaggtaatgattttcgtcccaaatgtgtggatgaccgatttgaaataatctcaaatttgatcattttatatttcaatctaagatcgtttctggaaattatacgagtttggtccattgaagtagtaaaataagatctattgtttggtctaagtggcaccaatttgtagttttcttgtctgtttttttttgttattttgatattgatgagagatcaatggacagattgcaaatttatgtttgacaagtactaaagtttgtgatttaatagttctttttgatgaattttagttaaatctcttttctttgaattgaaatgcacaggcacttcccatgtcgcctgttgaaatatctgcagcagtgtctgccttgttgggttttgcaccttcagcaactttgacagctgatggctcatccaaggttattttagtattatagtagagttgtttttctctctctgggttaaagtcctgtacttcatcgtttatttgttttgcattttgttatagttgaacaagattctaaaacctaatccatttgagaggcctcgcgctgcttttgtgctagaaatcgctggagctgatggtatgtgattggaaagctttagttttctgacatgaaccaaaaattttagttgtaaaatattcaagtgtttgttttttacttgcagatatgcttttggaaacctcccctagtcattctttcttgggcaatgccataaggagcagtattaagtctgattcgtacaaagctgatactgaacttccaggtgccctatcagcttgaataccagaaccatctgagcatgactagtttctaacttttttttctttatgggtttaagtcttactttggatattctgctaatcttttcaaaattctgcagacaatgaagtggttgttgtgtctgtcaatgaaccctcctctgatgtgactgacaaggacattaatgattttgttagttaacagcacctgtcattctaagtgcaaacactatttttttttcctttttaatataatgtgaccacaagttaatggtgtggttataatatacttaggcatcttggttgggtggatcatatgttgctggagctgaaccatcgtctggattgttgagtatccctctggctgggggtgctaatgtggagttcaatttggaaaaggtaatattcttaattccatgaaaaattgtatgattttatgtgggagaggttgctgtattacctgtagatattgtgattttcatatgaagaaggcacatgacttttgtttctctgggcaggaagcagagaggaaatttgcattgaaccttttgggtctatatcagaatatcagacaggcagtcagcgtttatgacgatttatctcatggtattgacagaactgccgaattaacggttggacgctttggtggtatcgatgtaagggcatttttgttattctgtttttttccctttcctcagtttctcagtcttggtatataaattagagggtggagttcattgcatacgcaaatgtgtcacctttagtctcttcaaaacttatgacatttctgttgatcgtaataatggctgttggttgtgcactcttttcgggatactcctgcttagctatttaaggaatagcagaggattcgaaagtgaattatgataagatctcagggaactggaaatgttttgagctggttgtagtcgtctaagctatctttacacttattgtatccaaggattgcaaggctgataaggaccttgtaatgagtttatatcttgagtttatttttcattgaaaatgtctaattgttcaaccatcatgttattgtacttagcttatatttgtttgcaaaggttgtcaatgtctctaatataatttattctttctggaaattataggctttagcacaggagtatggacaaggtatggctaagcaagggatggatgtattactttccacattatcaaagctattcaatctgttggagacatctcataaaggtgaattgtctctctgatttaataaactcgttttcaaagatatgtgttagaaagtagttcaagatggggaactcattctctggaacatttgtcttttttcttaactgaatttatgtaagctgagagatgtattggctcttgtaggccaaattgttggggttatcgtccttgatgagagagtaaaccaagaatcagaaaatcttttgaactttgggtcttcccgttcatctgcacgctcaatggtggaagtggagggaattccaagtgcagccattatcgctgaggttatacttgttaggctgactcttgcatggttgactggaatcattcttctcattgcaactatccttggggtaagatctcattactactagtctactaccaagcagattctttggccaatgtaaagttgaatgtttccacctaaagtggcctattgaagaactcaatcgtagtttgaaaactgaatgtattaagtcactcgaagttgacgtacttgtcatgttggttgcaggtatacttccttatgaacatgcctttgacgaaggatactcttctatattcaaatgtaaagctcgactaagaaatgaaacagagcttcaaaacggcaaaaggacactgattttctctacaggtcgttcgtttacatatttttgtgtgtatcaagccgtgtttctcaactggccgcctttgaaaccggtgtcatttgaatgtttaaagagaaggatgaaacttttggtggtcagagcagttgatgtgttatgtgtatattgccatattggttgcattctcgacttataattattttctttcttacatacattttgagtctcagtcctaataataaaagaccactttggacacttgatgtgtatcttctgtctctgtaagagcttttgatcatgaatctgaatatattattgcaacttctccaggagctttgttttgcataagacagcatcattaggctgctcatttacaaatgtcaccatcgacctctattagttcagtttgattcaatatagttcgatttggttctagttattacttagtagaccatatgcgagtacagaactgaagtaaatgatatgaccaagaggggttcatagaataattctttgtaataaagttccactaagcaataagagaagaaaccttgatgttttctcaagtaagtaagaagagaagcatcatacaaacaaacaaaaattacaaatcctttattgggacacgagtatgattaaactcatcgttgtctgactctttgatcaaattaagtgtaccgagttttcatgctatatagctctttatattttgcggttcatagatttgtcttaggtttgggtttgtgggcaatgcgtctggtcacactgcgcattgtcacaaattcctctgcagaagatggatgtatcccaacctgtgttttgttcacaatattaattatctttagttagagcaaacatcaaactggtgaaagtgaaacccaagtgcttggaagacgtatgacttaccgtgctatcaaattgtgctttggttgctccacacttgagcgcaattgcaatcccctgcattaagccatacaatataatcacttaaaatcaagacacgcttcggatcaaactctaatccatttacaatactaaatacttctcaaactcaaatcaggttctatatggttagaagaaaaattcagacatgcaatcgtctttaatcaacccaaatctttcagctaccctgtaaatgatttttgttcttgacacctatgcaccactcagtagagcagctaaagggaagtaaaataaatggtagaagctactataaaggaaaacttgcctgcatgatctcagctgcatcaggaccgcacatggatgctccaataaccttatcactcttctcatcaactattagcttcatcaatgtcttttcctggcgtctataaccaaaataatttagtgattagttcaaagagtgatcaggtgcaagcatattgaagaaaatcaagaacttttctaaggattttctaaaacttagaactttcaatgctttagacaaaaaaaaaaagaaaagaactttcaatgcttgcatacccagaaatggtgttcttcattggattaaagcctgaggtgaagaccagaatatcaccggttgcttgttctactgcttcttcttcgctgagacccactacagctagtggtggtatgctggaagacataaggaaacaaaaataaaaataaaaaatatttagaaaatgtaatatctatataactatgagaatactgatatttccagagtagcagatatgtttgtggagtaactctataattatgataatattggggctatacagtaaaaacatatgccaatataggagaaatgtttgtggagtactttcagatattttcagagtttgatattcacattttaaagatcacatagtttgtggagaattgttccgggacacaatacacatagtttgaggtaactagtgcctgcaatatgacacacaaataaagcaaactttcatcctatcagaaagaatacttaccaaaatacagcacaggcgacattgctgtattctgctttagtaggctttccaccaaaagcagtgttctgcaagcatcaaaacaatccacaaatggaatacataagtagacattcccaaacacaaaagctgaaatagttggtggtaggtacaactcctcgaaaggtttgtgtaaattatatgtgcaagataagaggcacagaccgcaaaacaggtggcctccattaacgcaacaggtgtaaggttaattcggtttgtggcatctcctacagcccatatgctaggtatattagttcgtgaatactcgtcaacctgaggataatgtactgaattagtagctgcaagaggagaatgtttccccagaaagtcacggaaaactttattcaggataaattttagtatctgcaaatttaggaaattgttaaaaccttcacagctccagcctgatcaagttcaacaccaacagcttctaaattcaatcttttggtattaggacttctgcctgtatcaaatataaacaaaagatacatccttagacagctggaggtaaagctacagagcttcctggtctacaataattcaggaattttaacaccaaaataccaatcatgctccatttcaataataagtagattcctcaaaaattaagttcaagggaggaagcaaaacccgcacaaacatacaactatcgaaaaacagaatgaagaaacctactgttccgtaaacccaaaaatccacgcagaggaacatgtattagagtagaagagaacagagataaaagtactctattataaacaaacgaaatttgagaatcacgtaacagaaaatttaccagtagcaaataggacgacatctgccacgaattcctccccatgggacgatatgactttgatcccctggtctgtttttgtcaactaaatggaaagatagtgtatgttcagtaaagtactatgaactcatgaaacaagtgaaaagaacgtatatagtaatgagacatgaaaagtaataatcatattcagatacctgagtcaaacttgtttgtggatgcagattaacgccccttccttcaagatttctagcaactagtgccctcatttcgtcatcaaaacccctgaaaagtagagttttagaaagaaaagaagctaaaacaaagagatggactttcagttattcaacataatttgacagagaaccagcaccttagcggaagttccttcctgaagaataaatctacagtagcacccattccacgccatattgatgcaaactccacagcaatatacctaattaaaacgtaaatagaaacgaggattaaaccattgaaacagctggcatgttaggtacagcaggaggaaaacattgaggaagacattaccctcctccaagcactatagcacgcttgggaaattcttccaagctcaaagcttcatcagatgtaatagccagctcctataaaagacagtttatgtataactcagtggactttccataaatagcagttaatagtttttctcacagactaatttagagaaatcatattgcaaacatacagatgtgtctgttatttctattaaaatctttccggacttactctgaagataatgatttcataaataccaagcacatcacactatagtagataaaaaaaataacatgaacacagaaacttacatgtccaggaatattaggcttttgcgcccgactgccagtggcaatcaatatgtgctttgcggtataacttatttttgtgccatctatttgtctcacctccacttcgttgggaccaactactcttccttcaccttcatacaatttcaccgcagcatttgccaataaccgcttgtagatattattcagtcttagtatctcatcagtctgcacagaaggaattaaagacagtaattgattatttatgaccgaattagttacatcgcaaaaatatccaatctactgagcacactagaaaaaactatagcagcaaaaaaccattccccaccatctaactttcatacttgacaaaacaataatataagtatcttcagtaggttgcggaaaaatatcaatgcttatacatcccagagttttagtagtttctcattgtgagaaatccaagacactatactgctattacaaccaaaacatccaaaaatattaacctaaaggtcactttcttgaaatagtttcaaccataatttcttcacaacttaaagatcaaaggaagatattacagtgtcaaggagaaagctacaacgctaatcgttttacaataagctgatttcattgggataacttcgagcaactggtgcaagtgtatcaagaaatatttcactcaattactgaaaaataagaatacgtaagcattatagcaattcctgcataccttcttttgcaaaagcttcttccatgtgaagtcgactttctcatttatttcccacccataatttttagcatcctgccagcagttaaacaacagtatacatcatcaaacacaattctctctcagttgacatgaattgttcatagacatatagcctaaacaataatttaggaacatgaatacaattttgcaaatattgctagggaaaatgactattaagaagtttgcttttacagcttaaagaaagacattgaaatgatgattaaaaaacatggttcatacctcaagttcaccaccgtaagtagctccatagacgagaatctttttaggaacacaaccacggataacacagctgaaagccaaaaaaagtggaaacaaataaaggtataagatcgtgtaagattccaacgtttgataatgcatcaacaaggaacttacgttccaccaacgcctccaatctcctcagagctaatagggtgaaatggaagctcacaaataccaacctacaacaattgattcagaacaaacaacaacaacacattaataccaaaaccagacatacactaatgtctagagatcatcactatcctcaaaaataattcagaccttagcgccatgattagccgaaaacctagcagcacgaacaccgccactcccggcaccgatgacaaacaaatcaaaatcatagtgcgtcgcgttggcttcatcagccgccaccttatcaatctcaccatcaacaagcatcttcctcgccatgattatgcagactcacacaaatccaaactgccaaaaaagaaaatcgaataatcaatcaacaccacatgaagcaaaataacgaaatgaaactaacaaacagtgaatctcgaatcagcaaaaacaaacccgatcgataggatgtttgtctataatgatgaaatcgttcgatgaatcgcgaatatcaaagaagaagcagtgttaccttaagcgttgaagcgacaaagcaagaacactaaaagatcaagagaagagagacacagatacggagaggaggaaataatcaaatgattgtgtgggtaatgttaaattggatctcttcttaatcacacatcgatattgttttacactgacttaagtttttttaggctaaagtcattaatataattaaaccattgagttttttagattgatcaatacctttatgtataccaacttagtgctccctacgaaacatatgctcaaacaattgaaagcgacttttaaaacgaagacatggaatctttcaaaacttaaggtctaaattgaacgctaaaaagcgtacgtaggcgttgtcattatatgctcttacgtggcttttcttttagccaataattcaaaaccaacagaagaaaagaagaacacaaattgttcttctcagattattatttattatctaaacaaaacaagagtcaagtcacctccacaccaaaatgttgaacaacatttacgtttccatcatctttttatggaaacttttcccacatactcctctctattaatattattacaactcaggaactatgtcggctagttcctctccttaaataacatttcctcttttttatatatgttactccgataatcatatcagagatgtgaatttacttgtatcttatatataacaagaccgaatgatttagcaagaacagcttaatgctgaattaccaaaacactttgccttgtgtttcacaactttgaagttgttcgagaatcttcggcttctaggggataagtgtactctgtccatcatgttgatctgtggagcgtccagaattgcctttggcaacgataatgcccattgcattccccatatcgcgagcggtctcatgtatatcagtgaccggtaatgcccatccattgtccaaccttccggtgtctggaaccaatatctgttattcggttcaacaaagatacatcatcatcatgctcgagtatatctatgtgtgtgtgatatcgaaacaattaacagactggatataaagaagaaagaaaacttacccgaaaccttcttctgaccagccagctgtgaaaattccctcagcagtggtgaaaccttgttcttccattccagagaggatcatagtagccgcagctgcataagtaacacctgtccatatctcacgagactgcatgcacgtgtcatccactttcccatccggatgcatcccatttacagcacccattttacctccttttgtcttcatcacattgaaatcaaagatcttttgcatagtgcttctgattttggattcctcaaataatggaggcagacctgaagacgcggcataccattgacccgccagctgatcggtctgtatagatttgctgttgctgcttgacccactgtcgtaattgaagtatgatccattccagagtttcgtttccagtgctgcctttgcattcaaaaacttatttttacaaagttctgcaaagaatttgtcaccaatttggagagccattgctgctgcagcttgaagagcagccagccacaggcaaccgcagtaggcactcacgccatgaacagtccatgtatcatatgtctgatctgggaaaccatcattctctattagatcgtcattgtctctatcaaactgttccatgtactccatagcagcacgaactgcgggccacacgtctattccaaattggtaatcccctgtagctgcaaaatctctatacacctgaagcacaaactttgggttcagatccttccacctgcttgtgtcatgtatgttgtaggcattcatttcattccaaggatcatgcatccccagatcgtgaggaacagcacctctgaccttgcgaattcccacatttccttctgccaggaacttaaccttcctaccatcttcagacaacacggctttcgcaaaatcacgctggatgtttagttcgatctttgggaatagcataaggagcgcatatgatgcgtaaaagtgtacatcatatgtgcaccacatcacatactccacaccttccaaatacagaaaccgaccaacatcatcgccatcatctacatggggagtatcgacaaataaaccattccggttatgaatggctgatacttcatcattgctttttactccaacgctgttgccattaccaaggtcattccgttgatcattaatgtcaagtccaccgaccttaccatctgaatttcctaatcccgattgttgatgctgactattcccattagcattgagtgaagaagagtctgcaaccaaaaaccgttgataaggtgatacaataatttcaaggcaccaaaataatgaaacaacaaaattttgttaaaagcgaagaacacaattttacaatcaagagtttgactttgaagaagcgtatagatgtgtacctatccaaactgtaccaccggcaaccaaaaagtaaagctcattgaacagagtgaacttgtacctacaaaaatacaaaatagttcagggcagaacggtgagagagcaaagtattcaaagatctattaggttccaaagcaattaccactcagggagcctttcatctctgagaatgggattctgccatgcttcaatatcttcctcccacctcttataatctgaagttgaaaaccgatgctggtcaataatgcataagcactattccacgtaaaacggaagacaaattgtgtgtatgtgtaacatggaacaatttcagttaacaacattatcaggtatacatccatacagggtggcaacttaagtgaagcatatgacacatgaacatcagcaccacaaatacatacttgtcagtgcatcatgcacaaggtccaacgctgctcttggcgaagtaccataaaatttagtgtatctcctgcaaaccaaagacggaaaaagacagaaaacagaacccagaaatcaacagtgtataaccaaagacagaaaatcaacagcgtatacacattaatatattggtagcttctcaaagcatgtattccatacactcaattcggccatgggtttaagctttgttaaacaaatgacacccaaaagggaaaatttatgcttccctctatttaatgctgaagtattaacctacgtttgcttgagcattttctatgtgtacaactagtgccaggcactatgctttatctttagcttgcctagaactatctttctctctcagagttattcttctctttaaaaatatataaaacacataactgagagcgtcttcaagattctggacttagaagcagatccagcattactgagaaaagatgtaaactacaaacaacacagaaaactgatgcaatggacagaacaagtagccaactttaagacaacattgatcatatgaaaataagttggtgataacgattatcaaagaaccaacttaacttgttgggaagaggctacaaaggttgtactttatttacctgtcatatgtgcttccctttgaaaatttcacttttggcgatgaccatgaaagtgcaaaagacacagtgcacttgccatgagcttctacccatgccgaagccgagactgctgcacaaatagtgtctccagctaatgaaggtgtgcttggcccgctattgaagttttcttgatcaaatttcccatccttgtaggttaaatatcgcaactttagtctcatttattaaaatgacaccatatatattaaaccaaaggtcttacaaattgacaattcagcacaaagagcaatgataaagtcaaaagcatcttttgacaaggtatgaaatctacatgcacatagtaagagaacgatgatctagagaaagtcacctgttccattgtatcccacatatctttcgctgtaaaagaactatcttcagacaatccaaagcatggtaaaacagttacattaacattctgagtctcagaagcagcaatcgcaaatgtaacaggaggatttcctttgcctgtcctgcaaaatcagcacacattcaaaacaaatatatccgcttagagtaaagaacacaaccttctcctgcaataagcatatattctagcagattcaacttcatcaagggcgcatggcgcatgtgaatagataagccagtaaagaatgtcatacactcaagaagcatatatagagaaagaatatgactagactattcaggcagacacaggtataacacaactacaagcttcaacaggaagcagactgcaccgggtaagttgatgttccgagataaattgtcaactaatcacacagcagtagaacaaatcacactaaaaagacttggaagataaggagacgcgcatacacttggacagataatgcaacaagataagagcggtacatttatagtctgaatgcagtacactaagccttcacacttaaagaaaagtctacctagggaacattttggtgctaataactgcatgggagactccggcctcaactatctattttctctgttttgtgcattaactattgaccgataaggtgtacttagttggcggactttctaattatgtgtaggtaccattttatcttttgctaagtttatcagatcaattattaacaataacacttaaggtactgccatttcgtaaccgtcctccatttaaccaataagaaataatggtacaatggaccacatttttcaaatcgttgaatctaccgcgagatatatgcaaaccaaccgtaatatatagttaatattaaggtaagatgacttgcttgtgatgtaagaggacgccagagaccccatcttcacctctgaaaagaaaaaggaaccaaaaataaataaacatcaacttgaagcaataatcatttatggaaaagacggcacatattttgtcttacatgaatggctcattcacatgaccccctgacatatgtgaagtcccacccattgaattctgcacaacataaaggtgataaacatatcttccctctgctcttctatataatgtacatcaagtaattcagatgtcaactcaccgcccatgtgaaaagaaggctgacttttgccctttcctttccagtgttcaccaactacaacaaaaaacatacgtcacaaggttttcctcagatttttatggaaagtgattgatgctcataccatttctgatatataatataaggatatggagaaattcattatctaatttgctttagccatcagagaactataacaggagtaagtgaatagcgtttctaagatggatggagtctcccaccaaataagccatcacacaaatttgtggtctgagcttcaacaagaagcccatggcaagttcatgtacattggcactttgattacctactaatctaaggcaaaagcatcactacagatccctacatgtggaatatgcatatatccattcttatttcactgctttcaaagaagcaggcaccaactcaatgtgaataggcactagatgaacggattacttacagtatatacaaaaacagctgctggaagactactatctcgataattgtttggtataaaaggtgatatttgccggcaggaaatctttaactctggatcaggctcacctagaaacagaagaatcgttacaagagatacaccgacagaaatatgctagctttaaatgacgaattcctgcagggtcgtaccatcatatatagtccaagcccgaggaaatagagcatgataagttgaatgctggccattcagattccagccccatgaagaaagacctttatcacgcgactttctgagacgatgaaaccaatctaaggtatgtgaattaagaaaaaaattgcatcattgaattagaggatatttataaaacagatttttaccctaaacttccatgctggcctggagacaaaactgatgcatactttttgtgtccaccatctcgtgaaataaaaatctgcaaagaatgggcccaaggaaatgtaataagaaacacaagtgtcagaaagtttagataacataaggaaaaacttggcacatactacaaacaagaaaacatttctggtagaagcaaaattaacaaaagcctaatagcttaatgatgatcagaacatgggtaaccacagaagaaacttacagagaactgattagacatcataggtgatggatcgcaagtcccaggagtgatttgccactgcttaaactcccctctgaagcccctagatatgcttccacttctgcaattacaagcacgattggtcaaacctaaattacgaaactatgccaaataaaaccaaaaatcagaggctatctgctatgtaccccattcctccgagtggaacaccttgggatgcagatggtttgcagttctctttggtgaagggatcgataggtgctttctgtagtaatcataagttaaatctccgcaaacaaagaccaaaactttgtaccataaatatgtaaatcaagaaactctattgatcaagggagttacccttccatgggaggcctcttctctgacataagaccataatcgtatccccaagcgtacctgtaattccgaaaataagaagtaaagagacgccccatacaacaacgaagcgaaggaaataaacacaagatgtctctttgtttaccattttaatggcttccctaaaagtaatagtgaattcttttaagatattggcatggcagtttaatctcctcctccatgcgtgtggtggcggagcagcactatcaaaatcgagctatggaaacaaagacaagtcaaaagtcaaattttccaatcgtcatgattcctaaactactaaaaatagactcaccaattgcaaagtacttctgctgatgaattcctcagtcggccatgaatgctttctacggtgaaacaaagttgctccaaccatatttactatacttctcgattctacactgatttgatcaaagaaaattgaaagcaataaggaattaaggatcaacacgaaattgcatatacttcttaactttaaaaaggttgaatttttttaccttttatttacataaaagaacaaaaggtatttctcagggaagcatttgcagcgaattgaaacggcaccgtctcagtcgcaacaatccccgattcaaaacctaaaggaagtgacaatgaaaacggttcacattcagacgaatcggtagaagcgaaattttgaatacaaaggcaaatcaaaacataccaaaaagttttgtattcgatctgtcacgttgaatagtcaataggacaaaaatatgaaatccgatgagattttctcagaagaagaaggaggaggaggagaagaattggattcgaatcttcgaaaatcggtttgatggtattggtgagatttagaggaatctatgtggatgctgacgtggcgtcgtcgtggcgagcggagaatcgaccgtcagagacaaggttctcatacggtggcaagtggtttttaaactcttttgatttgcgtgcgtctccacagtgacgaagacgaagaccaaagagaaatagaaagagagactaattttgcattgcgtttttttacgttttagtccttttagttttgtcaaaagtgttgttttgacactttttttttaatctaatcaggaacatgtttaaagaccacttaacattattaattggggaatctttcaccgaccacatctggataatagggttggatttggaaatctcttgtctggtttttaaatttaattatcgtatattgtagtaatttataaacatattaacaactaatataaggtaactaattaaaagagattatccagattagttgtacacttgtctttttcgagaacgtatttgtacggttttacaaattttcttctaaaaaatgtgtcactgtcttaagccaattatttgctgaattagattaaaaaaacaaaactttctatgataacgtattttaagaataatttatatataaagacattatattatactcaaatgccaatttgtagtaataaaaaaaggtattatcgtttttaaaataattttaaatgtcaaacatacaagctcatgtctaaactattaaattttacaattgttaggtaaattaatataggaaacctaattaaagagttggagatcagttgttttttttcttgaacaaatattttgattggacaaatgtctttttcctactatggctatggacctatggtttacaatgtttctttttaattgcgacatttgatgctgttggtaagattaagacaattagttattgaaatacataagaaaacatttttaaccaaaataaaaaatacataagaaaacactataacagcgacatcgacgtcattaaatattgttttataagaaaaatatatcatactcaaatggcaaattatgtaacagtataaaatagaagaaattttaaataactaaatgtcaaacattttaatatataattgtgtaaataggtttatatcttaatatagttaccttttgataatccgaatagtaactatgttttgcgatataaagaaaatgcgatgcaattcaaatagtaacgaaaatacataaatatatatatatatatagagagattttaatattgttataatattattgcgatgtggttttggatgtggtctacatcatcattcgtgttctatacatgagttgtgattttctccaatgttaataagtgaatatcgaaatcaacggaggaatagaaaatataataaaagccgaaaaaccaaggtggcgccgacgtagcacaaagaaaaagtacaaaaaagtcaaaactcgttgccgacgtaatgactatcggtgtaaatccgaggtcgcgacttcgaatcgttctaaaacccattttacatgctcccattttttttttcgaacaaatgatgtcacaatctcagagtcaataaataaaatggaaacaaataatcatcatatgaacttggtcttgccacgtggaccctccattgccgttaccttccggtgaaataccaaacactccgcttccacttagagccgtagaagagctactacttcatcaaccacaaccactatctcctcaaaatctctctctaccgatcgatggaagcagcagtgccacgtctcgtcaattgcggaccggagccaattcgattctccgtctcctcccgccgctccttcgtctccgggattcctcaccgtaataaacgctctcgccagattctagccgtcgctactgatcctaaacctacacagactagtccacccaagtccaccaccgtaaacggatcttcttctccatcgtctgcgtcaaaagtagtcaacaacaatgtttccactgtacgatttctactcctacctctgccgattatgttatggttcaattgagcaatttcatagaaaatttctattggattgtgtaaaattataacctcgaattttggtttatggcaatggtacagagaattaacgatgtatcaaaagagattaaaagagtacgagctcaaatggaagaagatgaacagttatctgtgttgatgagagggcttcgtggccagaatttgaaggattcggtttttgctgatgataatattcagctaaggcttgttgaggtaaacactctttggcaattcagctgagattttagtattgtatttagcattgtaatgttttaattttgtctttgttgggatttgtagactggtgaaagcagtgagttcttacctttggtatatgatccggagaccatttctgcctattgggggaaacggcctcgtgctgttgcttctcgagttatccagttgctttcggttgctggagggtttctatcgcgtattgcaggggatgtaataaacaagaaagttaaagaggtaatattttgtttactgctcttctagctaagagtagaaaagatagttgtgacttgaagattggtgatatatgtaaactcctttagctaggattgagtggataaacagtagacaattttcatttcctatctttcagtttcttccttgttccaagcatggagcccatgatgtgaatttttttgcagagcctatgatcaacataactttgtttaatccccagtgcatttgagcaatagatgttggtttaaatctttgaaaacgatgtagtacacagttgtagtattttattcaatttaggtgtgtatatctttgttcacgtttcaattctcttttgcttgcaattattttatatgcagtttgagtctcattttccgtctgtcatcattttcagaatgaggttgctagggcaattgaattgagggaaattgtaacttccttgggtccagcatacattaaacttgggcaagctttgagtattcgaccagatatattgtcacccgctgcaatgacagagctacaaaagttgtgtgataaggtatgatgctgcaattatatctttcccttcattcattcccaaataattttgattgctaaacttgtctgtttttttgtttatgtgaaggtcccttcatatcctgatgatgtagcaatggctctaattgaggaggagcttgggaagccatggtacgacgtttattccgagctctctccttccccaatcgctgctggtaaatctcagaccatcaatgaacatgcacaccttatcatttcaatagagttttatgtcaaatgattcattgttattctggtttttcagcatccctgggacaagtttataagggaagactaaaggaaaatggggatctagtggcagtaaaagtacagaggcctttcgttctcgagactgtgactgttgacttgtttgtgatacggaatttaggtctatttctgcggaagttccctcaggcaaggttttgtctgacggctcagcttatgcagttctgtaattgttctctttcacctcaatgactttcgatcttcttgttttcatggtaatttgtgcaggtgtcagtagatgttgttggactggttgatgaatgggctgctcgcttttttgaggagctggattatgttaacgagggagaaaatggaacatattttgcagaaatgatgaagaaagatcttccacaagtaggcttcataacttttctaatggaccctttagttcgttgtctatatatgaggcgtctgatcataaaattgtatttgacaagtacctatgtggatttatatccgtggaatggttcgtaatcatgcaattattgtttcaggttgttgtacctaaaacctaccaaaagtacacgtcaaggaaggttcttacaacctcatggattgatggtgagaaactgtcacaaagtattgagagtgatgtcggcgaacttgtgaatgttggtgttatttgttacctaaagcaggtaactcttcctacatgcttgttacggagcataattaatgtggtcctagcttacttgcgttcattaaatcgtccgctttgttcagctttttctgcaatcatgctaaatgacatagatctaggcatgctatgctaagtttttctgagatagttaattctttaccaattgaagtgatggtacatataattctttggttgttcctattatcctatatagcatggctagtcaatgttcctaaccaaatattctcagtcatatagtgagtataatgtgattttgaggcaggggacctgtaccattgtagtttgcctcaggtttactcacttccttgattgatttaatgtgttgaccagcagtagtctgtattgactttctctgtcctcttttctagttattctgctcgcacactttctcttgttttagaaacaagatgatgtgcagacattaacactgttactgttttgtgcttcagttgctcgatactgggtttttccatgctgaccctcatcctggaaatatgatccgtaccccagacgggaaactagccatcctcgattttggtaatgattgtagttccagttattagtgaaaaattagattcgggtagcacagttgcattcgatgtgatatgagaaaaaactttgttgacatcttatccatgtctgttcgatgacaggtcttgttaccaagttgactgatgatcagaagtacggaatgattgaagccattgcacacttaattcaccgagattatgatgccatagtaaaagattttgttaaactcggtttcatccctgatggggtcaatctggctcctatattacctgtcctggccaaggtttttgatcaggcgctcgaaggtggtggagcaaaaaacatcaattttcaagagttggcagcagatttggcacagataacttttgactatcctttcagaattcccccttatttcgccctaattattagggcaattggtgtgctagaaggtatagctctagtggggaatcctgaatttgctattgtggatgaggcttatccttatatcgctcaggtattctatatgaactctgttagtgttatccagtaattagagttgagatttttccttctgtttagtccactcattcattgttttatcttacaaaatactaacgtcttcatatgattacctcaaaatttagcggctccttacggatgaatcacctcgcttgagagaggctttacgctacacaatatatgggaagactggcgtttttgatgctgaaagattcatcgatgtgatgcaagcctttgagactttcattacagcagccaaaagtggaggaggggaagatatgaatggaggcatggcagagatggctcttatgcaaagtaagacaagcagtttggttcctatgtttccagctagtgcatcccaaccggaccagccagttcaaacaagagtcgctttgtcttttctgctttcggagaaagggaacttcttccgcgagtttctattggatgaggtactaatcaaaatctaaccactttttcaatcttgtcacataaatactctgaactattgcacaatgaattataaatctgtacaataaatattgctcataatcaccacataatgattcaaaaacatgcttattcatgacaccttttgagttctgaaattttcgtgattacaaaacacagatagtaaaaggtatcgatgcaatcacaagagaacagctggtgcaagcaatggcggtattcggattcagaaacgcgacaccaatcttcggtatgttaccaccaacactgggacccttcaagcctgcagcacttcttccatccgtgacggaagaagacaaggtcatcttgaacaatgttcagaaagtaatcgagttccttaccgcaagaagctccatgtcgaataatcctgatcaggttagattcaaaaacctctcataatttgaaaaaaaatcagtctgtgtgagtaccaagtttttaacctatgtgtggtcatcatcataaaacaggtagtagatgtatctcaagttgttcgggaactgcttccagtgttgcctggaatctctgccacagtactgcctgagattttgagtcggcttgggtcaagggtcatggcgagaatagtccgggatgcgtttttgtgaatattggattaaactttgtacaattgtgcatataagttgcattttaaagttactacaaagaaatatatagctgattaagttgcattattaacacatatacacttgatgttatatacacagttgcaatggaacaatgactttgccttccttatgtggcagtgttggacatcaaaatttaaatcacagtattcacattttacattgttttgatatcagattatgtaacattttagtattttattgactgaaacataaaaaactaaatacaacagacttatttaaaacatgggctctgggagctgttttcagtcaccattaaatttctatataaggcaaaagaagagatgatgcagagtattttgagaacaaagcgaacaatccctcgcattcttcaagaaaatagcggcaaagattgctctcctgaagcataagatatgatacgctttttaagcggcgaaatgtagtgagccccgtggaatgcagctgctcttagagcattcagcggtccgaaatccaacgagtacatcttctggattccgtctaaaaccgccatcattgctatatttgcaggttttctctctgcttcataacgtttgagcagattcgcctacaatttaaaatttcaagcaatcaatattcaatacagaggaaaggagaaaataaacatgaggtataagacttagaatccgagcacatacctcgcctatatcagtaccaagagcaatgccctctgctatagctttggagagagcacacgcatctgcaaatcctagatttactccttgaccagccaacgggtgaactgtatgagctgagtcaccaacaagagccacacgttttgacacatagtcttttgcgtgccttaaagacaaagggaacatcattctctctgaagaaagcttcacaaccttgggaggagtttcaaacctctctttggcagatatggtcgcatctcctgtaagccaagagagactatcccgtgaacttgtagtctctggattaggaccatatccagaatccagagcatcatttacagctttgatgaagtcatcctcgttcatcaattttcgatctgatgcctcttttgggtccatggtccatactatgttgctaaacttgtcaccaatgggaagaagtgcgattgggccattgggtaaaaaccgttgccatgctgtgtagttttcggctgtatgctcaacagtacaaattatagcgttctgtgagtagttccatccagtcgttttgatcccagccaactcccttactcgcgacttagacccatcagcgcctacctgcacaaagattgttagacatcctaaaattgatgagattcaggagtcgttccactcaaatctagcaaatggagaacgaaaacttaccaccagttttgcgtagacgcgatttccatcgcttagctccagcttagcaaggcgtcctcgcatgaacaagtctgttgtggatggtacttcaccaagacctgtcaacgaagagctaggtagcatatccatcgcatttaacctcgcgggataaacagtcttctggagatctgattcctgcaaatatcacgccctcccatttaaaaaacagaaaacatgccaaactgatgaagtcagattatctgattatactgtagaactaataagcgattagaacgaattcttcaaaatcatagcagtctttctaaatttgagcacagagtgttcagatgaagatcagtctaagcaatatggataagctttctggatggttgatttttaagctatgcttcatttgttggaaaatcaaattaaaaggtagctgaaggttttgagcgagcaaatactctagtggacatgcgaaaggacagtcaagaggtaagttacaagcattggcccaaataacatatctttccaagaaaaacccgatagattgcatcaggatgatgagtaaaacttggacggacccaagaaagtaaaatacctgtacacaagatagctgagaactctgaagaactttattctccactacacacctggatcatgtcaacaatgagtacacagctattaacatcatcaaggatgcagatgtatatagcaatatgcttaccccaaaacatcttgatgtacatcattagcattgtatcttgtatatccaaggcctgtatagtcccatacctaaaatacgaaacatgacaaatgactttgtttttctgtctagcatatcattgtcagtatatgtagatccttcatagagtagatcacacctagataaatctgactgtagttttccttttaaggtttagaatttaaacaaaggaagggataatttataccaagttaccaacatgtaaagaggcaacttaaaacatgttccaccacaattataaccacaaacatttgacagaaaaccaattccttaaaagaatttttctttgaagaaattaaaaaatttcagacgccatcatagaaatgctttggaaggaatgtatagtgttaacaataattacctgcatcttatcaaaatacgcatgtcgctgttgctcaatgtatttccaggcaccaatatctgcataattcaaaccaaatacatgattccaaagtaataactaaaaaggatatccatggactgaatgaggacaaagcctgagctcaaataagggttccaagtggcaaaaccagcatattaaattaagcttacgcaattgagagttcacaccattttgaaagaataatgagcagaaactgtgggaagaaacgagaaagtccactacgtacctttgaggaaggatattgttgcaggtgtgactgtactgactctgggatcaggttgatgccctttctctatgatatttcttctccccaaaagaggattattgtcaataatagcgacattcaagtgctttgtcaatggcttgctggctgaaagaataacaaccatgttcgtcaattgaacaaatatttatacagttagctgaacataaatcactagcaacgactgcttacccaatgaagcagctaaagcgattccaaccattccaccaccaacaatagcaatgtcatgttgtggaccatcgtcagtggaattatttaatgcattgctctcctaaatcgattaataaatgtaaaactatcacttctagaacatgacattgctttaatattaagcaaaggatatcacactaaatactattgatgtcccaaacatgaaaaactactctacatcatcacaatgaccaaagaagactttagaacagctgcacagaatttttttgatatattgctacaacaacaacatgcaaaagatcacaagtatctttcctgattcttccaagacaagatatgcgaactcacaaggagagggatcttacattggaacaagaagtagaaacatcatgtgtcacaacagtcgaacaagtcctctgcaaaatccttgttccacagacacttgtcctaagattccttgcgagcaccctgtccttagacatagcatcattatataataatcttctctaatatccaagtaagctggatagtaataaatagatacaaattcaacattccaagatggactctaatctaaattgcacaaaacaaacaagggatccaatttcctataaagttaagagattgcagaacttgacagacacaacaaacatgagatcaccgacaaaagattgaaactttaacaacagtagtttctcaaaactaggaacaacagaactaataagcaacccaccatcaattgattagctaaagataaagaaaacaactcaaatttaaaaaaaactgattacaaagacagtgattcaaattagaaaaacgcataaaaaccaaccgaagatagaattaagggaaaatggaggattaagaaaggtgagtattgaacctgttcatcgttgaggcagaaattgtgtttctctctgccgccgacgttagatacctttaatggaaccaaaagaaaaaaggacgacgaggacgaaactaaagcctctaactgacagagaaggtctttcttcaggcggagtatttgcaacgaaagtggtctcaaacaaacgacgccgtttcgtttcaaccgaggcaaggatcaaaccgtaattcgggtctgcttataaaataacccggttttaattggttcccgccccttcaaattcatgtttagcttacgttcgttacacgggagcgtcactcagagtctgaacccatctacatcttcatcaggaaatgacgatgaacccatctaataagaggagtcaaaacaaaagtaacaatcaaatcgagaaatcgagaaatcgagcaatggagaagatttaaaaacgaaattgaaaatcaacaagaaccttgatcctatttagcaataaggttgtaaaacataatacaaagattatggcaaagatatgataatacccagacaaagaggcatctatatgttttaaacgaaatactacattcaacaaaagtttcccaatctagaagtagagagtagacaatagatattggagactatctaattagagctgtcaattgggcgggacgcccatgggcttgtccagtccaaatgcatatgggcggactatattctagacaaaaaacaaatggtctaattgggcatatgaccagttttgtccacggacaatatgggcttgaccgtatggacaatgggctgcccatgggcataaattgagtcaatatacatgtcttcattttaatcatatttttataattttaattacaattacaactaaataattttcaaattatatattttacattataagtttctattttaatgaaatttttaaattttaataaattatttcttattaaattatttacggttttgaaggaaaaatactattccacaattttttggaatacgcaaaattttgattttacggttttgacgggaaaaatacaattctccgattttacggttttggcggaaaaacgcaattccataatttttccgccaaaatcgtgattatattatattggtaaaaaaaaaacacaattttaccgttttgtcggaaaaatgcaagtctccgatttttataatttttaccgaaaaatgcaatttctcaattgttctttaaaatcatgatttttgatttatcaataataacaataataaaatgggctgaccacgggttgcccatatggacatggtctttattgggcatggacattttcggaccattgttcattatgaaccgtccaacttggcccataaaaaaaaattgtttgtacggatacacccaatagtctctggacggaccatttgacagctctatatctaatcgattaaaccaaacaaccatcaaatcgacaagtagagagtagagattagagaaaagacttacggcgggtcgatttcgcgatgaggatgaagctctggtgaattccagatttttgttggaaattgatcctatacttaatcgtatttaagatgagatcaagtgaagagtggagaagatgagaagagactgcaacaacaaagagaaaaggatcgtaagagaaagaagaaagaagaaaaaggccaatgggccatggtgttgaattgaaggcccaagtgttaatgggttattttgtgttggtgaaattagattattatgaagtagttaggttaataaaatgccttcctcctcaagacaatccgtatatagtcctcaacatctaaaatagtcaaaattcaagaacaaacgttacctcatctacaaacttatttggaattacactagaatgtgatttaatcggctccagttttttccaagatatcgactcaggtgttgcatattccaagcatattgaataagaagaataaaaaaaagatacaaaagacgcagaacaaatgtttttacatcacaatggaaaggaaaacaattcattgcaaatgtctgagctatgttacaaaataatcaaataaagttgtatcagaatttttatgcctttctcaccctttcttcaatgtcttttcacaaatctcatgaagaaaacctgtgtaggttagtattatgttctcaagagttgaagtggttagctaacttgttctgtttttttaccacccttttttggtttccttttctttgattcaagactgacccaagtataacctgtgggtatagcaaatgggtcttgtaatgtttttgacttactactcccaccatctttgtttgatctagaccgacgaaaccacgaggaggacgatgatgagttggtgaagtcagttgttgcagcagctggactctcatagccagaagaagtcgggctcgagagaggcgtcttaaactcatctacaggctcaatttcttcaaactttgtgaatgtaacaagcacttttattgtaggtaccactggaatagcaacctacattcacaaacaatctctataagaaaaagaaaaaaaaactcatcttcaagaacattaagattagctcttaacatgaaacgacaacataccttgaccggaaatgttccagagggaagttttgtggtaagaagttctctaagacgacgaatcgccttaactttgtttgcaagtatgtcaagtaaaggaagcaactcctctgtttgtaatgggaagtttggagatagccaaagaacaggacgtagccctttcttatattcgctttcgtggcgagtcttgtcagagaccaatgcttttggtttcctataatgctcattatctactgagtgtcttcctggttttatctgattagactctcccaatagattacttactttctcattcacacaaagagagcttctcggtggcgcgtattgaatctgcttctcttgtttagtctctttctttctccaacctcctaaccaccctttcttctctgctttcttgttggcctcaacatgatcttcctgatgatgaacaatgaaaccattctcaccattgacatttgggaagtctggtaaatccagcttaagagcatcctctagttgcttttgctcttcatctgttaaaacatcgcagatatcatcatcgcctccttctacagccaatgaaccaggaacctttcttgacttaacactaacaacaacattgttcatctcatagaccttagctttccaaggaccaaccatctcactcttctcctgcctcctccaattagtctgcggagataaaaccgcttgtgtcacatcaatcccgggtctaaagatattgctcttacacattgcagccacttctttcctaacttcttcttctgatggaactccacaagcaccatccaacgcattcatcacttctttatccttatgattcaccatgtaaagcgatccacgagcaacttcaccatcctctgacccatcaccaagaaacaatatactttgatcagaccgttgaatcttaaacccatcaaaaccagccatagtcatatccgctctcaaattcgatcccactttccaaaccttataagtatcagacggtgcaaccttagatacaaaaggaacaacagagctctcaaaatgaaaactcatctccaagtaaaaatctttcatcttactcattgtagctatcaaacgaggtagtctcctacaccatttagcccaagctaaaggctgatagtgccgaactataatcatcgctatcgcctcttgtctactgcaaacagcttcctgcaacgcgttccaaccgtcttcgttttgcaaagtccagtcagctccagcaaccattagcatttctactgatgttgaatcacagagcttcaccgctagatgtagcggcgtgtcgcggcttgggacgtctcttctatcaatcacagctgaaatggtatcggattttgcttcctcggataatgaagctgcttctgtttgaatctcacatggatctttaggctttggaagagaagacagtattgctctgagaccaacatagtctttagaagcaacagctttgtgcacagagctgtgtatgtacttagacacatcaacgttctccatttgagatcccaaatcagaatcttcagatcaaaaatcctacgaaaccagtaaatggatcaaaatcttaacctaatttttaattcagtaacaagtcaaaccactggagaaacagagttaaaccaagaaaaaatcaatggaaatgaagagaatcagaattcgaaaagtgggtctaaatcaagaaatcgaaagatctaagaaagttctaacctttttgtcttttcaacttctaactttctctgcaagaaagataatgaatgacttcttacacaatcttctcaagtttttgctttgcagcattcactttgtgtttttttttttatcgcagtatcttctttagtcttcttcttcttcttctcttgtgtattatttcgtcataggagagaagttgaaagagagattcttgtgatctaattccagatcagacgcatgtgggagcgtgcaacaaaaaaacatacagagggatttaagggtagaagaagaaaaaaatcaatcccgagatttgtgagaccagaaaatgaataaagaaaggagcaataagaagaaataggaaaattgagaaattaggaaagaggaatcagtcgtgtaggtgcaatgtgtagtgggagggaagcaagcaaaaccaaaaagacacattgacattgaaaatttatgtcaatttatgacaatatctatgtactaacaaaaacagttttcaaataaaaaatgataaataggatgaaacaaaaaagtactatactaatcattataattttaaatgtagtttaatctgttttttcagttttttaaaagctagcttgtatatattgatagaattaatttaatggtattattatggaagaaaatattcattaatttgttatttttgtgaaattagttaaagtagatatttttttacacaaatttatcaatataaaaataggtaaaaataataggttaaagtagaagtatttatgaatccaataccagatcatatactcataactcaatagatttagagaattttttagaatatccctattataatatatattttcaaaaacatccaatatgttgcctattttcaattacatatctattttcaaaaatgttatttagtttgatgtctctagcggcttacgtggttgggctccaaaataatatttataaaaccttctgaacttttatacaaacttctaaaaccttaataacatctttataaaaaccctataaaaaagtagaactgaaaatagacaacaaaaggggaactataaaagaggttttttaaaaattctcctatattgtataggtttctaaatttcacttttacttcaaattattaaagtgaaatacattatgagagaatttaactggaaaaatatgcaaacagatcttctactaatactagccttaatagtttgatgtcaaggctatttaaaaactgatatgaatgatattttttcttgacgttaactcacctttatactaataataatccaaatatttgctactatttgttaatagattagttgtttcagcaattagctatggtacatacattacttacaaagaaaatgaaaattcaataaaaacctaaatttctattacgaatacaaaaatatcacatagtttactacacacaacatcaagaagaagaaaaaaacatcaagttgctagaaatgttttagtgcttttaattaattctaccggttcagaagcaaaatccggctatttctcttgcctcgatcacatattaatcaagtccattaaatccgtcacaaagtgaacacattatccattatgatgtattgatgtttatactacgaagttctgcatgagagtggatcataactctataattgtgccattggactaactatgacgcatactcttttacgtgttatctacttgaatgatttaagtagttcgtaaacgatttaaatgactaatcggtttataattgaattggtggatgtatttgaatcaatatttataaaattttaaaatattattaatatgctgttttagtaagggttaaaacttcagttttttaacaattgtctcatagattcgtggtatagcgttacttaataacaattaataacaattataaactgtaaaatataaatattttataaaaataaaatttacaaattttaatatatattacttttaaaaaataaattgtcctgtaatataccgtggattaaaatctagtctttaagtaactctgcctaacttataagcaaagaagagacatttctactggcttgaatccatcacaaaatgaccacaatatttattatgaagttcaaaacattgtattgggattatccacgtcgattacataaatttttgtcctttttctattggattagataatttgacaaagaaaactcgtgtatattctttataataccaaagtatacaaccaaagtatctttataagcatggatggagctaagaagaagctgttgacacaacaagtgtgaccgaccattaatctcacgaacgcattgtttccctaagagactacaaaattgacacgtgaaatcggtggtgtttaaatagttctgttttaaattttcagcaagtctcataagcacaagtgttggtcgttggttaagcggtcgaagagatagtaaactctattatcataccacacgtctcatagtaccacgtgaagtgcatgtcagtcaaagtcgcgtgatgtacaaggttataaaatccgaagatagatgatatcatcatatctaagtcgagtattaatttgtcgccatctttgtctccactctcaagatgttatgtaaactctatgatgcagttacttttctttggtttcattaactatgtggtcgtagaatgtgaatcttttgcaaacgggcttttaggttgcatcatatgaagtttgatgactcttctatattttgaacctggactccacaaagacaaagataaggcggtttagtagcaaacttggtgttggtattgataactcacttactttcgatttgagttctctttctccaatacccgaaaaaaaatgttatagtggatctacaactatagaatttatcttacttctttttcatctgaatttttttgtatatttataaaattacaaattaaaaaatatacatacagataacgaacaatccgaaaaataaaactaggaaaacgtgatttttccggaattttagctctaaaaaagaaaactaaacatacaaccaaaaccaataaatagactaaaaaccgtattggattgaaagccaaagtctgagacataaaactaagaaaaattctgataccaaacattagtgacgcctgcaaaattccaaacttctaaaaatctaaagaaaacaacaaatcgaaaaaatctaaagaaagccaacacaacataacaaatttctcctatgatgaatagagagtacctcacaaatcaagtgttagcattgtattttatagtgagtaagaattctagctaaacccaaataaaataaaattgaacatcattactaggtctttgggaatactcgctcattcttcattcattttcttcctttgaagcatccttgtcgtttcatagaatgttttatctttctccttcttagctctcataatccatattagactgtggattaattctctagtactctaatctaaattttatctactatgtttatgtttccgactttttttttcactatgtttccgacttagatgttagaaaatcaccctttcatgtcatatcaatattttcttgtgtctatcattgtacactttaaggctcactttcgagagatcgatccgacttttcaaatcagttcttcatcaatagacgtatgtctcttacatataatcaatcagatgacccaaaaaaaactatttgaaatagtgaataaaagttaaaaattatttcaaatacttcatacaaatataataaaaataaaaataaaatctaattaaatctataaaattgtagttttaagataccattgtattaaatggacatatctccttattccgagagccagattgaagacaaatttgtaaatgaaaatggtcgatcaaagataaaattttagaatggccactagcattaaagtaaattagtggtttgatatataaactttgtttagcacactaccaccatcgacttcgaatctccgcaatattgccaccaccaccttccaatctccgcattgttgcatttttcattatttaatgctgtaaaacaaaactaaactgtgaatcaaaataaagcataccaaaattttctgacttggcggcgtctaataaccaatccaatccgattcaagaaacttggactctaagcgaccctaacaaacggtccactaccatctccccagtgtattccactagcaacttcacattattcatgacacatttaatcacaataattgattagtaacttttggggactaaatttagatgtattatccttactagtactaaacgtgaaagttttatcacacaccgcatgaattttacattatagttaaaacacacacacctgccacaaggtcataccaattatattacgaatataaaaaagtctttccactgttccacataatcttccttctttatcttccacaatatctcattcaccagcggttaccaaaagaaaaaaaaaaaactattctcattcactatgcacattattgtggcaaaacaaaatctaattcaccaacggttacacaactctatgccaaactttgtttttcgaaattctgtattctgaaaacattcgactaattttgtacaaaaacacatgtgtacacgggcaaaaaaagcacatatctattattttaaaaaagattaacagattatcgttcttccattactttgtaatgaatgactaattttttttactaaacttttatattaaacctgtgtctaattttatgactaatgaatttcttttgactaatatttaattattgaacacatgtgttatactcattggcaataaaaacacacatagatgtctttagttaataaaataaattataaaaatgttattcaaaagaatattattggtcttccaatatacactttctttggatttactatgaaacagacaatcttcataaaatttaaagaaatctattaaaaacaaaacttcaaattacagcagaccctataataattgtaaggattcacttctatatatgtgcctgattaataaaaggtaaaaaatcttatagttttctaaatttataattactacttttgggagatttgatacctatttagaattcactctcaaacaaaaaattcccaccgttgaaacaaaaagtaaatgtgtgtgaaccaatcaaaatcgttgaattaaggaaaaatctccacattatagcataccttataatctggatattttctgctatatatgtctctaataaagtaaaattgtaaaaagaacaaaatattacagttgttattcctatacgtatacgtaataactatttttggaagataagattcgacacctatttaggttcacttttaaaccaaaaaaaatctctacccttgaaacaaagaataaatataagtaaaacaatcagaatcgttggattaaaataaatctacaaaatactccacattatagtagagaacatataatctagatttgctattaaatatggtatcttgacaaatgtcaagaccccgttacattttctatcatctttatataaaccgctagcttttaccctcttgttttgggcaaacaccaaaaacgtttttacttataaaacgttagaaaacttctctagtcatgttttatgcataggtcgctcacaagtcaccaccatgcaacactctcttcgttctgatcttcttccgacgaagacttctcctcgttctcatttacttccacaacccaaaaatgcaaatatttctcgacgaattctcattaaccctttcaagataccgacacttcctgatctcacttctccggttccgtcaccggttaagctcaaaccaacgtatccaaacttaaaccttcttcagaagctagcggctacgatgctcgacaagattgagtcctctatcgttattcctatggagcagaatcgcccgcttcctaaaccgaccgacccggcggttcaattatcaggtaacttcgctccggttaatgaatgtccggttcagaacggtttagaagtggttggtcagattccttcttgtctaaaaggagtttacatccgtaacggtgcaaaccctatgtttccgccgttagccggacatcatttatttgacggtgacggaatgattcacgccgttagtatcggttttgataaccaggttagttacagctgccggtacactaaaacaaaccggcttgttcaagaaaccgcgcttggacgatcggttttccctaaaccaatcggcgagcttcacggccattccggtctagctcgactcgctctcttcacggctcgagctgggatcggtctagtggacgggacacgtggcatgggcgtagctaacgccggtgtggttttctttaacggcaggttattagccatgtcagaagatgatcttccttaccaagtgaagatcgacggtcaaggagatcttgagacgatcggacggttcggattcgatgaccagattgactcttcagtgatagcgcatcctaaggtggacgcgaccacaggagatctccatacactgagctacaacgttttgaagaaacctcatctcaggtatcttaaattcaacacgtgcgggaaaaagacacgtgacgtggagatcacgctccctgaaccaacgatgattcatgatttcgcgataaccgagaattttgtcgttataccggatcagcaaatggtattcaaattatccgaaatgattcggggcgggtcacccgttatctacgttaaagaaaaaatggcgagatttggagttttgtcaaagcaggatctgaccgggtcggatataaattgggttgatgtaccggattgtttctgtttccatctatggaatgcgtgggaagagagaaccgaagagggagacccagttatcgtcgtaatcgggtcatgtatgagcccacccgacacgatctttagtgaatcaggagaaccaacccgggttgaattaagtgagatccggttaaacatgcgtacaaaagaatcgaaccgtaaggttatcgtaaccggagtgaatttagaagcgggtcacataaaccgtagttacgtgggccggaaaagccagttcgtttacatagcaatagccgatccttggcccaaatgcagtggcattgcgaaggtagatatacaaaacggcaccgtttcagagtttaattacggaccgagccggttcggtggagaaccgtgctttgtaccggagggagaaggagaagaagacaaaggttatgtaatggggtttgtgagagacgaagagaaagacgagtcggagtttgtggtggtcgacgcgacggatatgaagcaagtcgcggcggtgcgcttgccggagagggtaccttatggtttccatggaacgttcgtgagcgagaatcagttgaaggaacaagttttctgacttagtagtgtgtatattcataattatatgctatctcctctttttaggtttacgtttaaattggttaatgtgttgatatttttgggtataagaaaggagttattacatcttccatatcataattaatatttgtggtatgattctctagttatatataagatgtgtataaaagaaatctcttaccgtattaggtttatcttaacgtgaaaaagtatgcttgtagtataggtatactatcacactctcatatgcatttcaaaaagagctttttatatattacatccaaatggatttatactttgattttaattacatttgacacgccaaggactctgtaaaaagtttgagattattggttaattgtcaattagaagcgatccaataaatcaatgtcccaccacgtgatccaaaagcaacgcattgatgtttcatattccactagtttagttgtaaatttgtaactattagcattaaggtttaagtggtccattttcatctaaagtctaactattatgtagaatgagcatataaactatatataatgttcagccaataaaacttgtcacgagactgatgaatgataaccgtcgcgtagttagtgactataaaatccataaaccatgtgccattacttttgtttgtaatggaagtttagtacaggacagtaacagaagtaacaacagtgtttgttcagtcatccgcataattttcaataatcatatttttatatattttggatcattggaatctaactaagaaaatcattgtaaaacaaataatttttgtttggaggagctatgcaacatgtctataggtttcaatagaactgatcgatataattaactaaatcaatttcatctttctattattaagagaagacataaatgttttttgataaaggacaagacgaatgttaatagagaatattgtcaataataaatgatatttattagtaatattttcttatttagttaaatactatgtaccttgaaaaaaaaaaagttaaatactatgtgttgaccaaaattgaaattgtttgagacaaatgtgccacaagaaaccataacatgatatatagaggttgcagatcgtcaacgtttgtcactctcacaactcactcaaataagagagagattgaagatacattgtgttgacagaattataagactgacaacaagacgtaacatagcaactagagacatgtgagacaagtagaaaatgacacaatcctcataaaacaatgaagctgccaaagattatgttatatcatgaaagctagaagatcatcaaattcaaggttaaagtattcttgagctctataactcagtaataaagggagagattgaagttatattggtgttcttactcgttattagactcaagagagatgatcaagaagcattgaacaagtctgatataacctcatgtatagccatagatgcaatgaacaagtttgatacaaccgcatgtacaaacaaagatgaagtgatttatcaattagagaatcttgtcagccaagacaaacatacgtgaagtcaagtggaatgtagtggcgtgctgaaccttggagtcttattgatccaagaagtaagaactcaaccaaatcaagcttctaactcaaaagaacaagtctaaagaaagcaaagtatcagctgagtaaacctaatgtaacagagcagaaaaaacaaaaagacgatatgtaacggaatagaggtggtaaaggctaaggttgcatcaatcagtggagcggttgtgtcagtacagagatataggtgcgtcagagttaaagcatggttcaagttgacatgcatgcatcgtggtgcagtgtagatgtgcaatagaacagagtcttgggtcaagttgacaatatagcataagcaattacccaaaagataggtttgaaatccaagaagtataaaaggacgaggtggtcacaagaaaaatgttacaaaccttagatctaaaactgagagaagcatacatgatgtgtgtggtgttgtcatagatttgttagtgattttgtgtaggaaaccacactggtcgaaaatacaatgagtggtagtttctttgattaattaatctagataagagtggtatgcacatgtgtgtgctagataccattgacaaatgtgacttttgcatttttattctactgaatgattctgaatttggttccgtatatatatgttattcgaactacatgcattaacaaatcttgtgatatctcttctctatgctctcatcttcgttacatatatctatcttacaagctttgtagatctaacacgcgtcgcattacaacaatatatattcttaagaatatcaaattaaaaatatggtttctcacaaaacaattcttagtaaaaatatattatacattgcgtacacttcttaaaatattaaaatccatttgtcatttctatctttctaagtttttattctaattccgacatgtttagatttataagtatttggtagaagtcgtccaccaatttttaattcggataagttgcaaactgattttggatttagcttaatcgatgaacaattaggataatgagagatgttgttatattaaagatatttttccatttttgaacattgctattgattgtttacccaccaaaactttttttgtgttttgtaaatttcgaaatatctactaaacagcaaaaaaaaaaaaaaaaaagaacgtagagaaaaagcttattctctatataatatgatacacaagcataacagcatccccaagaaaagatccaataatttatcaacaaatgttctaacttgtaacaaaagatttgatagcccccgaccaacatggattcctcgactcgaaacttgaactgtaccaacaaaaaatatagataactataatgtcttgacccaagatcgatactcacgagacaacgttgcaaataaataatggaccgatcgatatgacttctaacgaaacaaaacatttattggttgggttttttgatcaactagtctactaatccactatctatcttcttccggaaaaaaacaagttagacttatatataccgtcgaagacgagtattttttgttttaacggtggggctaaattactacaacgtgaagttagacgtttactctactcggttaaacttcctgggattatcgatcttcggacccttgcaagatttttaggatttcttttaatgaagtatgtttacttgtaacttgtaagagttaattagttgacacttgacagataataacttgtgtgaatgaactcacctcttatatgtagtctaatgggccttttatccgcctacactcttgggccgtaacccctataagtttttgggtttgctcatgggttacccagttattttagttggctcacacaacacatatttttctaacctcaaatttgttttaccgcttcgattttcatcagattcaaacaacctcctcaaacaatcaagtgtgggattctaataagatatagcaaattaggtagtgtttcagggattggattacccattgtaatatcagaacttagtactaagaaaaacaacctaaaaccttctacaattgcacatgctacgaaatgtactaatcaatatattataacacatgcaaaatgcaacacaccatttattgtttgcccaaaatctaacagtagttaatggtttactcatgactaactgtatttgtcagctttagtagtatagccctaactagctagtgtacgtagaatttgcttcgttaaaattcagtcttgtcttttatcttctcgcttacatctgcctccatcaacactagtttgccaattcttcagatatccttctttgtttgttttaaacttcagaaattgtctgtcttcaaaattatgtatgattgtcgtttaacgaaacaaaattccaagcaaagatttgaaatgtcttatcaatataaagaaacgattgattaaatatattatttaaaattttcattggcttgtgttttaaatttttataacaactaaccttttagttgtaaagctagctagttactgtatatagagatttcataatccattatttctctaatgcttttaagttttaaccaatgttttcaaaaaattttgaaaatatatcattaattccaccaggaaatatttgacatttattgttactctcagagaagatatcatttaataatttcactacaaacgaattaggaacattgattgtatactattggaaaaacaacgaaagcgtgtacagagcgtaaaattagcattctacattggaatgtgatcttttcttagatcatggtgtgtctttgttcgtaatgtattagcctattgttttacagttttctcttcatcaaacaagttcctaattatgtgtgagagactgtgagtgtcgttccattttctatatagaactagtcatagagggctaatcccaaaatattgattggtattgacagtgatacttggtagtctactttctttttcctttttattgtatcgtataatcgtacaaattcaaaaatttaggttacatacttattttagatagttaaaggttagtatggaatcataaaatagtttgaagtttttttttcaatatttcttagcaaaaatatatatttcaacatgtgtctgcatttaaactctcatgtggtttgtttttataagttttattgtttaattataaaaataaacatgtgatatttatccactactaagtttcacaaataatatattggaaagtcaagaaactgagagaaagagagatggtgtgaagttgaaaatgaggaaaataatccttttgggggaaaaagaagttaatgcgtttgattgaaattgaaagtggctagtaggaggaagtaagtaagcatgggttacattacaatttcaccttttcacttacctttaaacttcacttccaaaataattacacttttcatgtgctttgtttcaaaggtttctctgatactctcttcttcatataatagaacccatatataatgtactatatatatatatatatatatatatgaaaactctaattaaggtgttaaagttaattgggaatgcggaagaaccagaatatattcacatttcatggtaaattataagtttttcgtttattgtgaaagttcttatgggatggacatattatgatcatgtagttatatagattagttgcaaaatacaaatatcaatttgcatgattcatgttttttcgaaatgtgcattaacattcgcctctatacaaagaatggtgatgatagaattgtcataaaaagaagatggaccgctaagaggtcacaaatctattgcaattcgtcgtccataatgaatcgtaaatgtatttttcttagacctcatcaatgggtagcagaatatttgggttttattcattaagaaaaactatttattgtatacaattataacatgtcggctttactgttatcataaatgtgtccacaggccacttaatgaggctaaggcttatgaatcttcaaatcaaagacataatgaagaacctttttttacctatcgaaacgagaaaaagtggaacatgcatgatttccacataattacctaattattcttaagctatttcatttagtcaaatgcttcatttatttattttatatgcaccgtatagcttgtatataaatatatccattctaattctttttgcccttttatcaaacgtcgctatttataacaatccagcttttgctttcctccatattatatccccatcaaacaaacaaaaacaatatttgaccaaaaatagacaaatgaagataaagggtttgatgatattggcttcttctctcctgattcttgccttcattcatcagtcggaatcagcttcaatgcggagtttgctgatgaataatggatcatatgaagaagaagaacaagttctaaagtatgactccatgggaacgatcgctaactcttctgctttagactcaaaacgggtaattcccactggtccaaatccactccacaacaggtaactgtggtaattgaagaacaattatatgtgtatctatgttcttgtgtgttgtaaggacatttcctagttaagtttcattaattactcgatattctttgcctttccacacatctttgtttattactactgtacttgtttcaaagtgatttaaggatatcatatgaaaacccttaccgggaccaaggttgactaagcttagaaatcctacgttggaaagaagaagtggcaattgatgtctcacttgttctgttctctggttcatatagatcgattggaaaatattgcatggttgatgtttgttctgatcatatgagatcatgtaaagccaatatatatttacatacaataactatatatgtgtttgagaaaacaaaactatatatgtgtatatatatatattatatacatggttgtgaaataaaacaaggattatttaaatacttagaaggagactgatatttcaattaatcttttgaatttgtattgtgtatagactattggactttttggggcagaagtttctgaaaatgcaattaaattcacttatatgtcagaaggaactcactttatagttaatacatagtgtctcccaactcccatcttgtctatggttctctctctcttacgactacgaatatggattaaggaaatcttgcaagttttttttgtctctaacaacattttcagttcatgtttcaacttaaattataaaatccttgttcaagatactctaacgttttttttttttaatgtaatgttaaattagattcaaaagaaaaatgttgtttgtacaacaaatgtatagtgtgtttgataagactaaatacatttcttagcaaaaattctaaatttaacttctagttgcatagaaaatatattctaaatttaataaatgcataacaaaacttgtgtaactgggggacagacctatcaagataaataaattaaatcaagtgacgactttagtcactttaaagattatttaaaacagaaagaactacagaaattaacaccaaaaaaaaaaaaaaattaacaccaaataaatcacttgatctcagactttcagataataggtcaaggttgtctttaacaagaaaaaaaaagacaattatttattcggagtaataattgttgggcctctagacaacttggtccacttacaattgttaggccaactaacatgagccggataacaatcagtattctttcctggtcacgtaacttaaacaaagagctacggaactttacatcatttctaagttcctacaaagttttatcgatactgttattcttttatggggaaacgttaaatagaaacacaaaaattgagtctactaaacaccaaataaatcgaaacacaaaaattgaggctgatatcagaaacagaaatcaaccacaaatcaccgttcaaatgtcattccagttgatgtctcaaaacttttgctcactaaaacattttctctcttaatagaattctctgtcaatggtcacaatgttattaatcatgtctctttgtaatcatcctttcatagacaaatgaacattagccataaagagacaccaatatcatctagagtatagacatgaatgactcagtgtctcttaatgaagtaacttcctaataataccggttaactaaaccggttcagtatgctgccaaatcatagaccgggtccaaactaaccataaaccaacatatactgtttaattatcatcgatcaaactcttctcgagaaagaacccgaatacctataacattcgtactatcaagtgtgagatagaataacaaaaagaaaatccaccaaaaactgattggtcagtacaaattgcaagagaattaaaaaaaaaaaaataatcgcaagagaatccaaagataaaagaagaaaatggtccttcttcttataaatgttccttattatatacaaagaatcatttaatttcgtaagcattgatatttttacaagattggtcaaagtctttgcgtgcatgttctttagctttgattttccgcctgaaaaactaccttttgttcttgactctattcttatagaacagaatcggtactactgatctaactgacgtaatctgacactttactctatttggttttgtgacaaaatatattgtgaacaaaaaatgtttgttgtggtccgtgatttataccattgttctataagttctttactatatagagtctactaaatccagtccctctttccaaaatgattacggatacaatcacctgttatccacaagtttgaaagtacaataacatttacctctcgcgtttaaccaaaattgaaaatttattggaaagttgaaaaataaaaatgcataaaatcaaagaaatgctgtaatttatgatttgtgggactaatgttacaaatgtaattgctagacgctatactgtgcatgtaccaactaccaagttataattttttaagaatgtggctatatgacttacgaggtacccttttccttatctataaactccgttttgatttatgattccatccgaagtatatgaataagcaagcaataggacacaacccactaaaaagaaaaagcaatacttgtttgaaacccgttaaatcacaaatactaaaatttgaaaacgaagatgcatctactctgcatagacgaacataaatattggttgcttttatgtataacaaaggttgtaaaaattattttgaaaaaagcttgtaaaaatggtagaaacgaattaatttctaagatatgaaaaatctcaaaaaaaattcagaagttaaattttttatatatcaaaatcgtgatatcaaacaattttaattttttcagtcagttttttttccttcaattttatatatatttcaagcggacacataatcccctataactataaaattttaacatatatccaactagttatgaaacatatacaaataataaatatgttaatgcaaactgaacacaacagatcatatatatcactaatctacatatacatttttgtagccattttgtgaaataaatcctggagttagaatttatttacaatggctgccactggatttaaattatttgattttttttaattaatggtttgaatctttatacgacaattaattgtgtaacaaaccaaaaagattctaaatatatggcaatcccatatgtcacgcaaaacacaataatttaacttctccttatctcacctacaatattcactaaatcttaaaacaaccaaaatttgaactatttaaattatttgtattaaatttcggcaataaattaaaacaaatgtgaaacaaaccaaaaaatacatttacgattccggaaaatgagcaaacccaattatatgtgcagctaaaaacattctttattttggtttggatattccatggaattaatagtccataacttttttggcataaaatcataatcacaattaattccacaactaatatttaaacttatagaaaaaactaaaatatcatgagacgaaaaatatagcgtgacggatttggattgatatgaaatatagcaggactggtttagattgatataacacagattaaatatttattttattattttatcatcaccaaattttttaattacaatatcaatataaaattatataattttaatactaaactaaaactttaaaatttaatattattatttataaaaataaaatatttgccctgtggtataccacgggttaaatcctagtatataagtaaaagactaaatgaatatcaatatttacacaatcacttcacaaatttcggtatctaatattgtattttgaggttcacactgatctcattagaggctattttttcaagtgactaaattttgtaatgatttgcatattctacataacttgctttatccaaaggtgattttttttttcccataacccgtacacgtttcctcaaatatatcttactaatactataatgtatttctgaattagttaaaatttatacaaagtggtttataaagtttttgtatggatttagattaattcattttgagcaaagtgaaacgaaattcaaattttgtatggctgaataggtttcaattcaacttgaattataatctatgaaatcctattgacgaaaaaggaaaaaaaaatataggtttaacattaaacagaaacaaattagcttacaatactttctacaagtactttataacccttgataccttttatcgtaacaataagtaacgtgaaagatttatgttgatataaaaatagctagctctattcacgtgaaagctttatgttgatataataattctcccacattaagtaattaattaaaataaaatattaaaactgtttaatacaaccaaagtagtaaggcgtaaacttattaaggaacgcgtcttaattacctggttttaggttccttaatgcttgcttgcttactccatcataaagtttgtagataatgtctaatattggaaaacgaaaatggcatttcttctagttggttgtagtcagcttaacatctttgttaatagaactttatctttacatcgacaactaaatttagaaatattcacctacctataggtatactatataaatgatacccaaagaaagtcaagtgacttctctagtcatggacggttaaggatatatatgccttaaagtttgtatgaatttagcatatcacaaaatgctttttctattgttgcatgaagcatccaatgtcagattttggaagggtctctaaaatttatttcaattaatagattttgtggatgaaagttttccgtaatctaatacatactagttatgcatgcatgatttggccgatcatcaatagaaagtgataggcaacataaatggaggattagaaaatgcttgtgaattaaaaaaaaaaaaaaaccataatgcagcttataagcagtttgaaaatgtcatgatttgaattacaaaaaaattggttttctcataatgagttatcttatattatccttttagaataattgtatccctactaaaaaaaaaagattcgattaaatttcaatatggattaaaggaagggatgattactaaaaagtctagaatagcccaaaaaaggaggttttacaactagagtggcacacaaaacttgtaggttaattcagtcatttctatctccaaaatagctttgaggaaaaatagaggactatgttgaatttgtaaccaagtaaatggtttttcctttacgttacgtttagaagattttagtaatgatgctattatgagacggttagaaacagttaagagagaattggttacattaacggcgttaaaaatcaggtgtattttcaatgacccgcaaaagtgtgaccagagtaaagttccgtttagtatcggcgttatttaacgacgacgttattgttcgtttgcaatataaataacgaaagacggttttcttggagcttgtgcactctctgtcactcattttccctttgtttgcacaatggcgacgtcatctctgaaactgaccagtgcttgtttcgtcttgctcttcatcttcgttggctgcgttctcacagcaacaaatctccgaaacaacgaaatctctcgatcgaggtgcacatttataattcttcgtaatgaatgtctctaatctatactcgtctctctacctaaatatatctcttttctgtttcctctagttcacattttaagctacattttcattatttcatatgttttctcagtttttcttagcattatcatgcttgatttgaaatgttgtacacttcacataaacgaattttctcgtcccttgaagttttcctatgtatatttaacgtatgtctcttttatgcgaatttttaaagtagtctcggagatttaagctatggattttgaacttaaaactaatcttttttcctcggtgattttttttctataggaagctgaaaacagaggattcaaagagctttaacagttcaccaatgacgactaggtaacagataatcacaccattaatagccgtcgattccaaacgtcagatatgcattttaaaccgttggattaacgaaatttaccctcatcatctgtttttcaaacattcctaagttattagtcccaaaaaaagtataatgataattcatccataagaaagtaaacaaaaaaggatccaacggttgagatttagatgcatcggatccatatttttatcaacgacaataagattacggaatttagtaaatgtggtttattactttgcgtgtgaaattgattttaaagaagtttaattagtttttttttcgggggtgtgtttggtaatgaatttgtggttggttgcgtcattcaggcttgatggtgtagtagagttgaatgaacacgcagttactgatccagacaaagttgcccatgaagtctctaaccttattcacatgtgagtttttttttatgctttatctctctctacaacgcaattgctatgtgtgcatttatttcaactcctttggaatgtttttttctttctcaaattagaaattcttctgcactagtcgtaacgtctttatgagaaagagaaatatacaatcttagtaaaattttgactaagaagttttcaaacttcgtttggttggagtcactaatgaatgagttagtgatgttattggtcgtgtacgattgagactttgtggagaaacctaacaaaatttgtctgctcatttattaactttttcatgagataagatacacttttagtagtactattatcttaagatttatcagcataagatagataaataaataaaacattataaatttcaggagtgaacagaacatcactgcaaggaggaagcttggcttcttttcatgtggaaatggcaatctaatagatgattgttggcgttgcgaccgcaactggaacaagaaccgtaaacacctagcggattgtgggatgggttttggaagtaaagcgtttggtggtcgtaatggaagttactatgtggtcactgaccatagtgatgatgacgttgtgaatccaaagccaggaactttacgtcatgccgtgatccaggttgaaccattatggatcatctttaaaagagacatggtgataaagttgaaacaagaactgatcatgaacagtttcaaaaccattgatgctcgtggtgccaatgtccacattgccaatggtgcttgcataacaatccaaaatataaccaatgttatcgttcatggcttgcacattcacgattgcaagagaaccgggaatgtaactgtcagaagctcgccaagtcaggccgggtttaggggaacggctgatggtgatgctattaatatatttgggtcaagtcatatttggatcgaccacaactcgctctctaactgtactgatggtcttgttgatgttgtaaacggttccactgccattaccatttccaataaccatttcactcaccacgatgaggtcaatcaaacacctaaaactttctcctttatttttttttgtaaaactctgttttttcttgatcataatgatattgtggagcaggtgatgttgctagggcacaatgattcgtacacacgagacaagatgatgcaagtgacagttgcgtataaccattttggagaagggctcatacagagaatgccaaggtaaatctacaatgtaacattgtgtttaactagacttatattacttgcaatacaagttaagaaatacattttgagtatttatatgcaggtgcaggcatggttatttccatgtggttaacaacgattacacacattggaaaatgtatgctattggaggaagtgcaaacccaacgataaacagtcaaggcaatagatttgctgctcccaaaaaccactccgccaaggaggttcgattcttccgtgtttttgcgtgcttataaacagagaaaatggatctttaattccaaaatatgaaactgtacaggtgacaaaaagattagacacaaaaggtaatgagtggatggagtggaattggagatcagaaaaagaccttctagtgaatggagcgttttttacaccatcaggtgaaggagcatcaggagactcacaaactttaagcttaccggctaaaccagcttcaatggtcgacgcaatcactgctagtgcaggtgcacttagttgccgtagaggcaaaccttgctactagtaaaacattactctctcaacccattagtagtttcagtatacaaaaacaccaacctaacccctttcacacgtattagcaagtgtgcaaagctttatacttattttgaatggtagagagtttggtcaacctcggcttgacaatgagaaagcaactgaagcgttgatccattctccaacatatgctttttctttttggtttggggtttatgacgtcttctattattaatctagcacttcttgtggtatttggttagtgatttgtagaaaaaaattacatttgctaatgaaattaagccagttgattgcttatgatgtctgcagctaaacatagtaaatgacttttctttgttcttccaagttatgtgtttgttgttaattcacattggtgcagctatgtttttgtgcagttgatttgagtgaggagtgagattacttggtaaaatagtgggcctatatctggttacgaaaggcccattagtagcccattatgttttgtccgtttcagactaattattggtcttaacttaagtatattacccacatacgaattctgaacttagaataagccaaatgcatttgaatccaaagtttgattgattccttgaaaagttaattagtacgtgtcgattttcaaaatactaaaaacacaattatataatcttaaacagaaagttaagtataatgtttaattaacataaatatttaaattgagggagtaagtaagtggtaatgttaaaaagaaaaaagaacattttgggaaaataaacaaaaacatggagagattcgcacaaggagagactctcgaggcaaagacccttgaaacaaggcaacacttcttatttctttatttctaaaaactgcgccgtttaagactcttatggtctttttctcctttatttcttttgtttacttgtaataatggcttgtggtgcgctaattattctatgaactttgcttaatttattaaatttttcaaaagtaacattaatacgtattagaataaatatttcaatgtatgtcatgtgccggtaaataaaacattttttctctctctacgataaaaatccatacttgacaactttgcatagattacttattaatttgtatttttattttttcaggtataactaaacttattacagtaaaacatgaccaaagtttttcgaaaaaagtaataaactaatcgtaattcaatatttgacatgaccaaaatgctgataagtaataagagaaaaagagttaaagaaaaaaaaacaatttgggattttaattcaatcaaattggagtttaaagtaaaataaaggtaagaatcatgagagtggagaattagggtaggtgagaatgagtgaggctcggtgtggtcacgtgaggtatcctcaaaatcagggattgttgttttgtccactacactccctaaacctaaacccactcatcctttgcttaacctatttcttaatactatgattttagtaagttttctatcaataactctctttctttttgcatacctttttggtcaatattttgtacttataagttttaaaaattggaaagagtgtttattttaaatatatgaatagaaatttgacaacaagtcaagctacatcttaaaatactttttgaaaaagtgatggaaactcggaaaggaaacataattaacacgagattatgttaatgattttatttctcagactgtatttgtattagataaaaaatcaataaaccattagaaatggaaaaaaaaaaaatgaaaattcattggatctagcaaaaggttcaagtctagtcatcttatttcaaaggattcttaatgtgtgaaataaacagcaatacaactatatctaatttatagagtaaccttgttttcttaagattacatttcggctcaaaggtttaaagtcaagaagataacaactatagaaagaaacagtaagctactagagtattaactaacatatacaataaaatatactcaagtagaaacaaagggaataaaaacgaatcactgattcaaccacttgcttggggtttgagcaaacgcactcgtttacttacaggggattaagctaaataatttctttaaaacaatcttaattaactgatccaacagtaacataaataaaaatacttatacccataaatttacgtaccaacgcatatatatcagacggctattgagtccagttagcacaaaactgttggaatctcgataatagcatgagcaactagttatttttgtataataaactacgatgttatatagtatataagtagataaaacattctaatctcgaagtaatatttatatacacttttcgattaagcataatttggcttgttttagttttacttcagcttagtcctaagagatgaaactgaacttttgtagtttttacttatatcttttacaaatttaaccacattatattagatcgacaaaaggggaattaaaataagatataagtatgtacattacatgattcacgtaaactataaattacactgcacataccactagtggttatatcaccaacaataagcatgtatccataggtaattttgtactaattctagctatttaacaatagaattttctttttaataatttttatccggaattctataccgagataatcatattttttcttgaaaactatattgattagatatttacatagtaaaaaaaatagaatatttccccatattgaagagcattttaattaaccaaaatttttttgttacctttaccatgtctttaaccaaatatgtttagctatttacttaatatcacttttaaacatcttaccttacgactatttcgtttagttagatatgtttctactctccacgcaatgtatatgtataataatactaaagaaaattagtactaaaatattactggtaaagaagagataggccataaataggtgaggtggcaaagaggtggggtggtgcagttttgttgatctcaaggcattgtgtttccctattttcctttgtactctttctcctctcttaaatcgccactccattattttaaatttcttatcttgataaaacacacacacacacaagtattagaagaacttaaaccctcttatgttctcttcctaagcttgagtttaattcaagcaagaaacagatttcgagagaagagtaagcacagagatagagagaaagaaggcaccaaaccctaaatgggtctaaacccaagattttaatcttcttttcgtattttgaggcaaatgtctcttcattccttaatcttcttctcctcctcttcttcttcacttctcttctctttcttctttatcttcatcttctgtttctctctctctgatgcagagcagaacccggaagcttctatcctttactcatggcttcactcttcttctcctacaccttcttctctttctctcttcaactggaactctatagacaacactccttgcaacaactggacatttatcacatgttcttctcaaggtttcatcaccgacatagacattgaatctgtccctcttcagctctccttaccgaagaatctcccagcgtttcgttctctccagaaactcactatctccggggccaatctcaccggaactttaccggaaagtcttggtgactgcctcggcctcaaggttcttgatcttagctccaacggcttagttggtgacattccttggagtttaagcaagctacgtaacctagaaacgctaatcctcaactcaaaccaactcaccggaaaaatcccaccggatatcagcaaatgttcgaaactcaagagcctgattctcttcgacaatcttctcaccggaagtatccccacggagctagggaagctctctggtctcgaagtaataagaataggaggaaacaaagaaatctccggccaaatcccatcagagatcggagattgttccaatctaacagttcttggtttagccgagacaagcgtctcaggaaacttgccttcttccttaggtaagctcaagaagctagaaacactctcgatatacacaacaatgataagtggtgagattccttctgatttagggaattgctctgagcttgttgatctcttcttgtacgagaatagcttgtctggttccatccctcgagaaatcggacagctaacgaaactggaacagctgtttctatggcagaacagtctcgttggtggtatccctgaagaaataggaaactgcagcaatctcaaaatgatagatttgtctttaaacctcctctctggttcgattccaagctccattggtcgtttgtcttttcttgaagagtttatgatcagtgacaacaagttctccggttcaataccaacaacaatctcaaactgctcgagtcttgtccagttacagctcgataagaatcagatttcaggtctaataccgtccgagcttggaacactcacaaagcttactctgttctttgcttggtctaatcagctagaaggaagtatccctcctggtttagcagattgtactgatcttcaagcattggatttgtcgcgcaattcgctaaccggaacaatcccttccggtttgtttatgctaaggaacctcacaaagcttctcttgatctcaaactctctgtctggttttatacctcaagagattggtaattgcagctctttggtgagattgaggttaggtttcaacaggatcacaggagagattccttcgggtattggttctcttaagaagataaactttctcgatttctcgagtaataggctacatggaaaggttcctgatgagattggaagctgttcagagttacagatgattgatctcagtaataactctcttgaaggttctttgcctaatccggtttcttcactctccggtttacaagtacttgatgtttcagctaaccagttttcaggcaagattccagcgagtttaggacggcttgtgtcactgaacaaactaatcttgagcaagaacctgttctcaggatc

SEQ ID NO: 1046 - DNA, 40018 bp, Arabidopsis thaliana
tgttcttgaagaaacctgcactgttttgagatctaaagtttgaccatttttgttgcagattaaaacaatgcctgaagggaaattaagatcaggagtttatagatcattcataatgtgtgatgatccaagagatgttgttgaatgtggagctattaagaaacagagtaagagccgtagtagtagtactaaacagagatgtgaagaacatctttcgaaagtgaaagagcggtccgaaatggcggtggcgcctaggaagagtagtagtacagaggatgttcctccttcttcgttgcagcttttgagagtatccaaagggattcagaaattgaatgttgcaattgagtcattgtctaaaggttttagctttgaggcggtgtcaaggcctgaggatatagcgaaagatctgttgagaggagctcttgatttggaagagtctttagctatgttaagtagtattcaagaagatgatagtaagcggaaaccgatgattcggaacgatggaagaagcgatttgcggtttcaaagatcgatgtctgatagattcggagagcggattgagaaacggatgatggttcaagagaatgtagcgtctaaggattgttatgaagagttaaggaaagtgattagagagagttttcttaggcagaatcttgtttcacaaacaactactatagagactaagaaacgagttgttagaagtgattttgcttcctcttctggagctgtgtcgtcgtcaactagctcgagccaatcttcaatggtttctggctctactaagtcctctgcttcgtctgatgttccacagagagctccaagtttgattgctaggcttatgggtttggatgtatcaactcaagaaccgaggaaaagctcggtgaatcatatcgataagccggatattttaaagctgtcatcagaaagacaagagaaggtgaagaagaatagtaaggagagtcctgaaattgtgagatgcaactctacaagagaagctgctttacagtctttgcctgaagagactccgagcgagaatccttcgactatagtactcatcagacctatgcgtgttgtaaaaccggaaccgggaagcaaacaaccggttgtaccaaagaaaccgagaatgcaaggggaggttcatccaagaatgattaaccagagaaaagatcatcaagctaatggaagcaacaaaatgaaattaccattacgtatgaccaagaaggacaaagaaccgaaagaaatggtgcctaaagtagaagagaatgaaggtaaggtcatcaagctaatgtctccaagcaatgccaaagttctaacaagagatcgaaaaccgttggaaaccaacaaaaaacttgttgtcaagaaggatgatattgctgaaggcaaagacagacatagagctcttaaaccacccagcaatcctgtgagtcaaaagatatcgaacaattcttcagacgtatcaagaaacaagagtcgacgttccagtaggttgagctcaagctctagtagtggtagccgggaaaagaagtccggtgaggctagtagaccaaatgtgagcaatctttctcactgcctcaatgcataaacctttacatagtttctttaacattgtttctcctttaggccaagaagaaactccgtcaacaagacaacgacctcggttcagagaataattcatgctcttcacaagagacgcatggatcacttaaccaactgtctacagaggaaaccacttcttcagagtttcacaatcaaggttattactacagttctcaacgctcagtatattcttaaagtttgtttcttttgacaagtcttctcatatatactatgttgctttgttcttgtaggccattgtgacaatggagaagtttcatcatgtgctgccacaattcaccattctcatgagccagaaacatcccaaatctctcttaagtcattcctatccacctcctcggatttcatcagctacgcagaggatctcttcgacttcaacaccaacaccgaacgaagcagagaatcaaactttcgaagaagagatagcattgtgatctcagaccaaagactagcactagactttgccaaagaagtagtcagacgcaaaagccttcttctagcagaaccaacgtgtcacacacgaagctctttggacattgatgagttgttgacagaagtctgtgatgggtttgagtctctgacaagttacaaagacacgttttcaggacaaaacagcttcgttaaagagagcattcacttggtgttggagaaggatttaaagggtaagaagacagagatgacaagtggagtttgggatttgggttggagaagtgagtttcagattgatgaaacttatgaagctgtagctgacttagagaaacttatcttgtccggtttgatccaagagattatctcttgagtccaccaaaacaacgatcgtccactttattttgtatgtatctcttagtttaatttttgtaatttacattctttgtaagcagttaaatatcagtctaactaaaattttagtaacgtgtatatatattgcttcacacaaactactaagtgttgggtttaacagttttagcacttgacaattaaagtgttactcctccgaatcatgagaaaaaaattatttacttcatcaccaaatcaaagccaccctgatttgtttacattaatgttattttggaacaaaagtgtatattatatgtcacaatcaaatcttccctttattttaatttttatttttaaattagatatatataaattttgttgacaaaaaataatagatatctacgaatttaaagtttgtgaatcagaatatgagttaaaaatttcatgattaaaatatgtaagttttatttttttcaaaaaaaatcagaaaatagtattaaattataattaatttgaaggaaaactatcataaatactcaattgaaaattatttggatccgctttagagtcttaatagttagattcaaatccagttttggctcgtttaaaatccataatcacgcacggatcatgatttttactacacacaacaacaactcgagtttatcattcttcaaagcataacattcttcaaaaaaccacttcttcaaagcttaaaatttctcatggtttttactacacacaacaacaattactcgagtttattcactcttttaaagttttggcttattgttctagagaatttttttacctggatttgtccactataaggcaaatctcctatacaagtagcaaatacgtgaagcctcgaggatcaaaatcatttagatctagagatttgtttctcttgttttggcgagtgaaattgtagtaacatatttcttccaatgggaatggagatgttatggtgaaccaccttatttgtgttgacaaatgaaaagaacaaaacatgtatatatagaagaattcttgaatcatatttagacatgtatagtataagaaataaaattttggttggacaatttttttgaacttcaactactcttcacggatattttagaagaacgatacatatgatcatctattactgtcggttaatttgactttctcatggtccgtaaacgatgggatttttattaagaaacaaaaactagaaaaaaagaatcattacttgaaaaatgtagctttcatttgcatccacatagatatattattctacatgttggtaaacaaaattgtaaaaccaaaagaaatagtagagaggacatggaaataaaggaaaaaaggatttggtcacacagctgtaattagcaaagcataacagaaaacctcacaatgagacaaactcgccacgtctcccccaaaatcgtaacgtgtctccctcacactccttcacggtttccatttttttttgtattaatgtataaatttaccaaaactacaaatcctaattaacaaactaatctcaattcttaattactttatacagaagacaacaaaagagaatcccaaaatggcaagtttatctactgcagctttcctccgcaacaatgcactcaatgcaggtgcaactcctagagttcttctccccgtcacgacaaaacacttccacgtacgtaaagattctttctttttctgattatttttatcacatttttaattaattaacgttattcgtaagttcttgcaattattaatcaaagacgagtacgaggatggagaattccgtttgtgatgaatccaacaactaatgcacaagaaaaagtcgtcattatcaatctcccaagaatatattaggtaaaattagtaaacagaaatgtcacttgtgcaaccaaatattgaaaatacggttttgaactgaaaaaatttggaccggacgtgtagttggcgaagaaggcggatgaaggagcgaagacgatctttgacgctaccggaaatttgaaggataagacaagaatgcagcagaagaaacgttggataaagtgaagtaaaggacatgatggagaagatcaaagacatggtgatcggaaaatccgaggaaaccatagaccatcaaatccactgtcaagagtgtcgaacgaaacatgaatataaatcgtatttcaaaccggatggagtttgtggatattaagtagccggagttagagacctgaattaatatttattgttcataaaatgttcgataagtgatggttactttagaagaacaaaaaaactggctatatatgtttctcaattcacgtactcctgaatgaatgatgaaagtaatttacagaagtttttatatatataaaaaaaaaaaacatttacagaagttttggagtaaccacttaattcttgaaccacgatcgatgatggccacatgcaacagatagaatttctaattctcgaaacagaaataggaataccttcttcttcaaaaattttaaagctggtagcatcatctcaaaaactaaaactatcttatcaccagttacgtcacaaccacacaaaaagagctagtctaattgagggaaatactaaaacttttctgctgacacaagtatatatttatgatactttttataaatagcacatatttatttatacaccatagttaccgaagaagacttgacaaaaatccaaaagaagacaagcattattaaagatattacgatataatttttaatgcaactatatactatcaaaaataataacaaaaggaaagagtaaaaatacgaaacttgtcgtggctgcctgtaattggacaaaactaaaggctaagataagccgcagatttttttttctttacggaagggtttacgtgtagctatattagtcgttaacggaaaaaacaaattgtgtaataatatataatgagttttagcacacaagaaacataatctatatattatagagattatgtttataactttgcatatgcgtatgcgtacgcatatgtactgatcttctatttcttaacctaaaacttttgtatttgatgccttactataatttccctgatcatggacaaaaacatgttaagttttactagatacgttctcatctaactagatacgacctaaaatacgatatttgtggttttagttgttagatgttgtgtcacacgagagaaagaggtcgacgaagaaaaaaacaaaaagaagaagtaaaacgtagttattggcggacaagggataaagattgctttgaagtcagaaatgctgacacgtggcagcatatgaagacaacccgccgcttaaaaccacgaatggtgacgaaaggcttctttgtttgcatgtgcaaccaatctctctctttctctctgtctttactaattttggttgttcgtagaaaatgaaatatttgaacgaagaagataaaggttggtgatgtacgtatgactctaaattagagtttgataatttgtatgtaagattagatcggttttgttatttgcttgatccaatttattgaagtacatgtgaataatcgtgatatatgtcaatatatatgtgctataattaaatctattaacaaatttctttttatcgatttagttacaccatctttaatatatttctattttctattttaaactaaagcatagtttctccaatatattaatttatatatttactctaggatagaattagattcaaaaactagaatagagaatatagatgctctaaatagacaataattctattacttactctattttagagtaaaacatatagtgatgctgacaaaaatattattttataatagagtttagaaagaaaagaaaaaacaaaaaaaacttgaagatgctggaactattaaaaattaaagaaaaagtttaaaatgaataatgctttttattcttagttttttttttcttttttttcttttagttgatgttaaagttttagtcaaatctccaaaatttgcaaaaaagatacattagttacggacggatatatattaaataaattaagtcacaaatatcatatatatatatatatatattaattttttgcctagttttgttccaaataaaattttcaatttttagtgtacaatatttttcatcgtccaaatacacaaacacaacaaataataataccactaatttatttgttttctaatataattgaaccttttctaattttattaaataggctgaaaaccataaattatttggagccaagattaaattatgttacataaatccttttctcgtcatcaatactcaaatttaaatttttttattttcatagatatttttgggaatttaaaatccttccaaataaatttgggaaaataatagatgttttaaaatatttttgttattttcgagtagtttacactgattttacatcactttatggatcaagaccataaaatttaactacatttattataacttatttgaaaagacatgaaactttcattagagtttaggaaaatacggcaaactattagattatcaccctcttgtgactaatgttaatactatttggtaaagcaaataatcccataactaattttattttgatttgttcactatcaattgtatcatagacgatccgatgattaatgtacctaaattttgatttaaattgtattccttgtagtacgcatagtaaaacaaagttcacatgttcttttacaattggttttctaacattttagatttcattttaaactaaagaaaaagggtttttcgatcccaacaatttttaaagtatgtttttgaatttcaacaaacgactagtactgatatatacatcaatgcttacaaaaatcaaattatctatctcaacgtttacttttgtacgtaattacaagtcaatattaacaaatattagtcaactgtaacggttgttgactcaattgatacgtgtacgtttaggtggcatgttttttaataaaataattttgttttatgttttgggattaaaaatatttacttttaaaaaactaaaccgaaaaactggaacccccaacctcacatattcatcaccatcgtatccacaaacattatcgagacataaataataatttatagatatatagcaacaaattggaattaaattaatcaaacaatgtcatttagaattggggaaatcctaaccgacgttatatgattaattttaattccaatttatgtatgtgtatatatctataaattattatttatatattgatgatgttcgtgcatgatggtaatggtaacctttaaaacttttgaatctcaaaacgtaaaacaacgtcatttggtttgaagaacatgccatctcgacgtacaagtgttagctgattcaacaaccgttactgttaattaccataactaacgttgactcataattatgtacaaaagtaagagttgaggtagataatttgaattttttaaatgttaaagtatgaacattactaattgtttgttcagatttataaaacacagtacctattttgatgtgttaaaatgtaatcgggaaaataggaattttcccaagaaaaaaaaatacactaaaattttgatgtgttaaaatgtaataaatacaagtacctatttctttctacaacaggtatcacatgatctgctcaatctcattttgaaggcaaggtcgaaccctgtttgtaactaaatattttacaaatacactaaaagttttgttttgttttcctcatgcagaaaaaagaaaagaaagaagaagaaaaaaaactcacaaaaacatacattgttctacaatatgttaaagtaattgttctagggtaataaaatccgtgtctgcctcttccacttcaataggaaagtgtaagtttttcgaatctttttggccagataatttaaaaccgaccgaggaaacttacttttgtaaaagtgaccatttgcacataggaagtagaaagttgataattggaaaatttataatattttatacaaaagaagtgtttaagaaccaccgcttggtctcaccactcaaattcgaacgtatggctcgtgggcacaaactcctgtaccaacctttagatactagcggcacgaggagacttctattttctctttgtttttaagtttttttatcgacttaaatatggctttttgcaccatttaatttcaaaaccaatgtctttctctcgaggaactttgtttttatttcttagaagatgaggggagatttactatctaaataaaattttaaatgtttgtaagtattatgagctcaacaattttgtcaatagtgccacaaatttaaacgtttgctttttgtcttctttgaaaaatcaaatgctgaaaaactgttacatctctttttcttaaaaactcttgtctctctccttttccttctgctgaggtaattgaatgctgcaaagagaaagagaataacttaaacccaaaattacacttaccgccagaaaaaaaaaagagttcagtttaatctaacatattttatacaatacaattgaattatattagtaaaaaaaaaacttccatataaatcatggaacaaactggaacacatgggctctcttattttaatttattttcttttttgagggatttaaccatgtttattatatagttttataaatatatatataccatctctccataatttataaaatgaaagaaagagagagtcttcttgttggagtaaacccaaacggttttagattacttattagctgttcatcagttcttcctctctaaaagagtaaaacctaaacatctctctctgttctattagaaccaaagaccaatctttgtgaacaaaacacatctcgtatacttcagatctagactcgaaaattttagacctctttacaattggtctttgttcatctgaagttggagaaaatagttagcttaggtcggatcttttcatatgctttggatcctccttcgtctcttttgtataattttaaccttatcaagagttctttttgaatctcaaaagattatatagtagtatagaaggtttatatgtatatgtatagccagatagtttatgttgtttaaagattcgatgatagccaagttgggttaactttctttttccttgcctccttactcacatacaaaccctatctgtccgtacaaaatactaaaaaccctaacttttctctctccaccaatctagtttattgtttcatttccacttcaacgatgaaaagcttgcatgtggcggccaacgccggagatctggctgaggattgtggaatactcggtggagacgctgatgatactgttttgatggatggaattgatgaagttggtagagagatctggttagatgaccatggaggagataataatcatgttcatggtcatcaagatgatgatttgattgttcatcatgacccttcaatcttctatggagatctcccaacgcttcctgatttcccatgcatgtcgtcttcatcatcgtcttcaacatctccagctcctgtcaacgcaatcgtctcctcagcctcttcttcttcggcagcttcttcctccacttcctcagctgcttcttgggctatattgagatcagatggagaagatccgactccaaaccaaaaccaatacgcatcaggaaactgtgacgactcttctggtgcattgcaatccacagcttccatggagattccattagacagcagtcaaggttttggttgcggcgaaggcggtggtgattgcattgatatgatggagactttcgggtacatggatctacttgatagcaacgagttctttgacacctcagctatatttagccaagacgacgacacgcaaaaccctaacttgatggaccaaacccttgagagacaagaagaccaggtcgttgttccgatgatggagaataacagtggtggagacatgcaaatgatgaattcttccttggaacaggacgatgatctcgctgctgtgtttttggagtggctaaagaacaacaaggagactgtgtcggctgaggatttgaggaaagtaaagataaagaaagctacgattgaatcagcggcaagaagactaggcggtggtaaagaagcgatgaagcagcttttaaagctgattcttgaatgggtccaaactaatcacttacaaagaagacgcaccaccaccaccaccaccaacctctcttatcaacaatcattccaacaagatccatttcaaaaccctaaccctaataacaacaacctaatcccaccgtccgaccaaacctgtttctcaccttcaacatgggttcctccaccaccacaacaacaagcttttgtctcggacccgggttttggatacatgcctgctccaaactatccgccacagccagagttccttcctttacttgaatctccaccgtcatggccaccaccaccacagtctggtcccatgccacatcaacaattccccatgccgccaacctcgcagtataatcaatttggagatccaacaggtttcaatggatacaacatgaatccgtaccaatatccttatgttcctgcaggacaaatgagagatcagagattactccgtttgtgttcctcagcaactaaagaggcaagaaagaaacggatggcgagacagaggaggttcttgtctcatcaccacagacataacaacaacaacaacaacaacaacaataatcagcagaaccaaacccaaatcggagaaacctgtgccgcggtggctccacaacttaaccccgtggccacaaccgccacgggagggacctggatgtattggcctaatgtcccggcagtgccgcctcaattaccgccagtgatggagactcagttacctaccatggaccgagctggctcagcttctgctatgccacgtcagcaggtggtaccagatcgccggcaggtagacatgcacaatcatctttctcattgtttattctttaatttagcaatactcgaatagtttgtgtaattgcaccactcgtttggtttgatgaagaagctaaagattttacatgtgttttttttgataaaatgtgaatcggaagattatacatttgcaatggaaatgaaatgattttgatctttttggtttgattttagggatggaaaccagaaaagaatttgcggtttctcttgcagaaagtcttgaagcaaagcgacgtgggtaacctcggaaggatcgttttgccaaaagtaatttttcttctaatttcttgtagcctttgctttccattttctaaaaaaggttcaatgtttgtgtaaaaatattgtcaagtttttattttatttttactcttattggttaagttatattttactgaatttttattttttttagaaagaagctgagacacacttgccggagctagaggcaagagacggcatctctctggccatggaagacatcggaacctctcgtgtttggaacatgcgctacaggtaactgattatgatgctaacatgttaacattgattctttttataaaaacaattcgtgtattttgtcaaaaattggaactcgaccaaaatgttttttcggttatttaattgtcttcttaaattggttttgcaggttttggcctaacaacaaaagcaggatgtatctcctcgagaacaccggtacgtttttgaaaatgtacccgttaataattttcctttcttttggtttgtttgttctcttgtaattattgttgtggacgcatacatatctaattttccttgaaattacgtttacaggcgattttgtgaaaaccaatgggctccaagaaggtgatttcatagtcatatactccgacgtcaaatgtggcaaatatgtaagagaagcatcacaatatttttctatacttttcattagtatttaactctcatcattacttttgttggtatttatcttgtcataattaattgagaataatattatgacagttgatacgaggggttaaagtaagacaaccgagcggacaaaagccggaggccccaccgtcgtcagcagctacgaagagacaaaacaagtcgcaaaggaacataaacaataactctccgtcggcgaatgtggtggtcgcttcaccaacttctcaaactgttaaatgaaaaacagagacaaaaagaaacaatataaatattattatgtaccaaataagaaagagggcaaaaggaaaaaatggcagcgtacccgagtgtgccacttctcgtgcatgcatgggatcttgaagacaaatggagggtcatgattaaagctgtttggtcggggtccgggtttttactccattttttgctttttcttgtcgagtcggttcttttataactctttactctttttaccttcaggatattgtagagatgattaattctggaaatggtgtttgtgttatatttctggagagatgattatatagttcttttgttgttgtaattggttaatattacatatgtggctcatttcttgagtcgagcttacatatcgtttataatgtgaatgttttaagaagagttgaatgatacaatatttttacacaaacattgataatgataataaaaatgataattaatgtacaaaattatttgtaaatatggacatatggacaatttaagaaggaattgagataattaattttgtacattaattatcattatcaatgtacaaaattatttgtaaatatggacatatggacaatttaatgatagtaaaaatgataattaatgataattaatgtacaaaatgataattaatgtacatatggacatatgtacaaaattatccatatcattcacatattcacattgtaaatatttgtaaatagaatgtttacatatggacattttaagaagagttgttccttaccactttgattctatcattttcttgtttatctagttagcttgaaccctttgtattattgagtaacgaaaatctttggaggaaaaaaacaagtgaggtaggattataattttcctcatataagtgtgttgtttgtgatacatcattattctttcttatttttggttaaacccaaaaactggaccgcacctaaggaattgagatattcaaaaaaacaatgatctgacccgtgccaaatatccacaccacacctttctccattcaggccctactagaaagccgtgagacggttgacaacttgaaaacaaaagacttataatgagactatgagaaacaaaaaagaaagtggagttgatgaaataatctgatcttatgaaagtgaagttgattacaaaaggagcagcgtggtagttgaatagtttcagatgttgataaagacgtgacatacatagttgtctcagtaatctaatcaaggactcctcatgtttctaacttcttcttctataaagttgcatgagatttatatctggagaacatatattgctctaattatgtggtcttattatcatcaatatatgcctttttctacatatgaatatatgatcgacatgtatagatattttttgttgttcaaaaaaaaaaaatgtatagatatttttttcattttccaaaaggattgaatttcgaaatggtgtagccaccttagaggtatacaacaataaataattttcccgacttgtaacaaatgtttggaacaaaagtgtcaattagaatcaaagtaaccatcagatgccttttataaatttctttatctatgattattttttaaccaaattcagacacttctatattactaaaagccaaacttgatatctatttcaacaaaaaaatttttttttagtctgctgtgactcagtatatctaattgttttcacatcattcataaacttttactagtccattgtaaaatacagtatattagaaattgttttcctatctatatatgcttaggtttaagaaaacaacttttggccatgaatatttgagtttttaagtggttttggattatagattttgccaaaaggaaaaaatattgatttaaaattacaaaaagaaatctgcaaacaattatcaaaaactcattaaagtgggatttatttttcattttgtttacaaaaatgcgaactctaatcttgattggataattaaatgggtttttggaaaaccaataactatgctataaagtataaactactaccattcaagccttctatttttctatgccaaaaaatactacgcaaaaaaaattgagcgtgtttgatccaacaataaaacaaattactcaatcttgtttgatgtcaaaatccaaatccaaaatatgtttcggacacctgaccggtctactcgattgacacccctgaaatttcgaaatagacaatacacaaaaggacatagacaacataacttcatctcacttagatattcacatttcccatttttcaaaatattggctcttcattttctgtgtacttccaacaaattgtcttctagagaaaccaaaactatctaagatttctccaccttctccatcatccaccgttgattcactcatctcatgtctccaatgactcatctacggtcaagattcaaggagcatgaaacatcccatgaaccaaattacacaaaaacatttaccttgataaaaaaacatcattttattattttggcagaagaaaaagtcttaattcgaactttgagcgtgcttatagtttaatcaattaaagttataaagaaaagtaactttataaattcaggagtaatcagtagatttataccattcttgtccatcgctttaagccacacttgatcggacggtaagcaatcaatccggtttacactttctgattataaagattccaacttttggttatatcggacggttaataatcaatacggtttgagtttaaatcatagccgttgagatgtttgactaaagtgtttacaaagtagtcaacactctctttctgctacaaaggaccagtcttgaaactcaaagtccttacctttcccttctctaacctctctttctctttctctgtctctttgtgagaaatgggcatggaagctttgagatttcttcatgttatcttcttctttgtgctaattcttcactgtcattgtggaacatctctctctggttcttctgatgtgaagcttcttttaggaaaaatcaagtcttcactacaaggaaacagtgagagcttactgttgtcttcttggaactcctctgttcctgtttgtcaatggagaggtgtaaaatgggtattttcaaatgggtctcctcttcaatgtagtgacctctcttcaccacaatggactaatacctctctgttcaacgactcttctcttcaccttctctctcttcagcttccttctgctaatctcactggttcactccctagagagattggtgagttctctatgcttcaaagtgtgttcctcaacatcaattcattaagtgggtcaatccctcttgagcttggttacacttcttctctctctgatgttgatttgagtggtaatgccttagctggggttttgcctccatcgatttggaacctctgtgataagcttgtctctttcaagattcatggtaataacttgtctggggttttgcctgagcctgctttgccaaattcgacttgtggtaatctccaagttcttgatttgggtggtaataagttctcaggtgagtttcctgagtttataactaggtttaaaggtgtgaagtcacttgatctttcaagtaatgtctttgaaggtcttgttcctgagggtttaggtgtattagagctagaaagtctcaatctttctcataataacttcagtgggatgttgccagattttggtgagtcaaagtttggagcagaatctttcgaagggaacagtcctagcctttgtggtttgcctttgaagccttgtctaggctcctctaggttaagtccaggtgctgttgctggtctggtgattggtttaatgtctggagctgttgttgtggcctcgttgttaatagggtatttgcagaacaagaaaagaaagagtagtatagagagtgaagatgatttggaagaaggtgatgaagaagatgaaatcggtgagaaagaaggcggtgaaggaaagttagttgtgtttcaaggtggtgagaatctgacgttggatgatgttttgaatgctactgggcaagttatggagaagactagctatggtactgtctataaagctaagcttagtgatggagggaatattgcattgaggctattgagagaaggtacttgcaaggatagaagttcttgtctgcctgttataaggcagttaggacgcattcggcatgagaatttggttcccttgagagctttctatcaagggaagagaggagaaaagcttctcatctatgactatcttcccaacataagcttacatgatttgttgcatggtattttctttcatcatcaatcttttttgccatggatctttcttggttgatttttgttattcatgtgttgtttgaatgatgtgcagaaagtaaacctcgaaagccagctttgaattgggctaggagacacaagattgcacttggaatagcgaggggacttgcttatcttcatactggacaagaagttcctatcatccatggaaatattagatcaaagaacgtgcttgtggacgactttttctttgcaaggctaactgagtttgggcttgacaagataatggtacaggcagtagcagatgagattgtctcgcaggcgaaatccgacgggtacaaagcacctgaactccacaagatgaagaaatgcaatccaaggagtgatgtttacgcctttgggatccttctcttggagatattgatgggtaagaaaccaggaaagagtggaaggaacggtaatgagtttgtggacttgccttctttggttaaagctgcggtgttggaagagacgacaatggaggttttcgacttggaggcaatgaaagggattaggagcccaatggaagaaggtttggttcatgcattgaagctagcgatgggatgttgtgctcctgttacaacagttagacccagcatggaagaggttgtgaagcagttggaagagaacagaccgaggaatagatccgcattgtacagcccaaccgaaaccaggagcgacgccgaaactccattttgagtctaattgtgttcttctacaagctttttttttcttctgtaattcctcactttagttggctatatttgtttccttggcaagaaaccattctgatttgattttatctatatttgttgatgagaaatggtgtaagtgtaacagaagcagttcaaagtattaatattgatagaagaatatatgatacatgatgatacaccaaatgagtaatgaggcagaagaagaatgcactgtactacaattttggagttgagtcgaacaacactgcggctcatcaaagctggcctaggttgacgagtggaggcagagaagagtctaaaatggtaaaagagaaaagaaaggagacgatgaaaatgtaaatgacggggacgaagaaaacaagttagttttcttcctttgtctccctcagctagtcagtatcctcttcggtcttgggtttgaggattatacaattaactaacaccgcataccgatcctgcatttaagggcaccggagctgtaggtaagcatacttactacagaagctggtttagctcccaagctagaggctctggcatagcttgcaggagcagcagctccagatttagtgaagtaggcaccgttgagcattaggtctccttgagatctccagttccattgcttccattccccttgccatgaacctaccctctttgtcacctgccaaaaccattacaatattgagattcatcctttctcaatatctcctactccgaaagagagaaattaaggtatacctctttggcgaaagggttgcccggggcaaggaaacgattgccttgactattgatagtagggttagcacttccaccaattgcatacattacccaatgagtataatcattgtttacaacatggaaataaccatgtctacacctgaaataacaacaaaagaatcagccctcctgattcttgtagcaaacaatcatcgaaaagaaaacatgaaatgcatgacgaacctcggcattctctgtataagcccttccccaaaatggttatatgctattgtcacttgcatcaacttgtctctagtgtacgaatcactatgccccatcaacataacctgcattatccatcaagaaacttcttctcaactctttaacacaccctacacaattcagttcactatactaactaatttagctactaaatcaaccaaaatccactccaaaaacgtgattctgcagcaaattcatcatcagttccactgaatcagcaaagaaagctaacctcgttgtggtgagtcatgtagttattggagatagtaatagcagtagatcccataatagcatcaatcaaaccatcagcacaattagacaaagagttatgatcaatccaaatatgactcgatccaaatatcgatatagcatcaccatccgccatagtcctccacccataatgcgacggcgagcttcgaaccatagcattaccagttcttctacaatcatgtacattaatcccatggatgataatattcgtcacatactgaatcgtaatacaagcaccgcctgcgattgcaacgttcacgcctcttccatcgattgttttgaagctgttcatgattagctcttgagttagagtaatcaccatgtctcgcttgaagacgatccataacggacggtcttgtatcacagcgtgacggagtgttcctggtcgtggattaaccgcgtcgtggtcagatggatctgtgactacgtagtaacgaccatctcgtcctccgatagcgttacgaccgaatccgatcgcgcaattcgcgagacgctttcgtcggagatgccaattccgatcacatctccaacagtcgtctattgggtttccggtggcgcatgagaagaatcctaacctcctccgctctgtactgttctttattttcctgaaaataacaaaaagagaacagagttattaaattgttacaaattgacccgtgaagtttttattttcctgaaaataacaaaaagagaacagagttattaaactgttacaaattgacccgtgaagtttttgatttcacattaaagccctcttggagttcaaaaatcacgtggaggagaagaaggaaccatgtggtgtaataaatgtaaaccatttatacggaatcatatgatacggaccatacggaaacttttttatatcattctttttaattttattttaactttctatttttgtgatgttttaaataaatgttagaacgtaaagaatctgatatattttatggacaaaaatgtgtatacattaattacaaaattttgcgtcggtgggaaaaaaaaatagcgacgatagaggcgctttaaatggcgatcacggcgtgtctgtgtcacattcacatatagacacacaagttgtacaaaacttctggtctaaaaagaggtttaaatcaaaagagtgtagaattaaacatttatgggaacattatgggtgcaatttaattatatttttgggtgtttcctatgtaaattaaaatttaaggaatcacacaacgtttgactatctgaaacgttgttattattatgaaagtgagatgtacataacgtatattaattgctaattaaaatatgttacatttttgcataaaaaccatatacttgtataataacaaatgaggatagagagaggtcttacatatcgaccattgcagctacttcttctgggtttttaactgcgtgttcattccatgcaccgtcgtcgttaggtaacctgagaaaacatagctagtatattaaaacgacgtcgtttcgaccgtataagcatcgtttcttttatcaaatctggacgacggagattgactaggaagcttaaaactcacttattagccgttgatgaattactcgagctatgagagtttaggtcctctgtttcttgagccctataacacaaaaatgtagagacgaatgtcaaatgttacttctcttgtttctaaaagatttgaaagatttcgagaatctatgaacttacattgttgatgaatttatacataatgctagaatgattagagtcgttgagagagctaagaagcttctgctaaagatcaccattgttggatatatcaaagctctctctcctattgtgtataatgaagaaaaatgtaagaggagagagagagaaagagatgtaattaacttggagaagctgaagaagatttaagcttatatatatatagagagagagtataggcaagtaacgaaggtgtgaagaagcagcctaactccgttaattatatttggctcgagtcttacggtgtgatcagtttctttaacggcgtttgttaactgccgtcttccgtgattggatcattttatttttttggtaggcttccgtgattgaatcattgtttgacttcaaaacattatttccagctttaaaccaaattaatttgtttgggaggtatttagccactttgagggtaattagttctttcttatcaaattcctttacatttcaaaaatcttatagattcataaaatctataaataccactaaaaagtctttaattgtagtaaatggttatttgttaattgaaggtgtatagtgttatgcctccgttttacgatgactgatgtactgtattaatattaaactaaaatttctgtgtataaatggcaaaatctataaatatcactaattttttttagcaaattcataattgattcaatattcagatattcttttactctaaaatgtttacagtgacgaccaaccataatcgaaggggtaatggaagaattgaaacagtgatcccattatctattatgaatgtttaactattagacataagtttaattacatattagataagtttgattactaatagaatttgcacacaaaaaataagaagaaagattactttatagttaattacataatttagaagtttcttatcatcggtgtttcggcctttcgggtactacaaactgcatggttacatgataccacgtctagttttcatgctttatatatattattccctagtttcaatcaaaacgccgacttgatagaatttgaggttaggtagcgttttataataagttttaacgtcgtggttatggataatgccatgcatttattaatgtatttgcatgtcttttttttgttttgttaaaaggtataatgtagtatatttgagtacaatgcatatacccatatatagtattgatgatattatattttgatgtaagaaatgtgatgcagctcaaacttacaataatcttaagcatgtgattttggctaatacgtaaattcaatttctatgaattaaatctaaggtttatatgttaacagaattctaaaatgagtacacgtacgtttcgaaagattaattattttacatttatgccaaccataaccataactaccaatttatattatatttaactatctgcaatgtctagtttttagaggaactacgaatgaaaaatcaaagaacacatgtattttgtggtcgaaatcttaccgtagaaatgataaaatcagttaaaactttacgaaatatatacaaggcaattggtaacaattgtggtttatattaaatattatatatctctatctacttcaattttaattttgttaatagatacaagctgacttcttaaagtttaatatataaaccattgtacagccattgcatccatttgccgtacgagtacattatcagtagataataatcatattggtagcgtcaaatcaggaaaagacatctcattatggataaaactatataagcaatctaaatattacacggacttatatctattgtaagcatatcatttgtgcccccatgtgcatgtaaacttattgatgcttatcaaggttgtcttagagaaaatcgaattcatgaaataaagaacttttgaatgaaaaatgcgatggttacagttacataatttacaagcaccctgaaaagacaatgtaactgaaattttgatttgagagaaatcagtgtatccaaaaaaaaaaaaagagaaatcaatctatatatgtactttattagtagaaaaatatagaattacattaaaaagtatatcatagtatatggaaaaggtgggaagtttaaggagggcattactcgaagcacatttgttttggcattgactttggcatgtaagacaagccacatggccggccggttatcaccgttaatcaagacacatgaacattgcttcgatttattttatttgataatacaattcgatttactttataatccaccgtattatagctgctataaatatttttcgttggttcttgactctattagtttatatttttcagatgaatatttaataagccatacacattttttttttttctgtttttacaatgtcgacacgaaaaaattgcgtcactcgtcaatcaaaagcttgatgtggagttttatattttaaactattatataggttaaactaataataggtgtacattggtcttccaaacccatagtgaatatagttttttttttttcactgaataatgatatattgatgaatattgtttgggatacagaatctttacaaaaagaccaattaaggttacaggaatagtcgggcaaacaacaattccccaaaagaactgaagattgacaatggtcaaaaaccaaagcaaagaaacaaggccttggaagagattctctcaccctcaaatagttgatggagccaccgaagatgtccaaccgctacataagattgaaacctatctcctttaacaatactctgagcaataagagaagctcccctgttagaatcgaccttttcctccgagaccttccaatctccaatcttctccaaaaaatgagttagttctgaaacatgaaaagcaaaagagggccaagctttcggcctggcaaaagcggacagtaagtccccaggctcaaaagcaaacaaaaccttagactgtctgtggctagacatactctcaatagcccacttgacacagcaaaacaaggcatccttcttgacagagagattactgaaggctcttcgactatgtaataacaccttcccatgatcatctctaagaacccaagcaccaccacaaactctcttttttccagaccacacgccactaatgttgcattttacccaacccaaaggaggcggctcccacgaagaaggacaaggagcagagcaaacagtttctcccgcatcaacacttcgaacaagagcttgagcaagaaaccactcctgaacatcatccctaatcttttcaattgattttaaagggctgaaaatggtaccttcaaagaacaatttgtctctattcttccaaagtctccataaaacccatggccaagacttcttaatttgctccggaatcaagcctttccctttaagctctaaaaggtattggatattagcaaaaattgagctattctgaaagccaaactgcgaggtaggaactccagacaaagcccatacttgacgagccaaagagcaagtgaagaggacatgattgatggactctccttcttcaccacaaacttggcaccgagggtcaataggcattccccttctgataatttgataagctaccggtaaagcagagcttaaaattctccacaaaaacaactttatttttggagaagtaagagtagaccagattttttctttcaggccattagttgaaggttgtaccctagcctctctaatcagctccggtttattggtttgaaaagctaaccaatacccagactttactgagtattcaccggatttagaatgtaaccaaacccaaaaatcatccatactcaccactggattcctcttgactatgatctcaatgtcagccgggtaaaacaactcctctagcctatcacgtctcctgcatctatcctcaacattaatgagatcatggaccctaagatctaggttgaccgagaagtgcttttggagagggaggcgtgggtcattgtcatagatccacgggtccatccacacacttgtagagctgccattacccactttttttctaaaacctttgataagtaagtctctcccatgtaaaatacttctccaagcataagaaggtgtagctttcaactcagcatctagaaagtcttcttcatcatagtatctgctcttgaagaatctagcaaagagactatttggaaattgaagtaatctccaagcttgcttagccaacagagcttgattaaaactttcaatatcccgaaaccctagccctccattctctttagaaagacacattttctctcaactaacccaatgtgtcttccttttatgctcaagagcgttccaccaaaaatctgacattgcacttgtcatattcacgcaagtggtttttgtaagcttgaaacaagacattgcatagacaggcaaggccaaagcaaaagctttaaggagagtttctttaccacccatagacaaagtacgagcaaaccagcctgacaatctcgtctttagcctatctttgatatagtctaagagctgcactttagacccactgaaacactccggcagacctaggtaagtactagctcccccttcgtttgttatacccaattcagcttgaatccaaaccttacaatcttcatcaaccagagcccccaaagtgatgctagatttatcataattaatcctctgacccgtaacatctccgtataccttgaaaatgctctttatcactgttacttcttctttaacagctttacacataaacaagctgtcatcagcaaataacaagtggtgaatagccggtccattctcagagaagcgaataccacttaaaagaccctgcctttctgctctgttcattagatgggtgagaccttctgagcacaaaacaaacagaaaaggggagagcgggtctccctgtctcaaacctctagaaggaacaatgtttccaaaagccttgtcattgattagaaccgagtaagaaacagaagagatcatgaacataatccagcccacccatttctgatggaaacccaaagcatccagcaatgctctaacgtaattccactccactctatcaaaagcttttgacatatttgattttatcgcgatgaaccctttggaaacagacttatgagtacgcaaaccatgcaccacctcgtgagctatcagaatattgtcaaaaatcagcctctccgccacaaaagcagattgattaggggacaccaaatcaggaagaaagggttggagccgcctaaccatgatctttgaaatgatcttgtacaatactgaacaaagactgataggcctcaaatcagtcatcttgtctggtttcttcttcttaggcagcagacagagatgagtgaagttccaacttttcggaaaataaccaaggagaaaaaagttttgaatctctttagttacctggagacaaatgatactccagtatttctgaaagaagaaccccgtaaaaccgtccacacctggagcacttgaacttcttatagcaaacacagcttctctaatctcattcttagaaacagccgcaatgagcgtattattcatgctttcagttactcttggctgataatcctcaaacaggtcaacaaaactgcttggatcagtagatttgaacagatcagagaaataggcttcagcaatcgcccctttgttcatctcatccttgtggaaaagaccattgacatcgcataattgatcaatgtgttgtttccctctgttgtccttaactgaagcatgaaaaaatgatgtatttttgtccccactatgcatccattttgctctactcttttgactccaaaaaacttcttcatcgtggtttgctttacacaagtcatttttaagagagaaaaccaaatcagctctaggaaaaccagaagactgctccaactccaaagctgcacgagcctgcgtaattctggtggaggagttgatgttattttcttttttccatctacttagagctgaacgacaatgcttcagtttatctaaaaccagcagattctcgtttctttgacttccattccaagcttgaacaatagtctccttcacattaggttgattgaagagccttttatcaaacctaaagtttcccctgtactcttccttagtcttggttaatctgactaaaaccggcctatgatctgaacccctcttatccagaaattcctgattagaaattggaaaaaatctgaaccagttcttgttaccaaaacaccggtctaatctgctctgaatccacatctcatttgttttaccaccccaagtgaagggattaccaatgcttggcagttccaacatatcacagctatccaacatgtccgtgaaaggtagaaaggaagaatcaccccttcgtggaccgccacgcttctcaccattatgcagaatggcattaaagtcccctagcatacaccaaggttctttcctattaatcccaatccgagtgatcttctcccaaaccaaatgcttatcactaaaagccgggtttccataaacgcaggaaacataaaattcatgagaaccaaattggatttgaaaatcaataagattcttgtctgcatactttatcacaatgtcaactcctttcttccaaaacaaagccaatcctccactaaggccaatcgggttcacagtaaaaactctttcataccctaaccattcttgcaggtctactactacattactacaattcttggtttccattaagaacaaaacctcaggaaaatgagaaagtctcatctccatgagtctcggaatcgtcaagtcctgagaccatcctagtccttggcaattccagctaacaagactcattaggctttggacggtccctcatttgggaccaccaatttagggttgagcttgaagattttcgcagcgctcggacccatgtcaactgcctttctcttgtcttttgttccagaggtagaaccttcctttaggctatgatccacaaagatggaagatggatctttcagcttgagtttcctagcatgcttagggggtctgtttctttgctttacctttttccggatagtcccagtagagtctgactcaaagagaccagggctataaaccgttgaacttaccggaaagggctgagagagagcaaggaaacaccccacatctttagaagccaagctgttcactggttcagtaagccaatctcttgcatctttcgactgggtagactcctccagacgtaaggacgaattcaaattgagaccaccattgtggctggaagaatccccacgatcataatcaaaaacaacacctttctcccttaacatatcatgatgaacgattggcaatgcttccagctgaagaactgttttttgagtaaacggatccttttcagcatcccttacagacttaatcacctgatccactctaatagaccgttcttcatcattcgcaaccctcagatactgcctcattccctctaaaacttctggagctattcttggcctacccgtgtttgggtcaacaccaacttgactctccttcaaaaccccaaacagagggtctgattcttgaagcaccgacggtggaggagctttaggaatactgattccttgtcttctagcagaagctttatcttgtctttcttttatcagaatgggacacaagtctttttcgtgcgttagcctttgacattcatagcagcgcttctgaatcctttcgtaatgaaaacggacagtagctgtgtcgccattcttaaaattaatcactttggatctccttagaggacgagagacatcaaagagcacatttactctaacgaattcgtgaagctgcggctcaaccggattaaaaacgacctccttgacctccccgattagatctccaagctttgtaatcgctttctccgtatagtaattcactggaatattccatatctgaacccacacaagcatgaacctcaaataatcatcaggaggattttcgtaccatcgatccaccactatggaccaatcattgtaagtatggaccccttttgctaacacatcttctaaatcatgtttagaatcgaagataaactggaatctttcactggtgagagatatccctgttactcttccttctttttgccatttccgtggtatattgcgaatcaggtgtttcatcggttgacaactcgggttgagaaccctacctattagactgagcttattcctttcacacgataaaaattccggcaggtccggcatttcaaaaggctcgtctttctcttccagcgacatctccatcaaggccctatccattgcagacgacattgcgacgacagcaaaccaaaacaaggagaaccaacttcggagaccggaaaaccagaacgaaaccacaagaactcagtagaaacagcttgaaaatcgaacttgagagggttgaacagtgaaaaacggctgaggggaaagagaatttccagactgaagctctattctaaacctagtgaaagacactaagagagaaagagggttttaagcccaaaagagagatttcttgtccatagtgaatatagttacaaaataatataatgatacattataatatgacaaatcacaatttatatctttatgttgttcgatttgtgactacatatttgtgtttgaaaagtagtatgatatgttttattcactacaagaaagacaacatttaattcttttttgtttgaataacgtaactgaatcgaccactaaactatcatacacgttcttaaaaaatgatgttaagtttaatgtgatccccaagtgttgcaattgggttgagtaataaatagaagtggacaaatggttattcaattattttcctagctaaattcaagtatttttcaaaattattttgtttcaaattaaaacttaaaagtcataacaaattctattgagttttaaaaatgaccaacaaattgaaagtgtggttgttgcaaatgcaacttggtggagatacggtcagtgacagcctaacacgactccatcggttcgatcaaatacctcacgtaacccgccgattcactcgatcgtctttattattcttttccattttcaatcatattgagcctgattgataattacaagtctcattacaaacgtattagcaacggtatacagtcaatatccgtcactaaaaatgctaattgcaacgaaaagtattcttctttccctatgtaactataatgtgatatagaattagcccaaaaaaaattgtttatgattaattagatctaaaataaactatggtcgtcatgtgacgttgatcaaccgataaagagtagtctgaaatttactaataaaagtcttaatttgtactttttacgaattatagtttaaatggacacaaaagtaaatagattaaaaaaactagaaacacgtggaaatttacacaagcactatgcatgactgcctgcattccctccaagagttttcttaccctaatcagtaccggttcaagaaaatgaaggttctacaaattatcaattataagttcctaaagttcttttctttctgtgtgtcctagaagagcgatactaattgatttatacaatgtactaaccaacgtaaaaattgtgaatgatttagcctaaaaatgctatatgcaatttcttacgtctatttctcgtactgtcatctcatatacccagccttagtaacaatccaatctaagggccgaacaaagagttgcatcctacctactaaatttgggcctattcgaagctaagcttggcaggtcgattttagtaaaatatttttgaaaggttcccttaaaaaaagatatttgaggactacacaattagttaaatattaaaaaattaaatgtgagtccatagccatttttccaattaaaattgtactttttgttgtgtcaacgatatgaatttgttctttctcatagactcttaatcaagtaacataaatggaaaatacaaatatttacttttaatcaatgacatgaccggagatatcaaaatggatcaacgcaccactaaatgagttgatttataattgttcatgagttaaccactaacccatcaatttcttcattatcatcaacccaatataatcatcattatcgtcatacctgcatattcataacaacatcatcatatcaacatatcatagtcgtcattatattgccatcatcatcatcatttcataattttcagtgaaaaacttaaatccgtaactttttcacaaaaatcgtgaatataatttttttcaccaaaattgcaaatcctcaaacaacatgaacatatattttctcgcccaaaagtatatgttatgttgatagtgatgatgataatgttatgatcttaaaagtatgatgataatggtagtgttaatgatgatgaagatgcattgtcattatttttatgttaattattactttaatgcgtcaatctatttaatcatttaacccatcaaattaaatggggttttgggttaatccaacttagttgttaaatgaatcgcgttaactcatgaactctaaacccattaggtaatcaaccatgcctcttttgccgagaactagatgagtcatgggatcacttattcttcgtgcgccgatacacgttcacaatttggagcgacattgtcgggaatttgctagacgctcaacccgacccggattgggaacaaacattacaatagttcaataaaaacagagactagcttagccacatccttctccgtttagcattccaagcaacaatttactttttgtggagggagtgaaactaccggcggcatggagctactcaacgtatggtgactcaattgattagtataattgacaaaaacggtttgacgatgcgtagtttcacttcgctatcgagactctctgaatttgagactacttttccaaaaatggtttcaagctaggggaatcacataatcttgttttagttcttactctttttcttaaatagtttccatgcttttgttcataaactctctttctttttatcagataaatttaacatttcatgaaaacaaaaatgagtttagttgaattaagttatccattttcacacccctagatatataactatcatgaatattacaaagaaaaactaaaaattattaactattcatattaaaacatcttatatattaacaaaaaaaatctatcacaatatagaaattatagattattgttgtgataatcaattcattttctagatttaccctactaaagtttttctgaactgcgtatttatattaattaaaataatggtctcatatgtaatttcaacatttaagatattaaagatgctatagttttattatatatcattaaatgtatattattacaattctgatatataaaatataatacttcaatgaatattaatggtctaataaaatatttaccaaaaatataataaaaaacacgtgtcgcatggatctagtctaaacatagtaactattgtaaatcttttaaaaaacataaaaaaaaataaaaaataaagattttattattttaataaattttataactcataacaaaaataattaattcgcaaagatatggaagaagaagatgcaattattatatatgaaaataactgtacaaatatctataatgatctaaaattatgttaaaaaatacacgggtcgcatgggtataaaccttgaactactgtaaagctttgaacaaacacatacataaaagttgacaaaaaaaaaaaatttaaaaccacatacatttttttgtttttcttattttaagaaattttacagttaaaggtagaccataataagtttaacattaataaaaaatgtttaaattcacaaagatatggaaaagatgcaattatgatatatggaaataactatacaaagatctaggacgatccaaaatatattatagagatacactaaacatttgtcaataactaatatagagacctaaagtctccactatatatatgtatgtagttctaagttgtatcccatcccatattctaaggaaaacaaaacccttacttactttcttgttctctttctccgccgtggttatctatctcagacgttctcatcgctcatcttgacatcatggccgccgtagaaggacaaatctcggctctcatcagcaaacgtctccgtactctccgcaagaaatacaaccgtataactgacatggaagagtcgatttctcaggggaaaacactaaacaaggaacaagaagacaccctccgttcaaagccaatcgtctccgcccttatcgatgagctcgtaaagctccgcattcctcctccttctgcagccatttcagaagagaccagcccccctgctaagaacaagaaacagcaaaagttatcccacgtaattttctttagggttttagccgcatgcccgcatcgtattatagtaaaactaaacctaatattttccttcctaggcacgtaaggaggtagctgaggaggaaaacgtgacggccaagacagatatcgaggattgcaagatctctgatgatggtatcaattctgaggtttccaaggacgatacttctcctagtagcgaaagctcacaaggtgttacgccatcgccgcttagcagaaaggcacgacgtaaacggaacgcgaagaaacctcaaattccacagtgattgtgtctccaacttctgtgagtagcggaagttttggcaaagacaaagtaaaaggaattgcttttgtcacaattagctagggctttttgcgtttgagcttttccttgacaaaagctataaaactcttccaaatccattgtttaatttcttatatatcgaactatgtctctagttgtaaattcaaattgaatatcattaatattgttcttgagtcactattagctaatacaataatttgtttttaaaaatataattttctttcacgtcacaccaatttttggcatagaatgtcatgaagccagaaaaaactcttttttgaggacaatatcaacaatttgtagcactgttttttttaacccttttttaacgtcttaaaagaactaacgttttgtatctgaaaattttgcctaatctacgtgatcatatacaaatttcttctggtatgtgaatccctatgagatatcactaactctttatgtagttccttggtgaagcaatgatgcgatattttgttaattgaggttagttgcagagatgggtcatatttttaaagtcatatttttcaactaaaaaggtaaaaaaaaactcttttccttaagaaaaaaggtaaaaaatatctcttggaatcactttcagcagcttattataaaaaaagtagtattttttccaataacaatagatttgatttgagttttacaaattgttgattgaatattgtgaattattttaagtgattttacataaattccaagttcaataaaatagaattgagaatttgttttaaaaaatcaccagttgaataacatgtaattttaaaagacacctaaaatccccaaaaataaaaaatccaatacacccttacgctaattgactagtatacctctcttctctatttataccaattgttaaaccctagtttatatttgcagtcttgttgcttttttccgtacgttcatacaaaaaaatcacaaagataaacaaaacggtatgatgcttactgatcttccacttgatttagaatcggaaatcctctctagggttccggccacttctctacaaagactgaaaacgacttgcaaacgttggtacgctttattcagagatccaagattcgtcaagaaaaacttgggtaaagcagcaacgcatgtgatctttgataatcgtagtggttattcaatgacagatataaattctctgattcatagcatcaatctccgtggaatccaaaacagctttgatccatccattggggtcgacgttaaacttaacgttctaaaggatccaagacatgataagataagtcatattatctctcactgcgatggtttattattgtgcaagaccgaggactatggtagactcgtggtttggaacccttgcactggtcaaatcaagtggatccaagccaataatatgttaatggacgtttatgtgctaggatacgtaaacaacaacaaatcttgcaatagctacaaaatcttgaattttggcattcttccattaaacagttctcatgataataagtctaaaatctatgagttcaactctgattcatggagaattcttgaccacgtctctcccggttacttcgcaatatccaaagccatgactttgaagggaaatgcttattggtttgcttcagattggtatgcttcagataaagaaagaaaattcttacacaaatttgatttcagaagcgagagatttggacgtctatgtattcctattcagaaatattaggctgatcagactgtggctctatcggttgttagagaagagaaacttgccttgttacaacagtggtttgataaagattcgttaaagatgaatatatgggtgaccaaaactaagatcgatgaggacaaagacttgtcttggaccaacttcttggtagtggaatttggtaaagttatattaacaagagatgcgttgaattatatgagtttcttggttgacgaggaggataaaatggttgtgtgttctgatacaatgtgttctgatacaaggagtggcactaaaacgaggacccgaatttactttgctaaagaaggtatacaagttcatcaagagattgcacagaaaccaaaaaaatgtgggccatttctcgtcagttatgttccaagtttggttcaaattcagtcaggtaataaacagagtagctgaaaaatattcattgcctttttttttttaagtattatcctttacttttcaaatacgttgtttatgactgcttaatgaggtatctattctcttggcaacttttttttattaatacagtatgtgtaagcatatgaataccgaaagcaaaaagagtagaaagcaaatcagcgaaagtgcatatctcaactccctaaagttgtgacatattgtaattgtatctccaacacaaacacaaacatctgtgtatatgtaaccatatatgttcatgttgtttcatgaaattacatagactttcttttgttccagcatagtcgatattatcaggaaagtcatcgaggttatatgcattaggatcaagtacacaccaagtgttgggctgtcttgtcaaagacttgtccttgcctttacccgagaagtcaagcacatatttcggtctcccatcaaactctaagatcccccaatacctccggcgctatactcttggcatcctcatagacaaggctgaaaagttaaaaatccatgatcactcctttcctcgcaggcgttccatttccagacatagcatgctttaccatcccctgattgaatctctttgcactctttacattagcgttcttgtctccatccgtacgccatatatccgtaggctcgtttccaacagctatgtacttgatcttgatcttggattcatacataacacatgaaggaagttggctttaagaccaagcttcaacattgtacctctgtgccttctccaaagccttgagccgccgtgaagcaacctcctttgatcctcccgtctcttctgacacaatctcccctaaagccgacattacatcagatggcatttctgtcgacgagccagccacataaacgacagctccatcacataacaaatcccaaactttcttgctcatctcgcggagcttgtgttgcacgtaaaccttcttcggttggtctctagagaatgctgtgtaaaagccacctcccttttattcagagagcagtcctcctcctcttgcgtgagactcccagaaatcgcggtattgaaaatatgtgtctttgtttctgcaaccgaagaagacaatgaacaataagctacaatatgcgttttgcaggaataactatatacatgaagcgtacaacacaagcagcttcctcggcttctctccgattagagaaaacacagattctaatctccaattatctcttctatagttctatgcaaagaaacaagttaaaagactcttaagggaagaggagaagagagagagctcgaaagattctggagacttgatatgggcttgaagcccaaattataagttttatgagtttgggccggatcatgtgatattggaatataatagatacgacgtagttttgatatcatcgtctccaaaatctctctcttccttgaaatgtgaattttaaaaatcagcggaagttccggtaaagttcgatggcgcttaattctcgcaaatgttggatcttcattcttcgctccagccaactgctaaccaatcctccttctcctttcttccgttttcttctcttttcttcgattctctttttttcctcctctctcagattcgattctccgaccttcctcagttcaaaatgttcaacgtgaaggtaactttatcttcctccgatcgtttcggaattcaaattttatccatttcacacataataattctggaaatctggtgatcgtgtttcggaattgtattttatgtttcttcacattcctctgttcctcgttttagagaatgttaacaaaaaattgcgatcgatttttggatgatttgtttcgtttattccaaatttatgtctctatgatctttcgaagtgatggaatttgcaactttattttatgatcatagatgcgattttttatttggaattcggttgttgttgtttgatgattaattttttttttgccttaaggttttggttttaacgtgacaaaattaatgtgacgattctggtgatgatacttataaaaaaatatgaacacaattgatctttccaggtcctacacgtgaagttttgagctggctgttttagcttttgtgctgtttggccataattgatgcagccttttttagaaacatagtaagtgtcttcttcttttttatatgaaaaatgccacatgaaggtatggtttggtgtatatagaaattcaattttcttgtgtgctatgtctaatgtttgattctgatgaataatttattccttcaatgttttcaggtacaaatatattatttttgattcttgattgttttggcttactttggtggatgttgtgtgatcatcgttcaaggcttctttcttctattatgcgccttgattcatctcacaaaacgcggaaccagcagctgtttgagagaggttaattatgtcagatagatgggctcgacaaaacgcggaacgtcctgcaactactttggctgagagaagaaatgtgaataaaaacgtttcacttcagactggtgaagagttttcaatggagtttcttaaggatcatactcctgtccaatctcctatcgttgcaggaagaactcataatgatgtgcatagatttggagacctttactatcagaatcaaccacaggggtatgatagtgctgctcggtttcatgaactgaggaggatagaatctgaatgtccttctgatgcatatgattttggtcgagacccgaggagtactatacggcttgagaatggcggttatatgcctcattttaatgcttaccacaatgtaggttgtgataaagaagttattactaggaaagcttttggtgaaataaattctaaccgaggagatgtcacggggatgtctgcgccttgcgtgttcttgccagagcgtactcagtccaacaactttaccggaggaggaggagattttgatagattcggaaaagtaaagtttctttgtagctttggtggtagaattatgccaagatccactgatgaaaaactgaaatacgttggaggagagacgcatattatttcgatacgcaagaatctttcgtgggaagaactcaagaagaagacctcagctatatgccaacagttgcattcaattaagtatcagcttccaggagatgagcttgactccttgatatcagtatcttcggatgaggatcttcagaatatgattgaagagtacaatggacttgaaaggcttgaaggttcacaacggccacgactgttcttgattcctattggagagcctgaaagaaaggctcagcagaacattcctgattgccaatatgctgcagctttaaattgtaatgctgatcctaatcctaggaacatttctgatggtcagactttggctggtgattcacgttatcatataaacaatttggatcgtaatccaagtttctgtaaacgaacaccgggtcagatgcttcgactggatgctactgctatgcgtcctaatccacttttcaatggagttcagtataacatggcttcatatccatcacctcctgtttctccttcaccattccagcaaagggattcaaatggtgcatactcacagttccatggcaacaactccagctcggagagcaataattccttcactccagctcaacaagacacgtctatcttcgaggtgattgattccaaatatcatcaacagcgaccactaccttcagttaactatcagtctaacaagcaggaggcagagaacctatatgggattcagttccagaatggctttaatgacaaacctgtgactcccaatcttggtcatgttgataatctttgctttaaccctgagaggtctgcgaataacggaagggtcttctatgataaagtgagcatgcccgaggaatctaaggtttccttctctgggtctacaaactcaaatgattcttgcttgggaatcccacactcgtactcagactctacattggagattactggtggacactctagctacttttcacaagagagacaacaaagcccatcttcaacattgaactttacaaagaaacaaacacaagaaaagcaagtacaggtgcataggaataacgatctagctgaccgtcgtacacaaagcgatatactcgacatgaagtccactgagggaggagagactatgtttaaattttccccaagtccacgaggacctagactatccggtgaaaacaagacgttgcatatagacatttctgctgcaggcaatcattatgatgaaatttatctaaatcaggaaaccaagaatcaaggagggaatagtgataccatttttcatctaggagggaaagtactgggaacaagagcaatgcctactgacatggaaggcaagaagttgcctatatatggaaaccaaacctcagttgttgttgatccatggaagcaaataaagcaagataatgagcgtttgatggctggagctggaacttcatctgctaatctaatttccttagaggaaggtatagcagctaatacccctaatgaggaacctgaatctcgtgctgcccgagaaaggaacttggaagtttcagggatctttataagtaagagagtagtctctgatgagaatttcttgttcagcatcgcctctgaatcaccaaacagcaagattgttcatgagacacaaaagaatgtgagtattacaaaatgcactttaaacaggattgtcctctattaacttctaacagtaataattattcaactaacctgcagagaacagaaagagaaggtggtttaggccatgtgagaatcccaatcatggatttgaatcagccagcgccagcaacagcgagtgaaacttacagtttgaagacaccaagagaagactcaccacaaagcattccacatgcaaagattaccagcggtgatacaatattcctttctgaggtagtgatttacttgtttgc

SEQ ID NO: 1047 - DNA, 78535 bp, Arabidopsis thaliana
aagcttataatctatgttaatataggatctttcttctcattattgtcacttgtcgacaggaagctgaagccaataccggccagaaagagaacagtttcaaagacacactctttgttgaaatggaagccagtgtttatggcttgcaggtacttggcaaatttgagtaatgctatttgaccaacgcttctgttgcttcttctttaaacaggacttcatgcagaaaccgatacccttgtttgacatgcttcagaattttgaaatttactcatcctaaaccttcagataataaagaacgctgatcttgaagacctgacagaactgggatccgggacatatggaactgtctatcatggaacatggcggggaacggatgttgctataaagagaatacggaacagttgctttgcagggagatcatctgaacaagaacgcttggttagtcctcaaatcttttgtttcttagatctatcttcttgatactgttttggtatgaagtacacaatatgaggtattctccttcgcagcacattctttgttttaactgtattgctttatcagacgaaagatttctggagggaagcacaaatactctcaaatcttcatcacccaaacgttgttgcattctacggtatagtgcctgatggaactggaggaaccttggcaactgttacagagttcatggtgaatgggtcactcaggcatgctcttctcaaaaaggacaggttacttaacctatcactgcatttttgtatttcccttagcgttcaggatctgaaagagatttaacacaccagaatgccaacgcagattgcttgacactcggaaaaagataataattgcaatggatgctgcttttggcatggagtatttgcactcgaagaacatcgtccactttgatctcaaatgcgaaaacttacttgtcaatttaagggatccacaacggcctatatgcaaggtaacatatatattgatgaagatcgttttcccctatagactgagaatcctgagaaactgctacttaagtatgaaactctgatttctacaggtgggagatcttggcttatctagaatcaaacgtaacactttagtatctgggggagtgagaggaactcttccatggatggccccagaactcttgaacggaagcagcacccgagtttctgagaaagtaaactaatccaaccactatcctattagtttcactaacaacacaactcacatttgttttcgatctgaacaggttgatgttttttcatatggaatctcgctgtgggagattctaaccggagaggaaccctatgcagatatgcattgtggagcaatcattggtaagtcaaaaaccatcactcacaatttcacttacctcaaaacaaaagccactctatgctcatttatttcctctttttaaggcgggatcgtgaagaacacacttcgacctcctataccaaaaagctgttctccggaatggaaaaagctgatggaacaatgctggtctgtcgacccggattctcgtcctccattcaccgaaataacatgccgacttcggtccatgtcaatggaagtcgtcactaaaagcaaaagaagagaaaataaaccctgacttcaaaacttcagaaatcaagaaaacgacgggtcagttcatcgacattttcacatctatcgaaaaatctgcatatttattctcattcttcaactttgtacaaaaacataactgtaaatctcaaaatgtcaaatgtaaatattattgccaacacagaagatgagaaacagattttgcattgtaagcacaacaaactttagtgtctacacatccttgtacacgagctggtactttggtatcctctctggcggtattggacattgaacaatcatcttccctttcattgctcctcgatatatagcctatacataacacaataacaaaaacagagtatttaaattagtaacaactctttaaaagcttttaggaattaatgaaattgaattgttcttgttacctcaacaacatcaataaagtcttgttttatatgaaatgcaccaacccatttagtatgatccgcagttctacaatataaccaaaccggaattaacataaaccaacctaaaccggctttaatcagctactagaacaagagattaattaattacccagaatccaatttcatatgatgcgcattgaagaagaagatcgtcgaaggaaacaacgtgatatcaaaatacttcacatacacttgaacatcctctgaatcaacatcaaccaaagctaccttagcaaatttcgaaacatctctcaccgatttcgcaagctgaaaagaaaaattcgaaaactttaggggttttgattaatcgaaattagagaaatcgaattcaaagagagacgaattgaatacgatttcatcatgctgaagacaaacggcgtcggaggaacgaccaaatcgtaaaacaagaacttcatcaatggtgtctctgataacccgatcaatctcttccttcgtcgttaacgtcttcagaagataactcatctcggcgtaagaattatacgacatcgtttagataatataactaaagagacataaaataaaatatacgacgtcgtttgataataatataatacagtaactaaaacagacggaaaatatacgacgtcgttttttggtaataatataataactaaaagagacacagattaagcgacgtcgtttgtggtaataatataataactaaagagacgcaagtgcaaatgtttttgtgataaaaaccataaaaataaaaataagtggagaaatcaaaatcatcgattctcctttgtttcgcctaacccaattcctaaatctcagcatctttcatcaatccaatctctcaaataagcgagagagaaacaaagattatcgaatccttggagacgaaaacatactccaatttgtaattttctcgtctttttttttacctgattttgttatacgtttgatcgaaatcatttgctctgatggatctctgttttgttaacccttttgagatttggtagatatggttttgaggattgatatatttgccgctgattgtcgttgaaaaattgtgaaatttgatttggtggtttagggttaaaatgaaattatatgatgaggaatataagaatctgatttttttttattagattctccagatgttcttgttacttgtgattgaaactttgattttgggttgttgttgtttttgaactttggggattttaaagttgaatttttttctaatttatgccaaaacggtcttcttctatggttttgtattgaactgatgatttagatttgtttaaatctcggcttttgtatattgtagtggaagattgaattttttatttcttgtcattggttataggttttagtttattatgatgatgccactagttgcatgattactaacttgacagtggtttatatgaacatatgtgataattttcttaagtttgattcctacttctcttttgggattgttgtgcaggttttaggacatttgggttaccctgaggcttaaggagaatagtggtttagttatttatactgaattttgtgtcattcagactttccgaggattttctgtttggtaccgtttgcctcgtctgtgttttcatttgagctgcatcttaaagtgaaagttcagtgcttaaacagtaataaagtagtatttcaacaggctgctaataagattgctccctttcggtaagtttgttttcagccaactatctctctttgtgaagttaacaatccgttgcttcttgtgatggttaagattcctctggtatgcttagtttctgtgctagtttctagactatgatgagtcagtataagatatctatttcttctgtttttggtgtatcttcatttgttcttgctttggttctgctgctacatgattgttttgaagttttgatattaagcgatggttttggtcttgcaatgttccctttttggcaaaaaagtagtatttataaacctcattcagtgtttctaactttctcgatgcgtgagtagcttacacagtgcttaacaagatggctggtgtaaagcgaaaattaagtaccgagtcagatgttcatgctcttcacaaagaactggatgaggtttcatgtcctgtttgcatggatcacccacataatgctgttctactgctgtgcagctctcatgacaaaggttgcaggtcctacatctgtgataccagttaccgacattccaattgccttgaccggtttaagaaattgcattctgaatccgcaaatgaccctactcccgaggcgaacttggcttcaagggaacataataacgaatctctatacgagcatggtacagccagtcgaagcagttttcaccgtgagtctggaaaccgaggctcttcttgggattccgaatcactgaggaggaggaggagagttgaggaagaagttgagtcagaagatatcacaaatttgaaatgtcctctatgccggggtactgttttaggatggaaggttgtagaagaagtaagaacgtatcttgatcataagaaccgaagttgctcccgagaatcctgctcatttactggcaactaccaggatctgcgccgccatgccaggaggactcacccaacaactcgtccttcagacactgatccatcaagagagagagcttggaggcggcttgagaaccagagggagtatggagatatagtcagtgcaatccgttctgccatgcccggtgctgttgtagtaggagattatgttatagaaaacggagataggtttgcaggtgagagggaaacgggaaatggtgggagcgacctttggaccactttactattgtttcagatgattggctctcttgacaatggaggttctagcgctagtgggagtggtggtggatcaagatcccacaggtcaagggcatggaggaatcatcggcgttcatcttcagataggccgtacctttggggggagaatctattgggtctacaagatgagcgcaataacaacgatgatgaagagtttcgtttgcagaatgatgcaggcggtgcttctactcctgttccaagaagaagaaggagatttggacgtcctagatcaagcggaaatcatccgcgataagctgaagcgtcccggtaaaaattcgatataaatcattgggtttttggttgtagaaaaacctttgcgattactgaaactggttttgtctttaggtgatatcgatatctctcgggtcagaaccaggccgatgcaaagggaaaggttttactaaaaacccgagaggcttaggattgtttggttttatgtaaatgtcattttgagccttggctcattgtatactactaagtatggcttcttatgcaatgtcttttgttacttaactcgtggattattttcttttgcgttgtgatgaagtttgttatttaggaaatcgaccacgtataaatattttatctaaaaatggacaatgtaattattttgttgaagctctttttggtccaacgtttgacaaagatttagtgcttgtttttactgttttccaatgttttcaagtgctcgctctaaggagtgtatgataacacgtgtcaaataaaacagccacgatattactcagatgtcataattgtaacttgggaccatcaaaaccatagcctataattgtacttgaaccatgtagaggattgagatgaggccacgtttgataaatgacatgcgggcatgaagaataacacgttcgatctcgcagagctcgacgatggcattggaataaatgacaaggtagattatcttctattcataaactatagtctatagtagtatggatccagaaaagtagaaaaatgaactgtggtttataaatggtgtataaaaagcagtccaatccttaaacggatttgtccactccaaccgccgcaattattcaaactcttagagtgttaaagcataattcggaaacaattaacaaaaaaatcatatcacatcgagtctatcttaaaatatattcgatcttaaataggggttaatttcaaaaggtgtttgctttagatacaagttgtatatattggtctatttagttatcattaacttttcatgatcgttaattctgtaattattattttttgttttgtggattctttagtaattagtactaatatccatgtgactcttccatgttctcctatacccttcacaatatatatatatattccaataactcttgattaagtagaccacatccggtcattttgtgagtaaaccatttttgttttgattacacattcgtaagacgaaatgtcatttgttcctcaattctttctcatgaccaaaacgtcaattacaagagaagtaataagaaaattttctccctagtctctttattattcatatcttattgttataaaataaaacacatatatattacacatatcttattgttatgttaacttttcttatttcggttttgattctttttgatatgttaactttttcgttatgttaacattgattgccagatcgtggagacaaggaaatgaggtcttgtatatacaaattaacaggtttccctaagaaccttgttaagaagacacaagaaaaaaagatagagaaaacaagttttggtgtggtgaataaacaatatggagtaccttcttccgatgatactcgtagtttccgtactgttaggcgttgtgtttgtctcacttattgttattgtttggatttactttgcccgcaagcaagcacgagataactccaatttttttgatgtcccaccgatatagttatttcgccatttaacaattatgttatttttttggttttgttctttagatttgatggtattgtaaccctcttcaatgttttatcaacttttatcatcctgttctgaaatctatagatttgtttgttacttctcaatcactgtatcacatcacgcaacaaaaccgttcaacaaacttgaagaaacagcctttgccaaaagaaaatcttcatatatgtatgtattagatgcgtcataactagtctttctactacacgccattgagactcatgtttggttaaaaaaatgtagtgatgccttaaaatatcttctccttagaatgtatgtttctcatgtcccatcacagactatcatttgcacatggtacattatctccttatgtgcttaataaactctgaatttcgctcgatacactaatgcgggagatggctcctcgcggctcgccactcgccagagccggcctagagtataaatgtgccgcaagccaaaaaagtgggctctgctcctcgtatgatctctcacgtatccaaatcattatgccaagctagctagtacacgttaactgaaatttatccccaaagtaacttgagtaacaactagacctagtagcgcagaatgaccttacacatgtactcatgctttaaatggtccggcgatttttaattttaaaaaaaaaaaatatagcttgaaggaccatatgaaattaaatgacataacttacaagtgtgtggcagcgagtaatggcaacaaagccttgaaacaaagtgacatctactgagctaaaaaccacaacccaaagaaacatatgtatgtataaaaaccaactttgatacaatcccacgttgtgtttccatataaactcaaaaatagattgagtcaaacaaattatttaaacacttatatatcttctttagtttcccaagtcatctcttgtcttcatcttctgttccaaagtctctaatcatttgtgtaagggagaattttgtttgactaagcgaataatcacacaagctctattactatattataccaaaaaagcatcttcggccagaacatggaggttagtcatcgtcacatgtgctccatatcatttacatgtgtccataacataaggactatatttataagagtttaatctttgtgagttttgaccagatctttcaatggctcttcaagttagggagatcagagcctagttccatcaattgtactgatcatgaacccaccacaactctaacaagtaagtaacaaaaacatttcttgatccttagatcacaatgtacaacactacatactttacttatcataatatatattctggtgagtttatgtagatttcatatgttggtaattttaataaacaagtcgttggctaatcaataagaaatatatagtaaacattttgttttctgatagaattatttaataaatgtgatccagattgtaaagatcacagaacaagaagatcatctacaagaggttctaaacataaagaccaaaggagctatagaggaatctggttatggtgtagaaaagacgtagccaaggcttgtttctctagcacttttactttaagaagacttaatagctttaggagagggcatttgcttcgctccatggcaaagataaaagcgcaaggaggagaagaacaagtgacatcgacaaggtttgatctgaaaaaggctataagagtcttgcaaccggagaaacaagacgataccaataaagagaagtcgaaaagcgagcagagcaaaggtaaggccacactttcaagaatgaaggagcttatcaaatgggctgcagcagccaaatccgacaaagctgtcaaattctttacccctaaggtgttttttttttctttctcaatagctcaaactcattagaaaactcaattttgttataccattgttattgatgaaacatatataatattgtagataatgatggagttgaaaaaccgaagaaagttgaagatgatgagagaagtcaatgaagaagaatcaacaaaaaggatgagtagtgtatctgcaaatataagtttgagatgggagagtagtgagagttgcacaacaaactcttcctctgatcacatctctatagtttcttcaccaggaatccttgtttccttgagtcctacgccactctaccgatgtagatccaggaaatgcaactggatcactactgattctgaatgtaagtaagaccaatattattttgaattttcctacaaatttccttttacacaaaccaatatttttataattttttactcacggtaattaatttcaaaatctgatcggcaataatgaatatattgcgtatctttacttatggcagtactaataaaattattgttcgttgttagtgtttattttctatgtatctgtctgatttatttttatgtatcttggattctgtagttgtggtgttagagttagagttatgaagagaagataggagtggtggtctggtggatgaagacaacgacaaggaccaagtgattctcatcgctagaatttttttgaaagagttaatttgagtaaaaattcattggcatttgtaattaatttataaccattgttttcggtgatttcaattttcttttgtacttttatgtaatattatgatgaaacttacagaattacatttttttagctcttaacttactagtaaaatgaggtaacgttacgtaagctaaacaacatggcaaatatcgaaaactaaaccatctaggattttaattattgttattgatggtcttttatttttcagattggttggggatgtttagaattatttttcattctttcagtccaaaatagaatagtaaattttgtttgactttaatcataaaacggttaaagtcgtgttattgggtcgtatggtttgggacatatatatcagaccaccacacctatcttctcttcatggtatgtgtaggattggtttcggcagaaccagaatagttcggattttgaaaatgaggattaaccgagtatcgagactaggtttaaaatttgatgcttagaacttcctgcgtagaattaaaaatttgcttaaatttctaaaagattgggagttagaattctttacgaaaataaatcgtttaacggtaaacgaaggaaattatccggttcgatgattctaaagagaactctaaatttagttgaatggaacggacgaacggttagtctttaccacacaacgtgaatggttttggtagatcacgttatgttagtatctaaacaatgtttaaccggttttggaaattaaccggttttgccattcctaaaaattctaaactcttctagagtattttcccactggtttatgtgagagtgaccagaaaaaactcacaattttcaaaacccgacgggaaaaaaaattatggagcgtaatcgtattgcatgatagacttgaaatggaatgcagatctagattttgtagtggacttcatcatgagctatgtataagtccattcaaaaagcccaaaacacctcaccttgtgtgtttagaagacaaagagaaaaattgtaacatctcatgcatttaaatgatttcgcatacacgttactggtacttaccattcaaagatagagagacattcattacattgtgaatctctaactaaattagtcagatatttcaacacaaatctgtcagctcgatttattatgtaaaccctcacccccttctccatcgttcccgcccacaattaaattgacattgcggtggttcatctaatctgttagtccatagcatgtacattacgtttaatatcactagagaagatttctaaaacaaattacacattcttcattaattcagtactcaaaaatacaactgaatagcacgaaaagatactttaaaatctactgttataaaatgatcattgagtagctatgtttagtcgtgtagttagtttgtgctagagtattcatatgtatggattattatgtaaggttatgagatgctacaatgaaaccctccagacattaatatcttggcttctccttcaaccacctcgtggagagatcttcaaccaacgccagtggacccattggaacttttgattcaaccctctctattttttttcctaaaaatagagatacatataactttaaaaaaattgaaagtatttcctaaatatagaaaatacaatgattcaagtaagcgatattaaaaaaatgtttttgggactactacattgtcaaaatttattagattttaatcatcatgaaaataactattcaattcttcaataaaactcaaactcaaataaacaattcaaaataaatattaacaaaaaaaattcacaaaaaaaataaagattaacaaaaaaatgaatacagatttacttattttttgcaaaattttcaaaatatcaaaacaatcatagaaaaaacttaaaatgttatatatctgaataaatttctccccaaaagttttgtatagttttttctgcaaacaaaaaaatattttagtcattaatttctttcaactttaccttacatcacatcttcagaaaatgcatatcaattttaggaagtcaaaaagaatagtaatacgtaatataaccatttttaactctatcacttaaaaatttaacggtaacatatattagatttttaaaattctaaaaatagcctgattaaaagtatacattgcaaagagttcgatttgataaattttacaaacttgaccgtaagagattatattgcgcattacttttattttaagaaattaagaaatgaaggataaaattataaaaatataatgatttttctatttttatttttgcagaaaacatttttgtaacaactttgtaattatagatcataatactaataaagttaaaaaaaaaacatttccaaaaatatcgcaaattcccggtcacacattctccatcattgcacttttcacgctctctctgtcttccttcttcttcttcttcaacaatcttcaaagcaaaagatcaacaacaaaaaaatgtcagacaacaatccagaaatcgaatcatcaaccttcaacaatctaaacatcgacgtcacagaatcaatcctctatcatctcccaatcccttccttagtccgtttcactctcgtctccaaacaatggcgttcactcatcacctctcttcctccttctccttctccttctccatcatcaccaccatggctcttcctcttcggtatccacaacacttcctctttccacaaccaatccttcgctttcgatcctctctccaacacctggctccgtctccctccttcctcctcttcctccgatcatctcgtcggatctaatcgcttcctcttcaccaccgctcctcgcttctccttctcaccaatccttaaacctaattggcgattcacttcccctgttcgatttcctcgaatcaatcctctcttaaccgttttcacaactctatctaactcatccaaactaatcctcgtcggtggatcttcgcgtatcggcggattagtcgatatcgaagaacgattagctgttcaaatctacgatcctgttctcgattcatgggagctttgttcaccactccctgctgatttcagatctggtcaggatcatcaaactttgacctcagctttgtttaagagaagattctatgttttcgataactattcgtgttttatctcgtcgttttgcttggattcatatacatggagtgatgttcaaactcttaaaccaccaggactctcgtttgcttacttgaattcttgtaatggtatgcttgttcttggtggaatgtgtgggttctcgtttaatctttggagtattgaagaaggctcgatggaatttagcgaaatcgcggttatgcctgaggatttgttgtttggattagttgatagtgatgatgaggatgacaagtttaggagtttgaaatgtgctggctctgggaatcttgtttatgtgtttaatgatgattgtcataagaaatttccagcttgtgtttgtgagattggtggtggtgagaatgggatatgtagttggagaagagttccttgtttgccttctccggttaataagtttcataaagttgttagtttctgctcaacggtgtctattaccgatgttttccaccccgaggaagctcggattggcggttcgatccgtggttgagtttgcttaggtatgttcctggtatgatcatccacacccttatctttcattataattgcgctttcactagtattagatgagattgtcttcttgcattggctttgttgttttggttatggtaaaacgacaatcaacattctgcgttagtttcatgagaatccattacttatccatgggtacacaatctcttgtgccaaaataggcaaagattgaatattgataggttttacattcaaacaagaacgtagctatagcttagtgttcttgatacggtttctgtgtacttatgtctttgcattttgtgacttggcagtgctaatgtaaagtggagatgaagggagaagatttaataatgaagtgtataaaaatggttatcaatttattatggtaatcatgtaattagacgtaaactggtttataattcttcgttgtatgaatcatttacatacatacacatatctacagaatcattaagtattgttgtttgtttataaatgagtgtgttttcacaatctcttataccaaagcaagctaacatttatacgttctaatgaattctattaagtattgttgttattttttggtgaacatataatgaaaatgttgatcagcaatcgtgcttcttaacaagactcccatctttgaccaaagcctttggatgttgatcgcaatcgtgccagagttaacttccagaggatatacattgtttggtttcttcattgtttttaaagccgatttaggctttcatagagattagggttaatgcaagaggtagaagagatgagtttagggacctaataaaacttactctcattcatgttttttctcacaccaaaaggtgtgtcgtttatagagattttataatcagaattcatcattgttaccaaaaatcagaagaatttttatgatcaagaatatatattcttgttaaacaaaaaccagccaacattattccactgggttcataggaaaaagaaccgaaaaagaaccgatatttagaacattggtttggtgcattcctgaagcctactccaactaaagaactagataccttgttggattttaatgaaacttggaacataactgaggagaaataggttatgagattcgtatggagcaacatcatgattcacttctatatatttatcctctcccacgatgtgtatggtgttggaaaagaaagagttacaatacactactctgttctcctggtcgatcaagaaactgatcatcccaaaacaacgacgatagtagataccgcttctcgttactgttaggaactttgcccatgacaaggctccggtactctgaatcttagttgctatccatacatgtatatctagttaacatacaaagttgttgctcttctctagtcactgataaaaccaaataatgataatgagtattagcatcctccgaaagagacaaacattggaatgtctcacttgtgtaatcaaaacatagtaaaaaagaacgcccatgttcttcatcaaaccagtaagtatttcccttcatagacatgccacttctggtctgaatcagtggtatgaaccagccggtttcacaccaacaaccctccacgaattagaggtaaaatcatagacttcgtacttatatccagattggaattcatcgtttaatggatacattctcaagattgtataacaggaagatttgttattgtaaccaagagcaaaaaatttgattgccgtgtaacactttccgggttggatcctcatccacctggtttcacgtgaaagcggattccaaacaacaagtctattgtcattggtaccacatagcaatagcatatgttttcaatcgttaagctatcactagaacaattcagtagtaacacttttaccatttcttcttcttttaaaaaaaaaatatatatatttttgcatttttggtcaaaacattacttgaaaagttgcctacaagactaaccaatcatgcaaagcttttcacaaagataaagcatcaaagggtgaaaaaaaggttgtccatctttttaatttcccattcatccatttgcgcatgataccaaaatttgtgtttctaaccttatcccaaacatgaaatattcaaccatggacgttttgtttcttacttacagtcttcttttctaaatgatttacttcataaaaaaaaatggtatatagatcttatgttacgtcaaagccaacattattatctatccagcttaattttttttttaacagcatttaattgtattttttgctgatgaagcatcattgtcaagaataaaggcaggactccataatctagaaaaaaacatcgttgcaaactattctcaatttttatttttttttttaaatttcataaaaaaactactttctgtttcatatcacatgccatcattgtaaaataattgtgatgaaatggttttggtttggtttggttggagtgtagtggaagactacgggaccccatattttccctaacatttttgaaattgactggtgaaagctacactacaaagtatataaaatatgtccttttattgacgacaaaagtaatgtccttcagtgtagagaaaaactttatctttgcttctgtaatttcattttacgactatatatctctcctccttaatagttcaattaattaattaaaatttccttaaatttaatttttttaagtaacatctttgtggtttctgtgatattatatagttgaaatgtcttcttgggagtcatccgatatggccctgaagatttttgagtgtggacgattttttcaaagtgccaaatcaaacaactttaaagtgacttgattgaatgattgtaatgaaaattggtgaacagaagaaaatatctttcaaaattaaatggaagatacatggtggaaataaataggcgtaaagctttggaggtcaaagtaaaaataaaagcatagataaaaaaagaaaagtaaagataaaaagtttgtctaaaaatgagagatcacgatatgggaccaatctttaagctcttcatgcctttcgctaaatgttgaagcaaatatgacttatcgatatcacccatttggtggcctgactatacaacaatctttacatacgtgcacgcttgcaaacacataatcctaattaactatataagtatataactataagtgaaaagatatatatcgatcgtcatccattcttacaaattacaatgacatattacactaacgatagtttgaaaccacaaatttatatcataacctagaaaacgttgtattctagctacgacgtaaccaccaaatttctcttaaatcttattctcttacagaaataaatatatatcttcttatattattatgtcaaaaataatctaataatgcttataaaaaaaatatctttattatgattatttcttgttttaaaccattttgtacataccatcaacgttactttgattaaaaaatgaaactcgtgctctcatatgttccataatcaaatatgaagctcgaaataattaactgtacttttttgtatgtggaaataacgaaaagatggtatacatgagattagtctaattgagcgagcctatacaaagatggggcacaactgcacaagacatatggatgatccttgagcagatgaggggcacgaatttgattgtctctagtacaaaagactttccctcatcaactgagaagataccaatatacaccgtatactcaaatggccggtatatatatatatatatatataaggttttatttttgttaaacaaaaaattaactaacgatgttaatacttaataggagcatagttcaagaccgaagctttatttgctaaaatggttatatattggtatctgagtatacagtgtatactggtatctcagttgtcaatgtgaatgactgaatggcataacaacaacaattatcaagtaataaaatgtggaaaaaaaaacaaaaacaacaagtaagaaaatataataaataaatatatatataacaaacaaaaggaggcatcaaatgacgaaaatgaccacgacgtacaatcgttctcgttgatatcattccaagaaagtgagggaccccatgcaatccacgtaacggagacatgcacagtctcttctcttcggtaatcgaatattattgttttgtctaccaaatcgaatattatattgttcattttagtgatagaacgaaagaaatcaccggattgcttcttccatacactaatgtgcatcaccgctctttttcagactcatatatacgtgaatattatatgttttcatgtgatgtatgagaatacacttttaccaaaatgtacagtgtacacaatacaaatctatgtatatatgattctttactttttaaaacagcatacatgtgtatatatgtaatatgttatgtaagtcgtaacagtgtaacaccatgcaaaaaagtcattagactaattaattaaggatccattttgtttctatccatcagaaaaactgtgatatagaccaaataatatatcgggttttattacttcaatattacttttttctattttgaaaaccaaagattgttttattctcctatattactgtcgtcatttttttcttattgtgtcaattcattacatcctaatttcggcggtttttcccagacatacccgaagtctatatatgtagcactctccataatttgatgtggcattcattgaagtaataaattcaggtatatcatagtataatcaaaccggccggtatatcatttgacttccatacacaatgagcaaataagcatttttcctctttgactagtatttgatacacgttaatatgcaattggtgtttgtcaccttagtcaaacaaatattttcttgtaaaaaagagaatatgaaaagaaatggaaaattaaagagaaaagtaagcaagaaccctgctttcttccacctcccctcctttgatttattttatcacctttgctttttgtctaagcttttaagattcgttgataatcgtataatgacccaattaccattacatgctttgttctttccattgagattgttcgttccacagtggcatgcctaccgacaattccaagtcttttcaggggctaagtagtaactctattccaaagaaaattaggaaattgttttgtcacgcgttattcaaaccctagtctgaatgcactatatatgtccattctctccaggcgatgcttgcataaaagggtacttttggtaattttataacttgtgacttttttttgtatacacatctttaacatacgttgttttgtttactttattaatcaaattaacgagtgtgaaaaattgaaaacctctctctttctcattttccctttttttctctttatctcaagctcattcttcttcttaataactagatctctctttctttcttcttatttttctcttctcttctttagtttcgcttatctcgcggctctgaccagctctcaagttgttcgtttctggttaatggatattgaaccctcttgggatcttgggggggtggttatttccttttcgaaattgcatggcaacatcaaatgaccaaaccaatactaaatcatcacattctcgtactcttctccttctcttcatcttcttatccctccttctcttcagtagccttacaatccccatgactcgtcatcagtccacatctatggttgctcccttcaagagggttctcctcgaatcttcagttccagcttcatcaacaatggatctacgtccaaaggctagcacacgacgcagccgcacttctagaaggagagagtttggaaatgatgctcatgaggttcctagtggtccaaaccctatttccaactaggtgagttggcacatctggttttttaccggtgagtttgaaagataagttattatagatcaatattatatgtatatttgagaagcttctgatcgatggagatcagagagaagcttcattattatggactttttttggatatgaattatcaagaatttggtatatatttctttggatcgatcaatttggtaccattccatctccttaaaatcttttgttcgttctaatattgttttctccatctattaagttttgaagttagaagtgtaaagaagagatatatactctttatttattcacatgtgactgtgtgtatatgtagccacctctgcatttccttcacaaagtatttgggatatagaatcttttataattgttagatttgtctaatgattgtttaattattggtataaaatgtagaccattaattaattaaccaaaatactctatttgtaactaagtgaataacattgaagatctcgaggcatttcacaaataattgttcgatctagttttgtccggtcaaaattgtctcctttctgaatataattttgaaaagaaaatgcaaaccagctatatccgatatcaattatctaaagtagttttcttttctaccggaaaaagtagtaattatctttaaataatataattcatgttacaatgtaccctctaatatattcatacccaaccataggttatacgattcgacacacatttgagaagactgcaatttaatttctatctatgaattgttttttcactattaatcaaactatatcagaaaaatatggataagctttttctttcgttgggttgaacgatcgacaagagactgtaggggagaagaaagaaaattattagacaagaatcgcttcctcacatagctttttgtcttatcaaagcatagtgtcgtagaaaaacccaaaagctaaataagaaaaagtgatgatttgataataataatcgtatcatttccttgttgttgaattatatgccatcaatcatttgctttatgatgttccacttttcttctctttctttctttattcgtgtatattgtatttttgttataacggccttggttttcttatgtatatttggtttctgtatatctctacaagctacaattttgattgaatatcaaacactaccgtctgtactatcgtcgatctgtttttgaaatttacaaaataaaataaaatatattagcttgataaagaaatgaactgatcgtacatatatcgaagtaatacgatcacaacttgttacatttagagaatatatgattttcaacgcttcgggagcgtatatgcacaacaatgccacaaaagagaagaggtggtgcttggaatcgttacgagcgataagcgagtgaacttagccaagttgattttttatttttaaaatgtcaataaaataaatacagtaaggtttgaggctatccgcgcaagctctggtcaagatactataaaaaaaaaagaacatcatgaattactacaaaatttcttacttggttgcttgttacttgttagtgccggtcttgtaggttgtatgcttgctctaattaattaaccttcagacaatctttttcacggcgtaattcggaattgggtttgaacttttttaaccatgtaagaacattattattggtagtatcaatgacacgtggcaagcttaaaagaaacttgatttaagctgatgtagtcaactttaaaagctccaaattgttccttttattagttacagattataaaatatttttctccttactttttaatttgaatttaatttatgttaataattatttaaaatattattagtgaaccaaaaaaaaaaattaaaattttgatttcattaatttgtaaacattataatgatataattgatttcattttttagtctactatatatatacatatatatatatataaactatttacaatgaattttatttatttttaaggattattttaagataaaatatacagtataagatatcaaataaacattattcaccattttaaaaagattttaaataactatttattgattatactatatatgagactttaatgatcgtctttctaaacttgaaccccaagctactgactcaagttttttgcacaaagatctaaacaacctcgtatctttgttaaatagaaaccaccttatattttgtaacaactttaggaaactctagctaggttagtcggtgcatatgtatttgtataaatattaggtgtattgctccttgattcaatatcgctccttgtttctcaattccaattttcaacactttaattttctctcgatagatttgtgttctccattttcgaccgtctcttgtgctttttatattttaaaataaccatggcttctcagttccctggtccatccgagatccaagactccaacgctcccctcacatcttctggtcccaccaatccagtcaatacttcacctccgatgggacagaccgaggaaagaccccacacgtacctcgccgctctcctcaagaacatcaacacttgtcgtcccagcgtcccaaaggtctcaaacatcaagaaatcaactaaagtcaacgtcaatcctgttagacctgttagaccggttcgacctattagaccggttagacctgttagaccggttagacctgttagacggcgaagagtagatttaaacaaatcttcacctgcgatgggctacactgagaatagatccgccacctacctctcctcaggtaacccctgcctcgacttcttctttcacattgttccttccacgcccaagaaatctctggagcagcggctagaggaggcttgggaccatgattctttaaccactctcaagcttatctgtaaccttcgtggagtccgtggcactggaaaatctgacaaggaagggttttacacggcggcgttgtggctccatggtcgccatcccaaaaccctagcttgtaacctcgagtctctctccaaatttggctattttaaagattttccggagattctttaccggattctacaaggacctgaaatccgcagtatacagaaaacgcaaaggtacgatacaatagccgcagcatctctacgtagaagatcccgtttctctagaggtggtcgtggttttggtggtggtcgtagtaggggtcgtcattttttaaaaaggtcggcagccacgagggagctaagggtagcgaacgcggagaggaagaaccaagaggagaaagccagagcaagcttgaagcgcaagcaaaagaaggtttcaatggcgaaggctgcatctacaaagtattctaacgatccaaactataggtttctccacgaacgtgtctctgaactattcgcaaatcaactaaagagagaccttgagtttttgacatccggccaaccaaacaaaatctctctagcggctaaatggtgtccatcccttgattcttcgttcgacaaagcaactcttatctgcgagagcatagctaggaagatctttccccaagaatcattcccggaatacgaaggcgtggaagatgctcactatgcgtacagagttcgtgaccggctaaggaaacaagtccttgttcctctccggaagactctgcaactccctgaagtatacatgggagctagagcttggcaatctctcccttataaccgtgttgcatcagtggcgatgaagtcatacaaggaggttttcttgtatcgtgacgaaaagaggtttcagcaatatcttaacgatgccaagacggggaaaacgaagatagccgccggtgctgtgttacctcacgagataatcagagagttaaacggcggagacggtggcaaagtcgctgagctgcaatggaaacgaatggttgacgaccttaaagagaaaggttctttgaccaactgcatggctatatgtgacgtttcgggatctatgaatggtgagccaatggaggtttcagtcgcccttggattgctagtctctgagctatcagaagagccatggaaaggaaagcttataacattcagacaaagtcctgaactgcatttggtgaaaggagacgatttgagatcaaaaacagagtttgtggagagcatgcaatgggatatgaacactgattttcagaaagtgtttgatttgattcttaaagtggccgtggaaagcaagcttaagccgcaagacatgatcaagagggtgtttgtgttcagtgacatggagtttgatgaagcgtcgacttcgacttcttcgtttaataaatggagaagttcacctccgactccgagtaatagatgggatacgctatcatattcagaggatgatgaagatgaagagaatgatgcttggcaaacggattacaaggtgattgtgagaaagtatagagagaaagggtacggagaggctgtgccggagattgtgttttggaatctgagggattcgaggtcaacgcctgtgcttggaaacaagaaaggagtggctttggtaagtgggttttccaaaaaatgttcttggattacgatggagagattgatcccgtaatgatcatggaggctgctatagctagagatgagtataagtcgcttgttgtaattgattgaaaactatagagattttgtgagctttgtaacatttggttgaatctttgaataaaatgaaactttgaattacatttatttatttcagtatatgtatttggccccatatatatatatatatattattttttttctatcttacaagcttcgaatgataattcttgtaaaagttttgtaaccaaagtgggcaagtaaaccaactaaaccgagcagaatctcatggtttaactgatggaggaaaaactttttttgtcacaaagtaaatgttttttttttttggtttagcaagtttatttatttgaacttataaatccatagccctttttctttgtccctctgttaaaaataaagtaaataaaaaaacttgtaatattggtaaaaataaaagattgttaataataatacatggactcagactgagtcactcagtgaaattaaattttgtaaacccaatattcaattttcataatctcaaattttaatcattaatttttctctaattaaacttattcaactaataagaaaacatatcgcacattacaaagatcaaaaacaaacaaaactaataataataattttgaatttaaacttaaaacattaaataaaacgaaggtagaaggtacatttttaaataagatgaaggtatcttatatcttcctaaattcaattaatgtatccaaaaccgttatcttagctgtcttgggtaaaacagtactgaattttttttatgaataataggactaaatccaaaattaaattttagttacatgcacttatccactgtcaaatttgaccaggtatgaattatttatgatttagctatctatcagatttatgtctttatataagccacctcataaacacaaaagaagaaccagataggaaacaaatgtacaaagaaacatgatttttctgtggacaggtcatcaacataaatggtaactaaaattatatgtttttctttaattttttcttaaattggccaaataatattttgtttataaatggaaaaggagatagccaacaatcctgtcaaatttgtttctgtttgagtttgtctttctcaatattgtttctttcttaatacctctctctctcttattttctttctgttataacctattaaactctacataaaacagcaaacttaatctgtttctggtttttataggactgttgggtattttctatgttcttcgtataaaactcatcaaaagttttgagagatattttcctatattatttgctagtaagagaggttttcagacgaagaaaaagaaaatcttcataaaatgagttgtttctcgtgcttctcttcaaaagttctggacaatgaaggttcttcgatgcctgctccttataagcaaccaaactcacctagtaagctctcgtcaatattcttggaaatgtgcacgtttgttattttgtctacatcttttgatttattatagaatttcttttaagaaaatttatgtttatgtatttctcttacagagagaacaacaggagaagtggtggctaagaacgcaaacggaccatcaaacaatatgggggcacgtattttcacgttccgtgagctagccaccgcgacaaagaattttagacaagagtgcctcattggtgaaggtgggttcgggagggtttacaaaggaaagcttgaaaatccagctcaggtaaaatctagacacttgtggaccaatatttttcgattaatctaaatttcgatatagtatttaacggttatatattaaaaaaaaaatgtttttgtcttacaatagaaaatagattcaaactcatttgtttattttgtttggggtatgatgatcaggtcgtggcagtgaaacaacttgataggaatggattacaaggacaaagagagttcttggtcgaggtcttaatgcttagtcttctacatcataggaatcttgtgaatcttatcggttattgcgctgatggagaccaaagacttcttgtttacgagtatatgcctcttggatctctagaagatcatctcctcggtaaatcattatttctcaatcaacatttcaatgtttttttaagaaaaaaagataacaagacccggtttggtgatcatttaaattaaaacagatcttgaaccgggacaaaaaccactagactggaacactcgtattaagattgctttaggagcagcaaaaggaattgagtatctccatgatgaggctgatcctccagtgatttaccgagatcttaaatcgtcaaatatattacttgacccagaatacgttgcgaaattatcggatttcggtttagcaaagctaggtcctgttggagacacactacatgtgtcttcccgagttatgggaacttatggttattgtgctcctgaatatcaaagaactggctatctaacaaataaatcagatgtctacagctttggagttgtgttgttggaacttatatccggaagacgagtcatcgacacaatgagacctagtcatgaacaaaatctcgttacttgggtgagtatactttattaacttatatgattttactaacggcttatcaatgtagacactatttaacaatttacaactttggtttaggcactaccgatttttagagatccgactagatattggcagctagctgatccattgcttcgaggcgactatccggaaaagagtttgaaccaagctatagctgtagcggcaatgtgcctgcatgaagaaccaacggttagaccactaatgagtgacgttattacagccttgagctttcttggtgcatcctcaaattcctccaataccggctctaaccatttgcaacaaaatcgatccaacaaatatcaggatgcagttcagtgggactcaagtcctagatatgctaattcgcaaatgtagacatttttatattttatatgacccaacaataattcacaacttatgtatcttccctttatttttacttttgggttatagtttcatctatttataatgaatttattcataattacatttatggttttctcaacgtcaatttcatttattaacgtattctaaattaatcaaacatatctcttctaaattgcataagataggccagtttagcctaggagtacactcacattccatttagaatagagaggcaaacaaactcattagtgttaatggtaatgggccgtctatacatttctgcccactcttttgagccgggcctcgtcgttcgatagggaaattgacacattgtagtcggagttcatagcttgtgatgtaaaactctccaaatgcttgggttatttcatttactgtatataaactaaacagtataataagatgatagtttttttttttttttgtgattagcaattttcaattaaacaccaactaaccattagcatttcaacggaaaaataaaaagttccaacaaaatttaaatacgtaagaatcaataaataatattgaaaatttgaaatcccatagaactgggcaaaaaatcggactgaatactcgaaccgtaattattccgaaaattggacttgaattcgaatcggaaaattcaaattcaccttataggatcttaaacatttctactcaaaaaaccgaatccgattctgataaccgatgatttagatttgttttactaatttctaaatttttatacctgatataattttatctgaactcgattacccaaatatctacccttatatggcatggcatgaaacatcatctctcaagaatatagtaatgccatgaaggaaaattggcaaataaaaatataaaatatacatgaaattctttttttttaaaagttttgtttttgcttatagtaataaactataaattaatttataattagaaaaaagaaagaagaaggtacggcggtggatattggcccttgccgcaaaagcaaaagctatcgccaccaccgtgtcataaatctcagatctctctctctctctctctctctctctctctctctctctctctctctctctctctctctctctcttgcgataacaatggccgaaactatgaaagatattacgatgaagaacgatgaatcacaggaagaagaaatccccgatcaatttctctgctgcgtttgcctgtaagcgttttctctatatcacccgttcttctctatcaatttcgcgagtgatttaggttaattttcgggggaattacagtttagctaatttcgaaaaatctcatgatgcaattgtttccattgttctgattatctataatcgatttcgttatctctacaattttgaagattaaggagttcttaatctctgtgtgtaatcgtaatcgtaattcgtatggctcgattgaagaatctgttcgtttatcgtcttttatggcatcgattgtgttgttcaatggatgacaaatatgtttatacgacactaaccatgcacaaattgattatgtggttgcttcttgtgcagggaacttctttacaagccaattgtgttatgtaagtgttgactaagtcataagagaatctcaatttttttttttatctggttaatgacttttcttttgtatggaattggcaatgaagcttgtggtcatctatcatgtttttggtgcgtacataagtccatgaatggctttcgtgagtctcattgtccgatatgtagagacccgtatgttcactttccctctgtgtgccagaagctttattttctgttaaagaagatgtacccacttgctcataagaagagagaagaacaagttttaagtgagttcttgcttgcagtttctttgtagttgttctatgcaagtgtcatttttgttggttattgatttgttaatgtcatgtttcagaggaagagcaagaacgagaatgtttttctcctcagattgatcttgttttggatttgtctgtgtgtagtggagattctctcaatgtctctggtgagagttccacacattagatcctttttctgtctagtaaaatgctttctgcttacaatttgatgtgtgtagataaacagaaggtggaagagtgttcgaatgcagcgaacttattatctagttcatcaagtagaggtgacattccatgtatccccaaaaatcaagaacccacagatgcaaaagctcttaatgttcatgaaaatgaattacttaaggataacaaagtcagtaagcagatttcgaaagatgatttgctctgttcagcatgtaaggagctgcttgtacgacccgtagttctcaattgcggacatggtatataatcttacatgtttgatttcgataaatgtcatgagtattcgctttatgtgctaatttcctgttttatcttttccagtgtattgtgaaggatgtgtagtagatatggctgaagaaagcgaaaagatcaaatgtcaagagtgtaatgtttgtgacccaagaggatttccaaaagtttgtttgattcttgaacagcttttggaggaaaactttcctgaagaatacaattcaagaagcagtaaggttcagaaaacgctcgcccataatagcaaaggaagtaagtccgacattcatgccttgaaccattttgtagttatcgacatgtatcatgtccttgtgctctcaaagcttagttcttgttgttacacaaaatatgtgagacctatacacagagactcacagtttgtaatcgttttatcttgatgtttagatattcaaagctatctcaaagaaggcccgtccttatcaaacgacaataacaatgatgatccctggttggcaaaccctggatcaaatgttcactttggagctggttgtgattcttgtggggtaagtgcattattaccttaacccgattgttagttgtgaaaccaaaatatgtgaatcgtaatttgacactggtgcggtttgctacaggtgtatccaatcataggggatcgatacagatgcaaagactgcaaggaggaaattgggtatgacctttgcaaagactgttacgagactccttcgaaagttccagggagattcaaccagcaacacactcctgaccacaggcttgagcttgcacggtctcctcaggttctgatcaatttcaattctatcggtatccttctcggacccgttatctcaaatgaaggcatggatacagatgaaggcgaggaagggcctcctggttcttctaatgagtcatcaagcacagaatgaaatagcagtcaagtattaatgcatatgctttcgctttgtgtttgcgtttgttattgtatttatacttcataatatattttctcctgagaagtctatggttttaacattttaaacaaagtttatttcttaacaaagtttgtttgcatttgtggttgttaagtcacctcttttgtttatattacctttaaagtgtgatttattttaattcctctcattagtacacaactattattgttagtgtaaagaatccatttaacaaaaaaaaagatagaagaaattatccatttgagacaagataattgaatacaatagttactaaaaggttaactagccaaattatttgtttgaatgattaaaacttttttttgcacaaaaaaaagatgattaaaatcttttttaagaatatataaaattatgtataaattaaattcttagatcatttaaatacccatattattcaatattcatactgaatccgttatccgtatcattcattttttttttaaaaagtacagttataataataattgtaatatcttaaattacacttattcgattctttcagttattatccggtatttatctgaaaaagaataagtttagtcatgtaaatgtaaaaaagagtgaacttttgaaacaattgaggcatgtgaaagcttttcaatatacatattggcttgaacttgaaggattgctaatagatagtaactggattcaagggaccccatcaaggtgaaagattcgctcctctgagtgcgtgtgaggcagctacgatgtgattggtcggagtgtggaacccatgactgctcttacgtcggaaatcgtttctcgggttctgtcttttttaaaacactttattattgtattaaaaagaaaataaaggaaaaagttttttcagtacgagcgtgttgtgataacagttttttttttttttttggcgccctgaaaaaaagggcgggaggacgtgaagagtgttattgcagatcctttatttgttttttgttttttttgcctttatctctgatttttggggattcggtagcgttcgagatctgagctgttgcatgattgctgagagtcatcgcacgtgtgccttccttctttgtacggtgaaaatagtttttaccatatttaaaccggttataaagttttgttcaggtttaaagtattatgggctagtagtgtgatctttcgtgtttggatgaactgatgaacaaagaaatatctaaagattgtacacagtgttggtcatgcatacgatttgaagcatataaaatcatgattcatgagaatgtccctttgacatcttcgataaaatcatgagaattatgaattatcgcaagctttaaatttagagatttttaatgtaattcatcttcttcaataataataaacctctcgattaagaataataagcaccggggcattgacattgggagcctctactcagtactcaccttgttgttgtttcacgggttacatatatattaatataagaaggccttttaacaaaaataaataaatataagtctgatttaatgtataaatgtatatcacgtaacagtagattaattagtcgccgcatcacgattcttgtttcaaagaaacaaaaaagaataagactgtgtttgctacacaaaagaaatgtagaaaaccaaattgagtcatatatttacatttcagatactataaagtataaactaaattttatgtaaaggaaaattaatttttctatttagacgtgagtataagcatgtagtcagaccaactttatttgttcgacaaatttaccaacaagtcaacttttgaagcctaatttatgaaagataatctcaactattacatcacaaagagaacggttgttgagatgattacataactataaaactagaagcaaccaatataaatgtccaatgctaataaatccaaagaaaataaatacttaggtaagtgatcaaccctatgatgttaattttaagacacttgtttacttaaaaaaaaaaaatttacagtcaaatgtatctgtatacaattaatgtgtacgtttttgtcaaatgtgaagaatttaatagatggttgactctttttttcttttgaaccaataacctgcatgacatttgaaaatctgaatgctagcttttgttttggattgtttgtacaaagttaacgttgacttgtctaccaaattttatgaaacaatgaaaatggatgcaaaaaatgaactgccttattatcttaaaccaaaacaaatttgacacatacaacgatctttgcattatttaacaaaaataactaaaaatttccacacgatatcaattgctttataatcatggatggtctaccaaagcaattaatataagcttgatgatctttattctcaaagaccttgttactttcggcagccttttattatttgttgcaccaaccactcataaactttaaatactatatatatagtgtatagaataattggaatatatatttccaaaaatgttcttcatttgagaactattattttatgttattttggagtaactaagaattaattatataatataagtgaaatatagagtcggaaatatgtcgtttactacatgaattatcaaaaagttgttatttaatacgtaaattttatatataaacatttaatatatgtaaaaattattgaccggttattttacacaaacttaattgtttatcagccaaaatttataccaacgtaaaaaaattagataacattaacttagtgtaaaataacttttttctatatattaaatgattatattcaaagtttacgtattaaatgaatattttttaaaaatttgcgtattaaactatatttttctcaagcaaactcaaattaatactttaaatatctcatatattgttcataatttacttttgtaaagtagacttttaagttttaatcagatagaatacaaaaattaaattaaattccaattaattaaattttgatttatcttttttcgaagaaaatgatgacaatcaggtgagagggcctttgacaccttaaaaatttgtctaatttgttttttgattcgattttaaaataaatatttccattgtccttttagttttcactttttcagattaaaaatcacttttttcctcctccttcgttgcttccctcctttcgctctcgaccggagattcagtaaaccaccttcccggagatgggaaaatacattaagaagtcaaaagtcgccggtgccgtttccgttaaggataaatctcacccacccgctctaggtttccgtaccagagccgccgccgctaaaaacctcgccctccaccgtctccgttctcattccgacgaagcagactcctttaactacctccagctccggagccgccgtctcgtgaagcttccattactcactaataccagaaaacagcagaagcaacagctcattcctagtgtcaatcaatgtcaaacgaaaaaccctagggctagttccggtccggcgaagaaattagagccggatacgacgacggaagaagcttgtggtgataatgagagaatatctaggtctgattgtaattttggagataaaggttttgatttggaatcagaaaacaggtaactttaactctgttttttttttcattttaaagctccaaactttttttttttactacaatacagagattgagttttgatatgttggttctctcataggagcatgataagtgattcaaaatcaatacaaagtgagattgaagacttctttgctagcgcagaacagcaacaacagagattcttcattcaaaagtacaaatcccattttctttagtgtcttgattctcttgagtttttagagtttggtctgactttgggggagttatggttttgcaggtacaactttgacattgtctcggacaatccattgcctggacgttacgaatgggtcaaagtgatgccatgaaatgagttgtgttcgatgtaaagttgtgtgctttaggaaacatctgtgttggaacagaggagatgaaaattgcacacagactaactttgtggggttttagggttggtgtataacttgttagtcaagaataatgtaatgttaatctctctcatttgctacaaataaatgtctaatttaactgtcaagttacttaaattagtattgtaaatctcttcattgttctttggttacttcagtgaaggtctgagttttgtggttctgcattagagttactttacaagtcatatactttggattcaagtagcaaaagtagtgaacttgtctgaacaaaaaccttagtcacaggttttatctctatcttctttattgatagtttgatactctaatctcattgggcttttcacacatgtgggtacttgtaccaattcctctgtcatacaggttgcagtaaaatgcttcgattagatttcatctctctcttctttattggcactgcactcactgtcttgctttctggaattatttcttcaaaagtctaagttagtagcacctttcatgctaaagattaggtttcttggtttctgtaaaatatttcacctctttagatcatttgctcatcggatgaatcaaaacattaaataatgatgtctattcttattagtacaaagcgtttaagaccactgtgttatgtctgatactagtactaaattcacatgatcatttacatctctgaagaatcaaaaccttcttggttttgtcaccttttaacacatgaacaatatttactgatcaagccctgcttctccgatggttcagcgtttttgtttggttaatttgtgagcaaaactgcaaaagcaagtcataggatgcttagagtgatttcattctcgttgataatagttgtattaagtaaatacgtagtctgtaatattacagtacctgtcatgttccatcccaactctaccaccgaagcttcacggagttgcaggtcctgtactcaacctttgctttgtttctgacatttcaacttcatatacacccttgctttcagaagttttactgtcttccatggccatcctcctgatttgagcctgttggattgctagcacctcatatctgcaaataatttccatgaactaccaatggttaaactcatatttctcgtgatctttattcatcactttgttacaagctaaaaacccatctcactatctctatatgaaagtggaatcatacacagaacaacagagtaaggtgcatttaacacctactaagggcattacacctggagttatggaaccatctcaaacgaaattttttggcataagaaagtacttactttgccacaatcttcctcacaagctggaaatatatcctccaaaactgatgttcctttaaaactcgcgggcataacttgaatctcaactgtgagagttcctgtaacacgaaatcaatcttgtttagagcagctttgaaaatagattcgtttaaacccaatggtcctatcaaccaaattcaattttaccaactgtgtaacaaaatcatcttgaactgcaaacacgagcatgtttaccattttcactaacatgagcctaaccagattacaagcaattcaggaagatagtagcatcaaatgaactataagattcggcacataaactctgatccgattctgattcaagtgataccagtggaccaagagctctaccactaccagttccatccatttagaaatcttgcttagtcctaaagagtaactttcaaatttccctataagattcgatccattgctcctaattgaccaaacccaaagctacaagcaaatcaagaagacagcaactttctataggcgctataagaatcatcaactcttatttgaatctaatttaaatagcaccgttagctccaaaatccaatcattgatcatttgaaatctctacagacaacagctacaaattccattcatttcaacacaagttcaatcatcaaaagaagcaaaatttaggaaatcaagaagacaacagctatgtaataggctatataagaatcatcagcccacacactcagatatgaatctaactttaaaatagcaccattggctccaaaagctaaactttgatcatttgtaatctctacagctaccaattccattcatttcaaaacaaaagtcaatcacaaaaagattcaaaattcaagaccaaaaaccttcgatttcgataacacgagaaccgcgtgtttctcctgccaatcagacaaatccttcttcacatttgcagatgaactcattccattatcttcatctcccaaaggattcacagatacttcttcttcttcatctgttttagaaattacaacccaaactactaaaatcaacttcataaatcacaaaactaaaaaaatcctaactaaattgggatccaattttcgtaattaccttccagagagaagttcttaaacgtatcaatggtgaaggatctgacatgatcgattaactcatcagtaactcccaaaatctcatctttaccttcttccttaacactcgatccattcttcaagctattcccatctgaagattccttcttctctcttaaaaaacttcgtcgaatcctcgaagctatattcattgctgatcctgtgaagaagaagaagaatctgaaaatctccaatgccttagaaagtagaaaaaatgggcctgggcatggcctgttactgggctactgggccttattataataacaaaaggcccaataaattagggtttagagaactcttaaccctaatgtcgcatcatatataaagtcgccattgaagtgaagctgagatcttttcgaagagcggaagctaaggagaggcgaattcgaatcgagaagatggtgtctgggtcagggatatgttcaaagcgtgtcgttgttgacgcacgtcaccatatgtgtggtcgtcttgcttcgatcatagctaaagagttgctcaatggacagagtgttgttgttgtccgatgtgaggagatttgtttgtctggtggtttggttcgtcagaagatgaagtacatgaggtttcttaggaaacgcatgaacactaaaccttctcatggtcctattcatttccgtgctccgtctaagatcttctggcgtaccgttcgtgggttcgtattctaatctcacagtcttaaagttcttagcttagtatgtgattcttgaaaatgaagattagaatttgagtattgggtttttggaaagttgttatattttgtgtagcttgttagggtttgcatcaatggatggatttgtgtttaggttggttagttactattaagtatgaagaaatggtcagcttttgatctttgtgcaatgatgtctgtgttaggaattgtatgtttgatagtgtgatggaggatttgaaatgtgatcatttgtcatttacaggatgattccacacaagaccaagcgtggtgctgctgctcttgcacgtttgaaggtgtttgagggagtaccacctccttatgacaaggtcaagagaatggtcattcctgatgctctcaagtaatgtttctgcaactttgttctatcttgtaattttggttatgttcaatgtgttttagctgtcaactggttttcgtttgttttgttttgtttagggtgttgaggcttcaggctggtcacaagtactgcttgttgggacgtttgtcttctgaagttggctggaaccattacgataccatcaaggtatgtcccttttgtccttttcgtctgccttattattggaacaaaaggtgcttcatttactaaaattgtatttgtaagtttcctatgagttgatttgaatagcatctactgacacatctttgtcattgttctgggtcttttgctgattgttttaatttataactgaagatcatatcattgtacttagtttagtcaggagaaaattatctcacttaatctgtggaagaaactgggaatttactgttggtttaatgattttacaggagcttgaggtgaagagaaaggagaggtcacaagctttgtatgagcgtaagaagcaactcaccaagctcagggcaaaggccgagaaggttgcagaggagaaacttggatcccagctcgatgttcttgcatcgatcaagtactgaagaaaatcagcatctatcttttggtttaactcttgttttggtttttatctattcagattttgttttcttccttgtatcactgttgaagtttatcacctcatttcagttttatttatcagttgatacttcaatccttagggatgagttctataacttctaagcgtcccaattatgttaatcttctacaaatattcttcaatccaaattcactatatggcatgacagttgactaaggaactaacaaaattctcttcttcttcaggctagtttgtgtaattcttaagattttactggagatattatatcaaataagaggtgcgtaaaagtaattttatattcaaataaaaacattttgccatgaacaaaaaaaaaaggttttattatttcatatgtaagcaaggccatgaattgatcaactcacgtggtctacctgtccctctccttttggacctaaagttagctacgtggcacttccttatttccgtataaaatctgcgtcggcacttaccacgtgtcatacaactagtggagacaacatggaaaaaactattctgtcggtggacccacatcagatttttaattccaaaaataaaagttacacataaccaaactaatactgttaaaattgacagttatggttagcttagcgcttacgcgtaccgtaaccaccgctacaacaaccaagcggtcgttaaatctcgccgttaataagaagttaactaacaacacctttatctttgactagccgtaacgttaattactctccaaatctcaaagcattgattaataaaacaaatgttgactaataaaatctccggttaaacctggtttacttaccggtttagtttcggttttcatttctactccatgttaaagcaagctataaaaatggcgaatataaccatcgtgaaagctttctctctcttcttcttcttccttcttctctgcatttaattttgggtttgaatacgacgcttcgtcttcttctttctccaagctacgttccgaggaaaactttatacgtatatgtatataaaagatttgactttgtaatctgaaaacgacgtttttgttgaaagagagagcttttttttccttctttacctaaatctggaaaatttaaagaaagatttctgattttgatactccgcgatttcgtgagatcgcttgttaggtaagaaaagaattcgaagacgaaaaatgtcgaattttgagaaaatcatttctggtttttgtttttctggatctttgaatttggagcaataaaggatcagtttttatttgatgattcttgtctcttgatcttgggtttgatttaaaattacgatttgatttgatgattcgatttcatataaatctgagttaaatctacatttttgcagatacataggttttacattattatcatctgtttctttgataaaaacaaatgccaggtaaattttcagatattggttttgaaaaatctgattgcttttatgtgatttttgaagtatttgattatgtttgcttttattgttgtagcattaggtgagatacttttggttccagaaactgataaaggaaagagtaaagattacattgaggtttcagaggatgagaagattacaagaactcgttctagatctttaaagaagaaagctattaaagcttcgaataaattgacacatagtttaaggaaaagagggaagcgtgtcgctgatcaatatgcaccaattgtgattgaggatgtgagagatgaagaagaggagaaagcagtgaatgtatttagaaaagctttggtttctttagatttgcttccaccacggcacgatgattatcataccatgttgaggtaatgtgatactactgcaggatcatgtcagtgagtattttggattgtgtcatgatcagttttaggtttgttgttgcagattcttgaaggcgaggaggtttgatcttgagaaaacagttcagatgtgggaagaaatgttaaagtggaggaaagagaatggagttgatactataatacaggtgaaggataagaaccttccttgagttagtaaagatattgttgttttatgagtgtgctacaaagacctttaaagtttagaattttgctaagaatctttccacatgggttttgttttgctgttttcctaactggcaatgatgacatattccttcaggattttgtttatgatgaatatgaagaagtacaacaatactatccacatggttatcatggtgtagatagagagggacggcctgtttacattgaacggcttggtaaaattgaccccggcaagctaatgaaggttaccacattggagcggttcttgagatatcatgtacagggttttgaaaagactttttctgagaagtttccagcttgttcgatcgcagcaaagaggcacataaattcttcgacaaccataatagatgtgcatggagtggttggtacctctacattcctttctcaacattctgtttcagtgcaaccgggacttctgtcacatccctgaggtcttaaatgcttcttttgatgcagagctggatgagctttagaaaattagctcaggaccttgtaatgcgaatgcagaaaattgacggtgacaactatcctgaggtgggtgtatgaaagttatttgaatggcaacctatacacttttcaccattgaagaacactaacattggttttggttcactgaagacagacattgaatcagatgtacattattaatgctggaaacggattcaagcttgtttggaacaccgtgaaaggctttctcgacccgaaaactacttctaagatacatgtatttcatcttccacatagataagacttatacaggacatttgagatgcttcaacttgaccaacaatttacattggttattgcacaggttttgggaaacaaatatcgcagtcaccttcttgaaattatagatccaaggtcagaatttatactgtattggtggcaacccaatataatccacttttgcttagttgtttggaggctgagacaaaaacctctgttattttctttacacagtgagcttcctgagtttctgggtggaaattgcaagtgtgcacatgaaggtgggtgtatgcgattcaacaaggggccttggaacgacccggagataatgaaagtatgattcttttctgctcaaatttttgtgtagacactggtatctcttgaaaagcattatatgataaagtctctgttttgcatcatacttgtagctagtgcgctcgagagatgcaatgtacaaaccaaaagaaatggggcttctggagaatggggaagtagctaaattattttccttacgggttagtattaattctagtcaacttgtaacagctactggcttctgttactttctgtattaatatcaccttcccatttcttttagcagcatgtgaacacagatatgtcatcacctgatggaggccatgttagggagagagaatcgcatcctgaacatgttagtttacgtatataaatagtctgtttatgtttgttcatgttctaatattgtcagtgaatgattatcgcacattcttatgtatgcaggacaaacgtgctcagctgagcaatcaagctgaagcagttggtgttgggagaatggaacagtctgattcaacaagtaggttaaacccactctgtgtgctcatgtcatgatccattttagacaagattttaataatctctaaacacttttctgcaggtccattaccgaataatctggcagtagaaaggagtttaacgacctctcttcagaaagttgcaagttttttggcccgttttatcctccaacttcttggcagtctatgtctcatgttccggatcttgggaagacttgtaaataagcaaccagagaaccaattgagaccggagttaagtgtttcagtctcccagcaacaagttcctcctcctcaggtccatccatgttggctgaggttgcaaaatctggagaccatggtcacagttttgtgtgataaaccctcaagtattcctcaggaaaaagaagatatacttcgtgattcattagaccgtatcaaatccattgagcaagatttgcagaagacaaagaaggtaaactatagacattcactgatttgtttcaatatctatatatctctccaggtattcgacgtaagttaggatttaatggtgacaggcgctctttttgaccgcgtcaaaacaaatagaactcgctgagtgtttcgaaaacttgaaggagagcagttcaacggtaagggattagccttcttaaatgtgaaactcttgagattgatctctgagtgcaccaatatgaaacagtcttcttctttgcttaacacagggaatgcgatcatgctggccaagacactgcagaaactttcaagctgaaacctgatttgcagaataaatttatcttcggatctcatatccgaagtctgcatagctactacttcacccacttaaccatattacaggtgagagagacttcacacttatctcttgtcatatcccaactaaaatctgtgttcgttatgctcacttagactacttatccttcaatggtttttgttttttcagatggtatatatatataaaggcaaaatggtaacaggaagtgaaattgaagaggaaaaagcttacaaattgtttagtagcaagcaagcagtgtttatgtaccagtttctttaggttagaaaacagaggaattagtgaactatttcggaatatacttttttttttccataacgattctattgcaaatcattgttgtatactatataatccaatagtggtgattgtcaaaaaaaaaaaaaaaaacagatgagttttacaatttacagtgttgtgtattagtttatacttacaatcacaatttacaaatataattacatttgatggtcatgtaaagagagaaagaaacagaaatgaaaattagttagtttaggaaacaccgacacagagactacatcgtaataataaggttagctaatccatattaacgaaaaggaaatcaaacaacgtaacggctataattagttactaatcagagtaattaaactactaaactcaaagaaaaaaggaaaccctagatctaatgtaagcactaagcagagagcgtaactatttatttaaggcaatagaggctctctctcattcgcatatttctctctgcttctcttatttccttgtgcctcacgttgctctgagaaaaacttgagttttcggttccatcacaaattcacgatgagtagtatgtatcacgattacgatcatctcacggcttcagggaagggcctgtggtcgaagttctatggactggtggatgcggcggttttgttatatgatgagatacaacgtcgtggcaagatcgtatctgaagaagaaagccagaagagaatattttgtctcttcccgagaagaaaaagatcgtctttggtgaagagacaacaaaagcttaatggtggttttatctcttttacttcttcatcgcttatcgatcttaaccagttgccgactgattctgagatcgaagacccacaaacctctgattcccagatgaaaaccctacaaaactctagttctgaaccttgcacttcactcgtactctttgattacaaaacggctgagtccgagaagatggaggcgaaaaccctacaaaaccctagttctgaactttgttcatcactcgtactctctgattacaagatggctgagtcggaaaagatggagacgaaagacccaccaaaccctctgtctttgtgcctaacggggaacacaagccgcaagagacgtgctgtggaagagaggaaacgtaccggtggattcaagaaggcaaaggttgctccttttccagggacagcgagagatacgcctaagtggcttgtcaaggtgatgagagacatgaaagaagccaaagatgctaaactgatctttgagaagactctgtttgtgactgatataaacccaacacagaaccgtctctcaatgccgttcaacaacttactccaaaacgatttcttgacgtctgtggagtccagaatcataaaggaagacatcaacaacaataagaagattggagtgggagcgattctcgtggatcaacggtctgtaaagtggggtgtgatgttgaaaagatgggagctgaagaaggaatcaggaaaaggaagctggaactacaatctgatttgtgggtggaacgatgtcgttgaggctaacggattgaaagaaggcgacaacattagtgtttggtcgttcaggtgtcgtggagtcctttgctttgccatggaacagagtagctcttctcttgctctctgtctctgctaagtatcttatgtctgttgtgagtcttgtgactataacttggttgattaacacgcacagtgattttcaggagattctgaagattcttttgtctagtaatttcttgaaagagttaaactaaagaaacttgggttcctctttcttcttagtaacttgttccttctattgtttcagatcattataatcgtatgtacttagcacttttgacatgaatctggtttgttgtttggtctactttagttacctttcgatttcttgtaatatatctcaaagtctaattttgtgtgatgacattgatccaattgtgaaaaggttacatgttatggtacattcatgagaaatgctcaatacaatcaaaaccagggttgttttctactaagtgacaggtttctactaaatgatcaaatcaggaacaaaatttgttgccaatgacaggttttgctacaattgcttccttctgccacttgaataagtacgacgtcctttaacacagggaatgcattcgtgctggccaagacactgcagaaacttccaagctgaaacctgattatatttgaatctcatatccgaagtctgcattgctactattacttcaccctcaaaccatatatattacatgtgagagacatcacgctcatctcttgtcatattccaactaaattttttgttcgttttgctcacttagcagccgttgatggaagaaggaggaaattgcagtgaagaggatgagaaacgattagagagaaaatgagaggaggatctcatcaacgcaggtttgcctaggcacaacttggaaggctggttgaaaaacagagataactgcagtagtggctgaccacataagctgttttgctgtttgcagcaaaagcaagaccatctttatcgaagcctccagggaatttttcgtcgcgggaagaacacaatcctttctagatgatctgatacagaataacaaaaaaacatatggtgaagtgattagatcgactttagctaagactatctgaatataaacccagtaaacatatttgggctttctctcgggtataaacttgctcaccaaatatgctgaagtgattgattgtttcgaagaatgctaaggcatcacctcaaactcttggtttgtttcatggagaaaagttgcttctccttgttctacttgtcagttgttaggaagaattagtcaatttctcttcaatgaatccctacaagttagactattgtgttgaataagtaaaggagttctgcatgagtttatctcttttgttcctccgatactttttacttcctctgagtaaaaaaagagaagtaaatttttacttcctctaagtgggttggtctagtaaatttttgttgggcccaaaatttaaaaaatcaacaagaagacaaaaaaagcccaaagatccgagttggagttaaactgacaaaatccgaagcaccaattaacattgttacactaaaccatggcgacgccttcgccgacctcctctcctccctctgattcaaaccctaattctgccgctactccgccgcatcagaaacaaccaccctctcctcctcaacccacgaatccatcctctccaccaccgcacaccaccgtcgtagctttagccgcatcaacctccgccgtcgccagaaaaacccaacctgttctctggactcaagacgagaccctcctcttaatcgaatcatacaaagagaaatggttcgcaattggtcgtggtcctctaaaatcaactcactgggaagagatcgccgttgctgcctcatctcgttccggcgttgaacggacatctacacagtgtaggcataagatcgagaagatgcgtaaaagattccgatctgagagacagagtatgggacctatctcaatttggcctttctataatcaaatggaggaattggattcttcaaatcctgctccgatctcagctcgtcctctcactcgtcttcctcctaattcgaataatcgctacgtagacgacgaagaagaagatgaagaagaggataacaataactacgaagaagaggaagaagaagatgagagacagagcaaatcgaggagtattaattacatattgagaagacctggaactgttaacagatttgctggagttggtggaggattgttgtcatggggacaaaaagagagatcatcgaagaggaagaggaacgatggagacggtggtgagaggcggaggaaaggaatgcgagccgttgcagcggagattagggcgtttgctgagagagtaatggtaatggagaagaagaagattgagtttgctaaagagactgtgagacttcgtaaggaaatggagattcgtagaatcaatttgattcagagttctcaaactcagcttcttcaatttatcaacaatgcttttgattctttctaacgtagagatttagtcattgttgcttttagatttgtaacataggtaacggatttgaagaaatgcactatgtaagctaatgtttatgggagtgaagtgaactttttttttaaccataaaagaacaatgatacattcatcaaattaacctaaacctacaagagaataagttagaggaaaaggttaaaaaagggccctaagtatatgccacaaggatggaggagtagagacttctatacaaaacattataaactgtttctactctctcccaaaccaaaagatgggaagaagaagagactacttctctatgatgcaagtgggtaatttacattatgatataccttcttctctttgtgttcatcaaaagaggcaaaaagacctgcatgaattttatcctatccaccaacttcttccctattgatctccctctggccttaccaaatctgcaaactccacaatctgtagagtttgttatgttatactctcagccaaatccaaagaccaccagcagcttcaagatgttaatgccaaaaagagacccgactctgaaggtggaggacacaaaccagtttgggttcctgtacagggttgttgtcggtaagggccagcgttaagctttgcaggatctacagctactcaaggttctaggttcatctgtcatgcctctcattccacttttgtatcaggaggcttggaagatgataattcttgtgcttcttctaaatgaggctgctcctcagaagcaaggtgtttctgattttgtacagtcggcttctctggcaatttcggtctcttttcttctgaaggtagagactgttgttgtctctgtgtaacgcccttgatcccgtgcttttgagctagtccttggttcggtgttgatactggatcatttcctgctgaatctgtattggaattgtttactactttcgaagcagtgctttgcacagaagcaacacaagatggaggttccaaagcaggcaccgcagtagaaccaactgcttttatgtttttcaaatcattactcgcttgaggcatacccttggtcgtacccatactagcagtttgggtggtattggttacagactgtggaacacgtggcatacattcagcttgggacttctttgataactcagagttccctagatgattatgttgaacaactctctgagctgttgattgcacttgattgcgctgcttttggtgtatcaacaaatgctgatggttagaaggtgcaaccgctggtgcaattgacaggctagaggtggataaaatattacatggggtcgcaggtgagctctggccttggatgctattgtctgaatgtaattgcatctgttgttgaggggatggagacaaagcaccagggaatgattttggcagttgctgtgaatgatttgaagacaagggagaaacaaatggtttagactgcagatccgtgctcgtggtagtccccacactagactgctgatcaggcctaactgaaaccgctatctctcctttttcggtagcttgatttccttggggcatggtaaggccattcaggtgtgactgatcgacagtgatgttctgatggatcatgttgcctctacccatccccttcagttgtttattcagctgttgaccttgtgttggctgccgctggtgtggatgctgtcttgcagactgctgaagttgtcgctgcctttgttttccagcttgattgttcactccagaagtaccagactgaggactcctacccaaaccatgaagcgccaactgagatttttgaggtttctgttgtgccatagcattaatattaggagagggcgacaccgggggcatggataatggctggggcgaaacaggtggttgagtctgaggactgttttgtgaagaagaagaaacagaagagccctgaggttgttgtacatgtggcatcatagaaccagatgctggaaactgctgttgctgttgctgcaaatacctctggtgaatttgtctttgacggatagcaaatgcttcctgctgtgccccagtggcttgacttgggctctggagatgaggatgatgcgagttgccaagcacatgtgactgcggtgacatctgatgctgctgggaaagatggcctgggtacgcctgaacaggagttgtctggttggtaaatccagaactcaaattactgaaagctgggatccccggactgttcccttgagcagcctgcatctgaaactcatgaatatcagtttttatcaccattgtagagttcgtaatgttgtcaacgagtttcaaaatgacaatcgaccagcggttgacaaaaattagaagcgctgaacgtctacaaactaaacaaagagcgagataaataagtccaggtagtgaagtaagaaatagatagttaagttcccacatgtgagaaatcgtaaaacgaagtgtaataattagcgtagcagtaaaaaaatccaagtagcttacccgcatcatatgctgcacagcttcacgaggcctgatcatggagtttccttgagaagctcctcctccggaatgaatatttccagtgtttggaattcctaccatgccagaggtatgcatattaccagtatttggcattgctgctgaggccatcccttgaaaaccaggccttgacatgggtgtgttcctgttcattccacttacacccatagcatttccaccaggaaccatgcgatgtccacgatcagatcctgagacagctgcaggagttgataaggagggctgctgcaggtttctaccagataacgtttgattaaattgttgtagtcggtgttgttcatcaagtggcaaagaccctctaggaacattgaatctaccatccctacaaagaaaaaaatatatcaacaatcaaaagaagtaataaccctcaagtaaattgagcggagattcacagacgtgtgcattcaccaaaacaaatcattcagtaaaagctctacctgacagaagcactctgtaggccagatgtggttggcaaattgttgctcagaacaacaccagatgatccaggagtggatggatgtgctccagaagtagggagcactggcgttccctgattcaacattggaagacctggattttcaagtgaaaatacatcttgacctgaagttgatgcgtcacagacatcaaggggccttcatccggagagtagcaaaatattagaatttgcaagagtagaagtcaagatgtatgtgaatacaaggaaacaacagaacttacgtaagaacacctccattcagattattcgggaatacttgagagagagccatgacttgtgaattgtgaactggtactatttgcttgggatcccgaccatcgttcttgaagatagatgaaacagtcgcaaaaatacaaaagcagcaacaaaaaaacagatttaggtccttagtagattcatacttcaaactacaatgtgacttcagcaaatctttgctaagatttgcagctatacttagaaacatgcagacctggtatgtcgagtgattgagatatgcctttcataccataaactttattaagcaaattaaaaactgaattaagcaaacctatcttctcaaattccatatctataagcaaaaacatttaccagctccagtgcaacttgaaaactgaattccgtgaacaaaagaaaccacagaaaccccgataacactctctggcactataagaaccctttagcattctgcccacaagggactcaaaaactaaaatttggactaccatcacccaacatatcatctccttgatgctagtatactacacagtacatacacaacgaactatccctatttccaggcaacagttgaattatgactagccaaaaaatgcagaaagaaatccactagttttaggttacaagcttggaaacagtaacaaagtagtaggtgaactaacctgtgtctttctataatgtaatttcttcccaatcaaacaaatcttctcaaaatgagacttcagggtatcttcctccattggcccttgcagtcgttgaaacaactgtctcgcacttccctgaatatcacagacatatccagggcatttaattagtctaagcatagaagacactttgttcaccatctcagagctatagaaaaacctttggtatgccaggcaaagtggatggataagactgagaattccctgaatcttctgcactatcagccccatcaccagcagttttatccatcagaatcttatgccggtccttgcactcagtcggattgcgatatatatactggagaaacagtggaaaaatcaatcagccagtaacaaataccagttgttcactgatacgagaaagcaataacctggacaacaatatccaacacaaccattcactagaatagaaaaaaaaaaaaaactattgaagtatagctctgccactctgttcgaaaggtaccaaagaaagaatcccaagatgtttcaaaacaacaggcacttaccttaattttaagagtgctgttcattgcatcactaatgagctcccagttaggccccatatcatgcaccaggacaacaagcgcctatatggtaggaaaaaataaattagatactcataaagcaaccaacagtacatcgatgttaatgaaagatgacgaataaaaaacctgatcctcaaatagtgaccatggatttccagaaccatgctgaccaggagaaatctgagaaaaacaaaattctagtttaaaacagatactttaaacaaagtgaatggagttagtaaaccttcaagagcataccttcaggccttttatttttctgcccctatcacgacctccaataaatttgatagatttgttggggttggacatattgctcatctgggaagcagccggagaaggaatcgatccagtgtgaggaatagccatatcaaaattattctctaccaattgcttggtggtcttttgcttctttgcactatgaggaccatacagaccttacaaaaaataattaaaatatgtcacagaattataaacgataaccattgctttagttgtataattggtggttaatgataagatgtacgtataaatgctgcttaaaacatgatatcctctaggagtattgtttaatttatacaggcagaggctgaggatcccccagccgctgaagaactacaatgcaccacaaagtaaaaaatgaatttgcaaatagtaccattcatatcgaaattattctctggtcgcttcttccagtggtccttctgccaaaataaggatgtattagaatcctctctaagaagtcaattactactaaatggtaaacatttgcaaacaatataacttaaagttctcatttcaaataatgggaaactgtcaatagtcacctcaagattaaaatggaaacaaaaaataactttgtttttaatccaaagagtaggactcaagtatcaaaccagttacgcaagaggcaaaaattattttatcacgctagtcaagcaataatattgattaattcacaccacctaaactcgcctttccctaaacatttgttcaaattgattcttaggattttatcatgaattcacctgttcaacatggactgacggattgagatgccaagtttggtcatatgcggagccctgcaacaaatgaaattgaaaattgcaatccaatgtcaactaaaactaatagcaactattttctgcaatagtaagagatatgctgatatttctaactacctgatgagtcttctttttctttttaggttttcctgaggtttcagccatgtcataaggtaacagcttttcaaaattaacacttgactcaacctctgtgcctttttggactgccgatccaccatgcaaactactatactcatcctggaaagaactagtatccccactagacgcatctgtcttcgagggcactggtaaattcccagtagtagcacacccaaaaggactcacaaccctatgcctggaagcagtgcgcactcgccttgtcggaactgagccggcattaatattactgtcaggcctttttactatcaaacttgatgagttagagccacctgtgttgttgacgtatggtaaatcgtccccaagatcatatgaccgggcagaatgagacttcatcagattcttcctttttttgtggcttatattaaatgatctgctagactcgaaagctcccggaagataataggtacttgtttctccttcatcctcatcgaacgcagtaacattatatcctatatctacaattagagataaaaaattagcaaaaatttaaccaacccgcgaagctcaaacaacccagaattgtgcatacctccagcagtatcataggctgatgtatcaacctcctcctgcatgctacttccagacttctgggaacagagaaatactgttaaatatctttggagaacagatatatattctcaggaaaatatacgccatcaaggttacaatatgcgagctcctagcatagaacaatctcacatacctcacaacgtgtaagatgcgactcaatggacttaaggtacacctccattgcaccagatggaactgaataaaagaggcttgcctgtacagtaataaagctcaattagcaataatgtagaactatccacaacaatagtgttcaactgaggctgcggaaaatcttttcagaaattcatacttctgtaagctgatcaaccatagatatatccaatatttctgggtcgcacatattgtcaggtgttgacagtgcagctgaatgataggagatggaagagttgttgtacttcaaaaatctacttgcatattccttgacacccgcagctaaacatcttatgccattcaaacaattagattcttggcaggtctcctgcatacaaccacggtaatatttagtttgataccattaagttttacaaaaatcataacataaagagcgacagaaccagagactcctgaaggtaattatcaaagacaatgcaagcaaataagaaagatcaggcttctcaatcataagaaggaaatatcagtagaattgtgttgttttgcagtctagtcacaaacataataatatggttctcagaattcaacgagtgtatgtataaattctaatttaaaagaaacggaaagaaccatatgatcatcattgtcatcaaaaaccataaaagaggtcagacagtcaaataccttaacaattcccaagctcgtctcctccagctccccaggaacctcggcctccacagaactccagaattgtaaaatagcataagataggactgaagctatttttttcagctttctgtgctgatttcgttcctcaaatctcaactgacaagtcaaagcaactcgatggcaaatttgtgtggcagcagtcattttccaaaggcgctcctagaagatgaaaagaaaaaaggtaacagaatgcaattagaacagtcacggaaaaatgttccagtaacataaaagtggacaagctcatttaagaagacgaatgaccagacgccgtagtaaataaacagaacaaaaatccacaaaatgcagcattttccatgcagatatatagaatttatgttagaaagataatttaactagaccagacctgcgcaaaatcatttgccagccatgccatttcttcgaggacaaaatcccattgagatttctcacggacctccactggtgcagtaccacaagataattcggcaattctttttttctttgcctgttaatgtattatgtcatacataaaaagatgagtaggtacataacatcataacttctacgaaaactagatagctaaaaatcatcaagtcaagattaaaaagaaaacctgtataatccgggcctcctcaagaatagcgtcctccttgacagtatctaacataactgcatctgagctcggctgatgttttaatgcttcaatgtcagttcctgacaataaactattgccaactgtgcaagaacttgtgtctacagatgcctgaggaattccagagcacaacgtgctgctaggattttcagataaaatactaccaactttactgtcattttcgagtacaaccaacccatcttgaagccttttctcagtctcggaacttttctccttagtttgcatctcagctgtacttctgtgactttgattttcaattttaaccgatttcatctgcatttcacattcaggaatgcactcactgataatggtggtagattgacctgtctcatcttcaatcttagttttggtcatttcaccaactgtttgatctagtaacccctctactctcaaagtcttctgcatagagatttcatcagagtcaagtttgtccactttataaagatctctttcattatctacatttacttctacgttgttcgcatgagaagactctgactctaacccattagtccctgtagctcctctatttgttaagctttcttcctctaccgtggaatctcttaggccattcagttgggtagaactatttttctggccagctattgttgcagctttgggagaaccaccagtcgaaactagttgtgccttctccccagcaaggccagactctccaactggcaaatatgcagagcttttactatacgaaatgtcggcttcatctttcaatagactagtcttggatccagcagtactctctcgtacaacaggttcaccatccaccttagtattcagcgaattgctggaaactctatttttcggaacgatattaccatttgaatttgcaaatactggacaagatacagaagttgtatgcatatccttttgattggctgcttcgggaatgcaaccctttccttccactgatcctctgcgaatagatatagacgttgcaagaccaccacgattctgaactaaatccgtagagcttgaccgtgctggatcccgacttatcttcgatctgttcctccgagcatacgggcgaaagatggcagaatcttctgtttctttggtattctggttggtgtgtgctttggaagatcgttctgactcagaagttctgttttgcctattaggatgtctcaaatttctttccccttcaactgacttgttttcagaatcaaacagtaaaagattatctgctgtattgggttcagaaattgtaggaactccaggtctaccgctactctccaccgagtcaccatgtggtgaggcagtcagggcaaaactatctttgacttcactgtgggggttatgggcaaataatgatgagttattccatgaaattaatgtgggaactacaccaaacacgaatgtacctgtttacaaaatgctctgcttgctgatctgtgagtgatgtagattggacgctatgtgaagttgcaataccaaacttgaaatccaagggattaccgccctgaagcagatagaagagtaaaggcttgtcatcataagttcttacacacacacacacaaaacaattatagaacagggaaataggtattcatactttctctagaaactccaattctctcctcctttcctcacgaacatcatactcttgcctgttgaaataagcatctttgttacacattggaaataatagaaagctgtagaaattatagagcatttaaacacactgcagaagatcaagatgtctcaatctgaaataccttagctccgcttgagccttctcaatagctgttcggcgcggagatgttttaacaccaataccacctccactatcgataactcctcccatggaatcaacctcagcatttactagaagatatcctgaaacgcttccatgcatcaccacgtcgaataccccatcaattcgaattctagcttaactgaaaaattatatcaagagctttcagtatttacagcattccgaatgatcatactgcagaagttagaatcagttacacctaaatgttggacctacaaataacactggtaaaatgtatgttctcatgatgcaaaaagcagtaccatatgatatcatataatagagtagcttatcagattcaagatgtaactgctcagaagatgtcaaaagtaaaacaacattcactcatatactctagccactatccaaaggaacatcaaagtgaagataactccccagaatctagtatttgactgagaattctatatatctaacgccaataccattctgatccccgagaagctcacaactacgtattccagcataacagagatagaatagaactctaagataccaaagaaatgaaatgttgcctcaaggcagagaggttctagaagcttaatccaacactaacaacgattactaggaaccaaagttagaaaatgatcagcttaagctacttaatggcgtgcctacgaactcttgaatcaagtattgagcatttccaagctaaacgagtagaaacaaagaactacagagacacaatttcagcaaacaattcacattcctgataaaagaagcactgggttcaaaatcacagaagctccagcaaagctggactctagggtttgaatagaagagtgaaggagaagagagttaaacctggaaattgaacgtagaacagaacagaacgaaggcaaaaagctagggcacaaaactcgggcaaaatcaccaaattctaaaattagtttctctctcctagggcttccaaattcttataagcttttctttcaaatcgaaagacgagaatcaatttctcagagagtagaagagaagaagctcctcccaaaacaaggaatccatggaaattgcttgcttgttgcgagattgattcctaattcagctatttttcgttttcaattttggtttccctctcgggagataaaaaaaaaaattgagttctcgttgatgtttttttttcgttctttctctctctctctctctcctcgacgcagtatgcgactctctctctctctctccgaattctgggcctgagattttgaccaaacaaggcctttctttttgtttgcttggtcttgtttcgggcctttttgtagtaataaagttataacagtttcatgttgtgtgacatggatctctacaaatctcaggcatgtcgctggttttgtaaaactatatttgtcccacgttgtccataggcaattcggatcgagtccgggtcggagttttcggtttcgggtttagaaatctaggacgcattcgggtatattaaaatttgggtttagatcggatgtggatcagatattttgggttcggattcgggtttatccgaagtatccaaaaaatctaaaatttgattcagagttctcaaactcagcttcttcaatttatcaacaatgcttttgattctttctaacgtagagatttagtcattgttgcttttagatttgtaacataggtaacggatttgaagaaatgcactatgtaagctaatgtttatgggagtgaagtgaactttttttttaaccataaaagaacaatgatacattcatcaaattaacctaaacctacaagagaataagttagaggaaaaggttaaaaaagggccctaagtatatgccacaaggatggaggagtagagacttctatacaaaacattataaactgtttctactctctcccaaaccaaaagatgggaagaagaagagactacttctctatgatgcaagtgggtaatttacattatgatataccttcttctctttgtgttcatcaaaagaggcaaaaagacctgcatgaattttatcctatccaccaacttcttccctattgatctccctctggccttaccaaatctgcaaactccacaatctgtagagtttgttatgttatactctcagccaaatccaaagaccaccagcagcttcaagatgttaatgccaaaaagagacccgactctgaaggtggaggacacaaaccagtttgggttcctgtacagggttgttgtcggtaagggccagcgttaagctttgcaggatctacagctactcaaggttctaggttcatctgtcatgcctctcattccacttttgtatcaggaggcttggaagatgataattcttgtgcttcttctaaatgaggctgctcctcagaagcaaggtgtttctgattttgtacagtcggcttctctggcaatttcggtctcttttcttctgaaggtagagactgttgttgtctctgtgtaacgcccttgatcccgtgcttttgagctagtccttggttcggtgttgatactggatcatttcctgctgaatctgtattggaactgtttactactttcgaagcagtgatttgcacagaagcaacacaagatggaggttccaaagcaggcaccgcagtagaaccaactgcttttatgtttttcaaatcattactcgcttgaggcatacccttggtcgtacccatactaacagtttgggtagtattggttacagactgtggaacacgtggcatgcgttcagcttgggacttctttgataactcagagttccctagatgattatgttgaacaactcgctgagctgttgattgcacttgattgcgctgcttttggtgtatcaacaaatgctgatggttagaaggtgcaaccgctggtgcaattgacgggctagaggtggataaaatattacatggggtcgcaggtgagctctggccttggatgctattgtctgaatgtaattgcatctgttgttgaggggatggaggcaaagcaccagggaatgattttggcagttgctgtgaatgatttgaagacaagggagaaacaaatggtttagactgcagattcgtgctcgtggtagtccccacactagactgctgatcaggcctaactggaaccgctatctctcctttttcagtagcctggtttccttggggcatggtaaggccattcaggtgtgactgatcaacagtgatgttctgatggatcatgttgcctctacccatccccttcagttgtttattcagctgttgaccttgtgttggctgccgctggtgtggatgctgtcttgcagactgctgaagttgtcgctgcctttgttttccagcttgattgttcactccagaagtaccagactgaggactcctacccaaaccatgaagcgccaactgagatttttgaggtttctgttgtgccatagcattaatattaggagagggcgacaccgggggcatggataatggctggggcgaaacaggtggttgagtctgaggactgttttgtggagaagaagaaacagaagagccctgaggttgttgtacatgtggcatcatagaaccagatgctggaaactgctgttgctgttgctgttgctgcaaatacctctggtgaatttgtctttgacggatagcaaatgcttcttgctgtgccccagtggcttgacttgggctctggagatgaggatgatgcgagttgccaagcacatgtgactgcggtgacatctgatgctgctgggaaagatggcctgggtacgcctgaacaggagttgtctggttggtaaatccagaactcaaattactgaaagctgggatccccggactgttcccttgagcagcctgcatctgaaactcatgaatatcagtttttatcaccactgtagaggtcgtaatgttgtcaacgagtttcaaaatgacaatcgaccagcggttgacaaaaattagaagcgctgaacgtctacaaactaaaacaaagagcgagataaataagtccaggttgtgaagtaagaaatagatagttaagttcccacatgtgagaaatcgtaaaacgaagtgtaataattagcgtagcagtaaacaaaatccaagtagcttacccgcatcatatgctgcacagcttcacgaggcctgatcatggagtttccttgagaagctcctcctccggaatgaatatttccagtgtttggaatttctaccatgccagaggaaagcatactaccagtatttggcattgctgatgaggccatcccttgaaaaccaggccttgacatgggtgtgttcctgttcattccacttacacccatagcatttccaccaggaaccatgcgatgtccacgatcagatcctgagacagctgcaggagttgataaggagggctgctgcaggtttctaccagataacgtttgattaaattgttgtagtcggtgttgttcatcaagtggcaaagaccctctaggaacattgaatctaccatccctacaaagaaaaaaatatatcaacaatcaaaagaagtaataaccctcaagtaaattgagcggagattcacagacgtgtgcattcaccaaaacaaatcattcagtaaaagctctacctgacagaagcactctgtaggccagatgtggttggcaaattgttgctcagaacaacaccagatgatccaggagtggatggatgtgctccagaagtagggagcactggcgttccctgattcaacattggaagacctggattttcaagtgaaaatacatcttgacctgaagttgatgcgtcacagacatcaaggggccttcatccggagagtagcaaaatattagaatttgcaagagtagaagtcaagatgtatgtgaatacaaggaaacaacagaacttacgtaagaacacctccattcagattattcgggaatacttgagagagagccatgacttgtgaattgtgaactggtactatttgcttggaatcccgaccatcattcttgaagatagatgaaacagtcacaagaatacacaagcagcaacaagaaaacagatttagggccttagtagattcatacttcaaactacaatgtgacttcaggaaatcctagccaagatttgcagctatacttagaaacatgcagacctggtatgtcgagtgattgagatatgcctttcataccataaactttatgcaaattaaaaactgaattaagcaaacctatcttctcaaattccatatctataagcaaaaacatttaccagctccagtgcaacttgaaaactgaattccgtgaacaaaagaaaccacagaaaccccgataacactctctggcactataagaaccatttagcattctgcccacaagggactcaaaaactaaaatttggactaccatcacccaacatatcatctccttgatgctagtatactacacagtacatacacaacgaactatccctatttccaggcaacagttgaattatgactagccaaaaaatgcagaaagaaatccactagttttaggttacaagcttggaaacagtaacaaagtagtaggtgaactaacctgtgtctttctataatgtaatttcttcccaatcaaacaaatcttctcaaaatgagacttcagggtatcttcctccattggcccttgcagtcgttgaaacaactgtctcgcacttccctgaatatcacagacatatccggggcatttaaattagtttaagcatagaagacactttgttcaccatctcagagctatagaaaaacctttgggatgccaggcaaagtggatggataagactgagaattccctgaatcttctgcactatcagccccatcaccagcagttttatccatcagaatcttatgccggtccttgcactcagtcggattgcgatatatacactggagaaacagtggaaaaatcaatcagccagtaacaaataccagttgttcactgatacgagaaagcaataacctggacaacaatatccaacacaaccattcactagaatagaaaaaaaaaaactattgaattatagctctgccactcagttcgaaaggtaccaaagaaagaatcccaagatttttcaaaacaacaggcacttaccttaattttaagagtgctgttcattgcatcactaatgagctcccagttagggcccatatcatgcaccaggacaacaagcgcctatatggtagaaaaagataaattagatactcataaagcaaccaacagtacatcgatgttaatgaaagatgacgaataaaaaacctgatcctcaaatagtgaccatggatttccagaaccatgctgaccaggagaaatctgagaaaaacaaaattctagtttaaaacagatattttaaacaaagtgaatggagttagtaaaccttcaagagcataccttcaggccttttatttttctgcccctatcacgacctccaataaatttgatagatttgttggggttggacatattgctcatctgggaagcagccggagaaggaatcgatccagtgtgaggaatagccatatcaaaattattctctaccaattgcttggtggtcttttgcttctttgcactatgaggaccatacagaccttacaaaaaataattaaaatatgtcacagaattataaacgattatcattgcttaagttgtataattggtggttaatgataagatgtacgtaaaaatgctgcttaaaacatgatatcctctaggagtattgtttaatttatacaggcagaggctgaggatcccccagccgctgaagaactacaatgcaccacaaagtaaaaaatgaatttgcaaataataccattcatatcgaaattattctctggtcgcttcttccagtggtccttctgcccaaataaggatgaattagaatcctttctaagaagtcaattactactaaatggtaaacatttaccaactatataacttaaagttctcatttcaaataataggaaactgtttaatagtcacctcctcaagattaaaatggaaacaaaatataactttgtttttaatccaaagagtaggactcaagcatcaaaccagttaagcaagaggcaaaaattattttatcaagctagtcaagcaataatattgattaattcacaccacctaaactcgcctttccctaaacatttgttcaaattgattcttaggattttatcatgaattcacctgttcaacatggactgacggatcgagatgccaagtttggtcatatgcggagccctgcaacaaatgaaattgaaaattgcaatccaatgtcaactaaaactaatagcaactattttctgcaaatagtaagagatatgctgatatttctaactacctgatgagtcttctttttctttttaggtcttcctgaggtttcagccatgtcataaggtaacagcttttcaaagttaacacttgactcaacctctgtgcctttttggactgccgatccaccatgcaaactactatactcatcctggaaagaactagtatccccactagacgcatctgtcttcgagggcactggtaaattcccagtagtagcacacccaaaaggactcacaaccctctgcctggaagcagtgcgcactcgccttgttggaactgagccggcattaatattactgtcaggcctttttgccatcaaacttgatgagttagagccacctgtgttgttgacgtatggtaaatcgtccccaagatcatatgaccgggcagaatgagacttcatcagattcttcctttttttgtggcttatattaaatgatctgctagactcgaaagctcccggaagataataggtacttgtttctccttcatcctcatcgaacgcagtaacattatatcctatatctacaattagagataaaaaattagcaaaaatttaaccaacccgcgaagctcaaacaacccagaattgtgcatacctccagcagtatcataggctgatgtatcaacctcctcctgcatgctacttccagacttctgggaacagagaaatactgttaaatatctttggagaacagatatatattctcaggaaaatatacgccatcaaggttacaatatgcgagctcctagcatagaacaatctcacatacctcacaacgtgtaagatgcgactcaatggacttaaggtacacctccattgcaccagatggaactgaataaaagaggcttgcctgcacagtaataaagctcaattagcaataatgtagaactatccacaacaatagtgttcaactgaggctgcggaaaatcttttcagaaattcatacttctgtaagctgatcaaccatagatatatccaatatttctgggtcgcacatattgtcaggtgttgacggtgcagctgaatgataggagatggaagagttgttgtacttcaaaaatctacttgcatattccttgacacccgcagctaaacatcttctgccattcaaacaattagattcttggcaagtctcctgcatacaaccaaggtattatttagtatgataccattaaattttacaaaaatcataacataaggagcgacagaaccagagactcctgtaggtaattatcaaagacaattcaagcaaataagaaagatcaggcttctcaatcataagaaggaaatatcagtagaattgtgttgttttgcagtctagtcacaaacataataatatggtttctcagaatgtcagtgttgtcaatactttaattcaacgaatgtatatatatatgcataattctaatttaaaagaaaaggaaagaaccatatgatcatcattgtcatcaaaaaccataaaagaggtcagacagtcaaataccttaacaattcccaagctcgtctcctccagctccccaggaacctcggcctccacagaactccagaattgtaagatagcattagataggactgaagctatttttttcagctttctgtgctgatttcgttcctcaaatctcaactgacaagtcaaagcaactcgatggcaaatttgtgcggcagcagtcattttccaaaggcgctcctagaagatgaaaagaaaaaaggtaacagaatgcaattagaacagtcacggaaaaatgttccagtaacataaaagtggacaagctcatttaagaagacgaatgaccagacgccgtagtaaataaacagaacaaaaatccacaaaatgcagcattttccatgcagatatatagaatttatgttagaaagataatttaactagaccagacctgcgcaaaatcatttgccagccatgccatttcttcgaggacaaaatcccattgagatttctcacggacctccactggtgcagtaccacaagataattcggcaattctttttttctttgcctgttaatgtattatgtcatacataaaaagatgagtaggtacataacatcataacttctacgaaaactagatagctaaaaatcatcaagtcaagattaaaaagaaaacctgtataatccgggcctcctcaagaatagcgtcctccttgacagtatctaacataactgcatctgagctcggctgatgttttaatgcttcaatgtcagttcctgacaataaactattgccaactgtgcaagaacttgtgtctacagatgcctgaggaattccagagcacaacgtgctgctaggattttcagataaaatactaccaactttactgtcattttcgagtacaaccaacccatcttgaagccttttctcagtctcggaacttttctccttagtttgcatctcagctgtacttctgtgactttgattttcaattttaaccgatttcatctgcatttcacattcaggaatgcactcactgataatggtggtagattgacctgtctcatcttcaatcttagttttggtcatttcaccaactgtttgatctagtaacccctctactctcaaagtcttctgcatagagatttcatcagagtcaagtttgtccactttataaagatctctttcattatctacatttacttctacgttgttcgcatgagaagactctgactctaacccattagtccctgtagctcctctatttgttaagctttcttcctctaccgtggaatctcttaggccattcagttgggtagaactatttttctggccagctattgttgcagctttgggagaaccaccagtcgaaactagttgtgccttctccccagcaaggccagactctccaactggcaaatatgcagagcttttactatacgaaatgtcggcttcatctttcaatagactagtcttggatccagcagtactctctcgtacaacaggttcaccatccaccttagtattcagcgaattgctggaaactctatttttcggaacgatattaccatttgaatttgcaaatactggacaagatacagaagttgtatgcatatccttttgattggctgcttcgggaatgcaaccctttccttccactgatcctctgcgaatagatatagacgttgcaagaccaccacgattctgaactaaatccgtagagcttgaccgtgctggatcccgacttatcttcgatctgttcctccgagcatacgggcgaaagatggcagaatcttctgtttctttggtattctggttggtgtgtgctttggaagatcgttctgactcagaagttctgttttgcctattaggatgtctcaaatttctttccccttcaactgacttgttttcagaatcaaacagtaaaagattatctgctgtattgggttcagaaattgtaggaactccaggtctaccgctactctccaccgagtcaccatgtggtgaggcagtcagggcaaaactatctttgacttcactgtgggggttatgggcaaataatgatgagttattccatgaaattaatgtgggaactacaccaaacacgaatgtacctgtttacaaaatgctctgcttgctgatctgtgagtgatgtagattggacgctatgtgaagttgcaataccaaacttgaaatccaagggattaccgccctgaagcagatagaagagtaaaggcttgtcatcataagttcttacacacacacacacaaaacaattatagaacagggaaataggtattcatactttctctagaaactccaattctctcctcctttcctcacgaacatcatactcttgcctgttgaaataagcatctttgttacacattggaaataatagaaagctgtagaaattatagagcatttaaacacactgcagaagatcaagatgtctcaatctgaaataccttagctccgcttgagccttctcaatagctgttcggcgcggagatgttttaacaccaataccacctccactatcgataactcctcccatggaatcaacctcagcatttactagaagatatcctgaaacgcttccatgcatcaccacgtcgaataccccatcaattcgaattctagcttaactgaaaaattatatcaagagctttcagtatttacagcattccgaatgatcatactgcagaagttagaatcagttacacctaaatgttggacctacaaataacactggtaaaatgtatgttctcatgatgcaaaaagcagtaccatatgatatcatataatagagtagcttatcagattcaagatgtaactgctcagaagatgtcaaaagtaaaacaacattcactcatatactctagccactatccaaaggaacatcaaagtgaagataactccccagaatctagtatttgactgagaattctatatatctaacgccaataccattctgatccccgagaagctcacaactacgtattccagcataacagagatagaatagaactctaagataccaaagaaatgaaatgttgcctcaaggcagagaggttctagaagcttaatccaacactaacaacgattactaggaaccaaagttagaaaatgatcagcttaagctacttaatggcgtgcctacgaactcttgaatcaagtattgagcatttccaagctaaacgagtagaaacaaagaactacagagacacaatttcagcaaacaattcacattcctgataaaagaagcactgggttcaaaatcacagaagctccagcaaagctggactctagggtttgaatagaagagtgaaggagaagagagttaaacctggaaattgaacgtagaacagaacagaacgaaggcaaaaagctagggcacaaaactcgggcaaaatcaccaaattctaaaattagtttctctctcctagggcttccaaattcttataagcttttctttcaaatcgaaagacgagaatcaatttctcagagagtagaagagaagaagctcctcccaaaacaaggaatccatggaaattgcttgcttgttgcgagattgattcctaattcagctatttttcgttttcaattttggtttccctctcgggagataaaaaaaaaaattgagttctcgttgatgtttttttttcgttctttctctctctctctctctcctcgacgcagtatgcgactctctctctctctctccgaattctgggcctgagattttgaccaaacaaggcctttctttttgtttgcttggtcttgtttcgggcctttttgtagtaataaagttataacagtttcatgttgtgtgacatggatctctacaaatctcaggcatgtcgctggttttgtaaaactatatttgtcccacgttgtccataggcaattcggatcgagtccgggttttttgggttcgggtttagaaatctaagagactaataccaaataaaacatatgaaaaaatattaaacttgaaattttctataatttaataattttattaaacataagatagtaacttaatttgtaaaaagttacaaattacaaaatattaagaatgtaatacatttaatcttattttttatcaaatagaaatattatataaacgcataaactaataaaataaactactaatttttacttttaaaataaaatttaaactatttttttctgtttagaattttccttactaacaacttctagtggaagtcttctctcatattttccatggacatgacaatagattcttttctttttgtgcagcctattgcgttgtttagttctaagaataataattttattaatttatgaaacaacttaaaaacaaaaataaaactcttaaacatgaacaattcctcacaaattcctcaagtatacctcaacatgtaaatgatgtaaccattttaaattcctcaaaaacaattttactatttacagccaaagtaaaaatttcgagttggaaaaaaagaagtaattttttttgccttctgcaaaaagggaattttactgccgtcactgcacagtgttgccagaagaagcttccttctccgataccaattttcctacaacaaatgtcgaaaatggcttcagtgagtctcccttctcccttctcaaaccgaacatgttctcttttttcctggtttttcgtatatatgagtttcgatttcgccctcttgaaagcctagtttcgatctatgtggtagacttagatgtatattcgtgttcgtgttgcaattgatttcactggatctctttgctcatttgctcattcatttgtatatttatgacttggttcttcttctgttaaggtttccattgattgatgagacttttcttattttacttattgatgtatctctcgtttggatttatcatgatatatgtttcttggtgttctgattccattcagcttatgtattattggcttgtttgtgagaatttagaaggcaattgtaattgacttgagtctttgcttaaacggaagtgaaactgttgaatgtagttatgtctttagcttgctttgcctcttgtatttgaacttaggtgatatatgagcaatactatacagtttctttttcgtatttagtgtcctttgtttataattctctcatatttttccatggacatgacaatagattcttttctttttgtgcagcctattgcgttgtttcggcagattccaatggcattcttggagcgagtttaagaggatttcaacaagagatatggtggtggataggaatggctacaactacttaacccaacagcttgaacaaagagttttggtacttttggctcatcccgaggagattagcaaacttgccaaggttaaggctctagtgaccaaaatgaaaggtgttatgatggagaacattgagaaggtctgaatcatatatccatgtcaatctcataattttatatcattcatttgagaatatatgacttgaattttctctgttttttcccacttatgcgaaactgactgaggtttatgtaattcattaacttgcaggctcttgaccgcagtgagaaaattaaaattctagtggaccttcgttcaaagtatagtaacttaccttttccctcatatgtgagctttttgatacaatatatctcctttctagttgtcacgctcttatatttccagttctgatatctacagggtcaagaagatatcataacgccaggaacgaaaattacaagaaagatgtggtttcagaacatgaagtttaagctcatagtccttggtacatcttcgtctaggtttgtcttaataactgaaagaagaagaagattacgttgacgaattataatgcccacattgctctactaaattgatgggaaactgtacccgaggtatatgcccttctttcttcattctgtttttgcgatctctttttcataaattttgttagggataatgaaatatgatgacttagtactgatttatgatcctttagggtatgaatatgttaagctgctgggatttgcaaatatctagattaggtctttgtgatgatatggtttcttgtaatctaaaacccaattttgagttctgctactctttttattaggaaaagaaacaacatctaatgagaattcaccattcttactttatagaaacaaaaacatcagataaagatacaacaaacgttaggaaatacttcaatacaataccaacaggcaacaacaacttgacataaacgatcaaattcataaccaaaagatcttaatggtttctgctctgaaacagaaaaactagccactccggtttgtatgaagcaatgagttgtgctattgccaatccaagtaacacaccaaccccataccctattcccacgcctttccaattcaacacttgttcctcttcttcttcctcttcttcttcttctttaggatgttgtgctggtggtgcgttagtcccaaagcaactttcttgaagaggcaaaccacaaagccctgcatttccttcaaatgacgatttaggttgcccagttatctgtgttccttgtggtatttcaccgttgagttggttgtgagacacgttcatgtatgccaaaaacgagagagtccctattccattaggaattgtccctgagagttggttacttgataggtctagtgactcgatcttcttaagattggccaaagacagaggaatatggcctgtgaaggcgttgttcgataagttgagtgcgatcagtgcctttaagagaccaatagattcaggaatttctccttcaagtctatttccagaaaaatcaatggtcgctgaggaactaaggaccctattttgctccatagacagacctttatattgtaaatctatagcttccagagaggtgaagtaataggtcccgtaaacaaccttgttatataccatatatagaccttgatcttcattcatcgtgagtgatgatgctttccaattctcaaaaaaatctgggggcaagctaccagtgaatttattaccagctatctcaagtatccgcagctcaggaaaacccagagagccttgattaggaggagatagaggaccatagaagttgtttgaatggagaataaggacttgcaatttcggtaaagccttaagggagaaaggaaatgtatctttgattccgttgtggtccacacttagaaactgtagagctgagcaatttagaagagaccttggaagctttcctgttaatcgattgtagccaacgtcgagtgaccgtagaggtgcatcggcataataagtgtctggaatacttccttccaagttgttcttccggagattcaaaatcaagaagttacttggacatggaggaattggaccggtgaagttgttgtagcttagatcaaggaaaacaagtgaccttctactgcagattgaaagaggtatgtcgcctccgtatctattgtttcttgcagagaagtagttgacagagagcggtagatgtggaagtgctccttctaaattgtttgacagcaaatttaagatccgtacagatgaatttactaaaatttctgatgaaccttcgaagccagtaaacaaattttcttcaatgaaaactgagctcagacgaggaaggctccataaccactctgggattttcccactgattttattggttgataaggcaataaactccaaattcggaagggtctttaagatgtttgggaaaacactgatgttgcagtgtttcaagagtaatgcttccaaggtcgatggaatgtatgaatccaaacttaaactagcctgagatatccaaccaccggaaagatcgaggagcaacaaatatttgagagaggagaagagtttcaaattaattgggtagcttgtgtttaggaaagaaaggtggagctctttgaggttgataagctttgagataggctctatgatttttccttcaaaatggttttcacctaggttcaaattctctagccttgacgacaaagaggagttaggaacttcaatagaaccactgagattgtttccacctaaatcaagataggataagaaaggcatagtgaagagagaagaagggatggttccagagaagtgattatcagaaagatgtagaatggagagcttggttagattttgtacaagcggaagactaccagtgaagtcgttcaagggaaggtacaactcggttaactgggtgaggttactaattgtggggggaacttgaccgaagaagctattagagctaacatccaataactctagtttgttgagattaccaaattcataagggagtgaagaggaggtgaagttgttagaaccgagatcaaggtaagcgaggttgtgcaactcaaagaggctactgttgggattaagagttccagaaaagtgattatgagaaacatctaaaattgtgagcttgcgtaaattccgcacaaacgataaactaccagtgagctcgttatggtggaggagtaaagcggaaagcatgcttaggttactaaaagaggaaggaacttggcctaggaagccaccagtagacataaacaaaacctctaatttgttgagcattccaaactcggaagggattgaagagggggtgaagttgttgtaagagagataaaggtgacgaagctgatgaaactggaagaggctactgttagattttagagttccactgagacaggccctgagtcgtagcttcatgaccgcgcccgtggagttatcgcaccacaccccattcaaggagtcactatggttgcaagcatgagtatcaaactcgtttttgaactgcgtaaaggcttgaatctggtggggaccacaagcaccaagaccaacaaccgggtcattaaaagagaagaagcttgaagccaaggagacacaagagagtaagagtagcaagagaaaattcaaacggaaaagcaattcagacatgatgaaaacagctttgtaagaaagaaaggtttttgatataagaaatgtgagagagaagattggtataaataaagataggaagtagttttgcatagtggagcacaaattgacttggaagaagttagaggtaagtgaagtcgtctttgtattcgggcttggagaagtgaagtccacgttagataatttttcttaagtataatttggattggaaccacatcactttgaaagttctcatatatatgttcaaaatcacataaataaaattagcataaggacaaacatattggatacgtttgattattggagacatttcgtagcccgacgtgctttgacgaagaagaattggcgttgttttgatttgtttgtcgagtatcaaatttcgaagttggtatggtaacgaggcaaagtgaaagtggtcagataatggggaagatgatagttttagctaacaaaagatcgttaaaccgattagaagatatgcggtaaagaggatttgaaaatgatgaagaagatgatagtttcatttttcttttacttgaatgattttctccattggaggatcatgagcacacttgcgagttacagcgtcagataatagggccataggggtgaggcaagatcctactacaaattaccaactgatattgtgaccgtgggaaaaccgttaatcttaaaaagaaaatcattttatgtattactatggtttttttaaaataaataaaataaaactaagaatattttcatgattgttgtagatttcgtgaattatataaatagtttttcagcaaaaatatatgtaatttttagaaatgctttactctttgtgtaaaatacatgagtaatcacatatgtatacatgcatgtagttttatcctattctattttattttcttctaatactggtgataaaatcgtatgatgatattatttttaatttctaaaatatttatttaccaaaatgtatagattagtttacacttaataaacttttatgtctatctaaattcgcattatatagagttaggaaaaaagtcaaaacattatatattaggaaataatttaatatagagttaggaagaaaaccaaaaatgaaaattcatatataattaacaaaatggaaagaattgaaaaaatttaataaccatgcataaaatacaatagaaaaatgaaaggggtgcaaaaactaaaaataattgacatatattatgtatatttttgactgagaacttttctctctctcttctctctcctttatttttcagagagaaagaaaagttttcgatatgatttcgtcggcaagagtttttataaaaacttctgttgcaatttcatggggcgtttcactggcttattaagcagtcaaaacttttcttctggcatcggtggctctgttatgcaccgttggccggcaaacttccagcatcgattggcttcttccgcaacggtggctggcttcgtctccatcgattcgtcttcgagagattcggatggcttatgtcccggcttttgtccggttttgggttgatgtaagcaagttctaaaaaaataaattttcctttccgattgaaaagttttgaagaagaagatgaagaaggtttcagattttcatcaagtggagtcataatttcatcaacactcaattggaatttcgcctctaattcttcgggcgaagaagatgaataagattctggacattttctgcttggaatgaagattccggtgtcacctctactttccggtgatcggaaattctctcctcttcaacttcccacgtgtcttccatctcttttcgacttgccacgtgctctttgcgctgttcacgtcacttttccttctggcaaaggaatttatttgggctttgggcttttgttgttttatgggttatgtttgttttttaaattgtaggcttgtttctttggctatgtataattgggtctgttcacttggctttgtaacattaataagacacttgtgacaaaaaaaaaataattgacaaaagtaaaatattgagttgaagaaagaatttcacttccgtcactgcgcagtgcgatccactagaacgaagctttccttcttcgaataacaagcaaacaagttcacatacaattgcgacggtcacacgaattcaattacctcgtccataatggcttcagtgagtctctcttcttaatcggaacacgttctctttgtgcctggattcgcgtaaaattgagtttcgatctatttggtagacgtagatgtaccattttgtgttcgtattgcaatcgatttcactggatctatttgctcattttcaatctccaccagtgacattcacgtgtgtattgatggattcgttctgtttctattgatggattcgatttttgttgttgtacttatttgattcatcatctctcgtttggattaatcttgatctctgtttattggtgtgtgattccattcagcttatgtattggcttgtttttgagaacttataaggcatttgtaattgagactttgcttaaatttactttgctacaaccaaactttttagcatgtattgttgaatgtaactacattcaacaattcgggtgatatatatgagcaataactctacagtttctttttcgtatttgtaaaccatttagggtctttttatgattctctcgtatttgttcatggacctgactatagattctcttctttttgtgcagcctattgcgttgttgcagcagattccaatggctttcaacaagagatatggtggtggaaaggaatggctacaacttacaaagagaccgaagtcaaaggtgtttttatggagaacattgagaaggtcagagttatatatccatgtcaatcatagacaaagtaactttgctcaccaatatcatccttacactcaagctgtctaatgtaaccaatgggaagtatgtctagccttggaccagagttgttataataaaaagtacccaactcgatgtcttgaagaaatggaaagatttgttggttgattgttgcattctcagggtatttgggacaaagattgttgtgataatccattctggcgagtcttatgaaatcatcgaaatagttcagctcaaggatatggaacttgacgaaggatatatacttagctctcactcttcacttttcaggcgaccaaaagggatagtagagatatgtcctcgtgacgcttatcaactgacaaaaaaacaagaggggatcataaagagcatccatatgattgtcagagacagaggaaaatttatcatggtactcttctttttttttctttttttttttctttagagattaaccagagaatgaagaagaagaggtaaaagatatatgagaaataggtgaatggtttttgtctaagtctttcttttgtgtatatgaatctttattttcaaagggaaatctcttttgaattagttgggttaaactttagtttaaagatttctttctactttgttgttatgattttttttttttttctgtaggaactttacttgaaaaagtcaggtaaagtagaaaaggggataaaaatagactaatgaagaaaatctctaaaggggttaaaaatcgactaatgaaggaaaaaaatcctaaagaaagaagaaagacatgacagtaactgcgccttccttcgctctccactttctttgtcagcttcagacaaatgtgaacgcaccaaaaggtacgtgcaaagaatacaaagtggaacaaggcaaagagtttttagtatttaccatggaaactgaacgatggtgatgatgatgacaggttcaatggtaaggaagactcccgttccctgaaaatgacttgatggaaattgtgtgccaagttgttggagacagatcaagactttttagacctctcactagaagtaaggtatgttttaacactgctaaaaaccaacagagaaagattgaaaagaaatgaaaattgtgacgtggtgcatgtgtgagatagttcttggtgattagcatggtgtataggttgggagtttacagttatggaacgtagggaattatagttttggtatgtgtcatagtggaactaagaggctgcagatcaacaagtcttgttgagacttattagcaaagagttatattgtgtttcagtgttagatgagttgtctatttaggaaaaaatcaaagatgtatatgaatatgctacgaagaattcaccattcttatttatagaaaacaaaatagacacaaaagcatcagtttatagataaagatagaagaaaggtaaagaaatgcttacaatacaataccaacaacaacttgacaaacattgaagggtcaaactcaaaaccaaaaaagatcttaacagtttctgctcttaattaccagagaagctagccacttcggtttatataaagaaatgagttgtgctattgccaatccaagtaacactccaattccgtaccctattgccactgctttccagtttaacacttgctcatcttcttcctcttcttcttgttctttaggatgttgtgctggtggtgtgttagtcccgaagcaactttcttgaagaggaaaaccgcaaagccctgcatttccttcaaatgacgatttaggttgcccagttatttgtgttccttgtggtatttcaccaatgagttggttgtgagacacgttcacgtatgccaaaaacgagagggtccttaggccattaggaatagtccctgagagttggttacttgataggtctagtgactccatcttcttaagattggcgaaagaaagaggaatatggcctgtgaaggcgttgttcgataagttgagtgcgatcagtgcctttaagagaccaatagattcaggaatttctccttcaagtctgtttcctgaaaaatcaatggtggctgaggaagtaaggacgttcctttgctccatagatagacctttatatcgtaaatctatagtttcataataggtgaggtgatagttcccgaaaataaccttgccatataccatatatagacccagatcttcattcatcgtgtgtgatgatgctttccaattcacaaaaaagtctgaggacaagctt

SEQ ID NO: 1048 - DNA, 77483 bp, Arabidopsis thaliana
aagcttctacgtaggagtaaaaattaacaaacaatatatagtggttaataaaaaatatatagttttcatccttcataatataatctctcttataaaaataacatttttaaaaaaggatgataaactaaatatataaaaaaaatttaaggaaaatcaacaacaaaattccgcgcgtacactcatctagttaagtttaattaatgaatatgatatgtaaattctaagacataaaatgaatggagtaagcatggcgtcatgatgatcaaagccctaaaagagcacccaccactcgggataatgttcacaaatcgtaaccaaacttttttctattaaagaatttatattcactttaaataaccttaaaatattaagaaagtgcaaacacactcatatatgtgtgtatattatatatgtaaaagtgtgacataagaagactacaaatggccacaaatgtgaaaaaaggaaacgcaaagggaccagagacaacccatgcgtgtgaccacaaagtgatgcttacttatttcttatatgcttacacatatttgtttattcataatccagaaaatccataatatatatgcataaagatcacatacacacacatgggcaagcacttccatatacaaagaaactaatttatactactatatttcatatttgcttccataagacctacctcatcacacgtcaccgtttcatatttgcaagatagcctcttcaaccttcccaacatttcgtgcactaataatgttcgaattaaacaaaaaaaaaattataagaataatgttcgaattatcgacattttttcggatgagacgactaaacaaaagaatgtgcatccttttttcttatggatgatgaatgacatatttatatggtgtttaataccgggtggtaaacttctaatgattaattgagttatggtcgaactgagttaccgattaattaatattgtctttatttatttcattcaccattatatataaaaatgaattttagttagtgactgtgaagttatgaattgcaccataacgtagaacaaggtaaattaatctcacgtttatatgttacagttttctatgttaaaaggagaagacatttatataaatacattttagaacaattaaaccagcagaatataatgcaagaatcttcaatcatacggtagtttattgtaagcttcttctcacataacaaactgattgagctagctaatattattgctaatcgtttggttttgattgatttaaacatgatgattgatgataatggattaataattcatacattagttcacagttcatgatgtacatatgtgccacttcatggagattgggttttcatacgccaataagataagtaacttcaggcttatatttgtagaactttgtgaaaatgatatttagatatttattatatatatattacaaaatctacgttcacctaattttataatgagtaagtaattaaatattgataatcttatagctagttaccagagtgaaataagagaatctgatctttgttttaatatatatcctaaaaatctgtctgaactccgattttttttaaaaataaagaattataacaaaattaaagaattagaacaaaaaagaattgtcgacactttgttttctattataccgttttagctctgcctaaattacataaatcttgccaaaattaaatctcttagcgagattgttaggctacacttgtggattcctctggttcatggagttcgacctaattacttccaaccatgggatacaaatattagccggtgggagacacacacacaaaattaaatgaaacctaaaaacgaaagaacgcttttgtaataaatcatgatccaatgcacacacttaaagacctttgcacacatatatgtatgtatttacacatacacatgtaatgatgtggtcgtgaagacctttgcacaaatctgttgtgtgtagtcacatattcacgtgtaaaaggacaacttctggttctgtacatatatataatcgtcataaatagatataaatggatgactactgatagttttttttgttgttaaagaaacttttttttttgttaaagaaacctagtgataataactcagggattccctaataactcaaccagttattgcaggtgtaaagcgtcaataaatattcgaattcgagttcagtttgttactacttactacgatcaatatagggtgattggtgcatgacatgttaatttagacagattaaggtgtctaaaggtcccttaatctcctaattaaaaaaacgtattatgatatatgttttaagttccattcaaacgggtcgacagtatatataagcctagttaatgcttatgaaacgagtttataacctatgaaattctttagtcgatcttatgggattcaatatatcaaaacagccccaattttaatttttcattggttattgcaatttgcaagtaatatgaaggatcacaagttttataatcgtgaatttcatttagtgattgaaaaggaagtaaaacttacatttttgtaaaaaattaaatttagttggggtacaaattacaatgttttcaacttatataagagtacatttcacttcgtaattgtttctcaataatttctccatataagtttcattcaatttcgctgatttattttgttatacaaatttttttaccacactagtttttttttttttagttacagccaaagtaacgaactgatttggttttaaatgagccatgcttgtcaagatgaaaatgattttagctttttcaaaggccttttgaacatgaacactgactttattttaaaggtaatgattataggtttcttccaacaatggtttcctatcatatgattcttcaccataaaattattacattttatggaccaacagttaagcacatactcgctaaagggtatggtctcgtgacaatattaatataatatattgaaaaatgtatttttgttatatagtattggataccgtgaaacattatcaggttatgtccatagtcattagaaactagtattattattgctgcttttgatatgatgtttatcactttttcagtgtataaaatatggcttcatgatatatatacctttcgtatacttgattttgatgcaatgttcattcttttcgtaaatactagtattaaaatttagttaagtcttctaggtaagttagttaaatctagtacgctgtatagtttaaatagtacttcaatcgaacaatttgttttaatacatcatgtttttattggtgtattaaacggagcaatattcatgcatcttgtattttaattaattaatactatttttaaaaaatcaatcaaagcatgaatactcatggaaaaaaatctatgatcaagtccttagttgagtgattttcacaatttaagggtcggaaaaatattttataacgtctatatcaatatgtgatctgcttttatacaaaaaaaatatataatggattagttaaaacatggtggagtcaattatattaaaacattactgataaatatgctttttaactcaaacatagcaaatcaaaaatagtaaaccttcacatacaaatatttatacatttataaacgcatgaatatacatttttataaatattaaaaggtttctgagtttaattcatgattaattataactaaagatactaaaattcataagtagattgaagtagctcaattgaacaaatctcagcaaaatacatagtatatatgagatgtaaattcgattgttcaaatgtcttttcattaggacctgtgtaaaaagttttcgagagaagaattatagcgaggtttgtttcaagtttcaacaagaaaaaacagaaaagaatcatgtatataaatcaatcaagtactgataatatagaagtattattggaaacaaacaagaagagaagtaaattcaaagacaaaatgatttagaattcttggagaaggaaaaagaagaagacagcgtggagaaagagcccagaatgttgaacgtcgtgtgggcttcactctgcaccaccaccccaaaaccctagttcataccctatcctataatttatactcaaaattttctcatttcttctattatttatcaccattcatatggaagtatatatttaatgaagaattttcggatctatagatcattatatgtaaaatcagtttttgataaaacatgtgacagtttcacaaaaatagttcatctttcacaaaaatagtactcgaatccggtagcattttagtatcctactatttagtttttccactccttttcattatatatataatgatataagtctttttacctctttttcataagtctttttaactctttttttctttaaaaatgattatatgcacatctacttgataaactggcggatggtaaacttgagttaggtttgagaattttcactaattattttaggatttgaatcttctttagtatgagacaattaagctaacacactcgaagatatattcagatcataatcaaaatttatccgttggatatgtatgaatagattaaataaaagagagaatctcttcggtgcacttgagacaaatctataacatagaaaatcttgattagattaaaaactagattaaagaaggaaagaaaaacaagaaagtgggtttggctatacgaaacgagtgggattattaatgattaaaagtaaaagtctttttggtctctggtcggtcgacaatccgtgtgtcctgtggtcagtgtttgttttttattcttttggttaattttcgagtattattatgctttccactgaaaaaacaaaaacattaagcagccaaatgaaattcttttaacgcgttgtttcagaacctgatgaaaaaacaataatcatgacctctttcttcttcccctttaaatgcatgtcaaattgtgtaggagtgtttgattatataaattaaatctactttagtcttctcttctttgtagaattgtagagtcgtggtataaactcgaaaatttcttattatacttatagaaattaggcagacgaaatgctcttgatttgcttacaatcttagattaggtttaacccaagataaaaaaaaactttgttttgatgaagaaaaacaccttagttacaattttggacatcatcttttattttcacagttagcatctgagacttttttttcttttcttaaatagagttcttagacaatatcttttgggtccctgatcatgtcaaatgccaaaaaaataaataagtatacatgattgtgtctatttgaccattctaacttctaaaagtttcaaatgaaataactttgtcaactattatttttgcctatgaattaggtgctgaccagaatcatcttgctaaaatcatgattttctactattgcatattattcttgatcgcatttcacagatcttaatatatacgaaaataactgtatatattatcaactgttacgattaatatataaccatgcatatcgaaatattttgaattagtattttttttgctaaataatattttgatatagtggtggcgtggtattcctcatttacaaatcgcatgaactttatcctaaatacgattaacttaagtagaaaaggcacaaaaatcttctattcattaacatgaaatcaattcttaagaacataaataaataataatattcataggaagccaaatccatcagagaaatccacaagatgatgacagctccccatttagaagtcgtaaaagaaaagcaaagaagatgtgcagcacttgcagtttcatttgttttgttagatataccagaaaaaaaaaaagagtggtcccataaaaacctgtaatatataacattttaatcaaagaaaatgatagatttttttattaaacaggaaaaaccactaacttttaattaaaaaatttggaatacagcaatacatcaaaaatccattaacggtacattatagttgaaaataaattcaggttacataatattttttgcgtaatcactatactattctgccattttatatggaactaagttcatacgttatttctcacaattctccttgatgtgatcaaagataatggcggtctgattgtataacccggtgaaaaaggttttttggaaagaattctttaatattaaaatatcaaataaattttgtttaaaaattaaggacacattatatagcactatatatacacatgtgtatgcattatcaaatgggatgtttgtgaccttttgtctcttcttctctaaaattctctttctcccaaaaactaaaaaaccaaaaaaaccaaaaaatgtacgcaatgaaagaagaagactgtcttcaaacatttcacaacttacaagactatcaagaccagtttcatcttcatcatcatccacaaattctcccctggtcgtcgacatctttaccttcttttgacccactccatttcccatctaacccgacccgttattctgacccggttcactacttcaacagaagagcttcttcttcctcttcttcttttgactataacgacggttttgtctctcctcctccttccatggatcatcctcagaaccatctaaggattttatccgaagctcttggacccatcatgcgtcgtggctcgtcctttgggttcgatggtgagatcatgggaaaattgagtgcacaagaagtcatggatgctaaggctttagctgcttcaaagagtcatagtgaagctgagagaagaagacgagagagaatcaacactcatcttgctaagctgcgtagtatattaccaaacacaaccaaagtaagtcgtttataaataaacactcttctcctttcattatggtttgatatttcagaaactaattcactattttgaaaaccctatggaaaaatagttttaattaattaatgatccttcaaaatttctctttatttagttattattggttagagtagtagtaattgttgttgttttttaataaagagagtagtagtaattgttctttttctgataaatatagtactaattattcagtttcaaaaatgataagtactatatttttcaatattatcatttttatctatctctgttcaactattatcgtttagtagttgtaaattttcaaatttaaaataaatgtatcaaatcgatatttttggtaagtaattatagtccacagatggggtatttttgtactagttattattattgaagaagaagaataagaagattaaatacttatgattcgttttggttttgtatagacggacaaagcttctttgctagcggaagtgatccaacacatgaaggagctaaaacgacaaacatcacagatcaccgacacgtatcaagtcccaacagagtgcgatgatctgaccgtagattcgtcttacaacgacgaggaaggaaacttggtgataagagcatccttttgctgccaagacaggactgacctcatgcatgacgtcatcaatgccttaaagtctcttcgtcttcgaactctcaaagctgagatcgcaaccgtaggtggtagagtcaagaacatcttgttcttgagccgagaatacgatgatgaagaagatcatgattcatatcgtagaaacttcgatggtgatgacgtggaggattatgatgaagagaggatgatgaataatcgtgtgagttcgatagaagaagcgttaaaggcggttatagagaagtgtgttcataataatgatgaaagtaacgataacaataacttggagaaatcatcttcagggggtattaagaggcaaaggactagtaagatggtgaatcgatgttataattagttaattaagtcaagtctttattaactagggttagttaattagacttgcaaaatgggatttgattatgggttggtgatattagtattattttcggtgtttttagtagttgggattgggtttcttcttctatgtttttttaatctatgaagaaccctttgtttagggttttatagtgatgagtttggtttatatatggtagttaagacattttatcgtcttaattaatataggaaatgtatagagcttgggtttgtattaatttatcaagaagttttatttatcatattcatgaactctgcaactatttaatcttttgtttataagcaacaacactacgtagtaatagtatagagtatagttttatacttgtcaatttattttctattgtgactgatataagagaaatgacataaagaaatctcttacgcatatccattgttattttttctgacaaactacaacgattatgtcgaaatcagtttttaaatgtgcatgggagaaatagtctatgtcgtacttactctataatttatttcctcagtttctacatattttttaaaaccacaattttttcttcacatccgatatataattaatgtgatatttcttaaattagattgatgtagagagttatgtgacggaagatttgtgtaagttatatcaagtgaaatcgagagtagtagtagatcgaatctttttcgtgagaagtgaaaacttagatcttagttctatttatagaaacttagttttgggatctctgataatattgtctctttcgccgttactgacttacgttatttattacaatattacagagacggttgataccacaagcacattacgtcatgatctcgtcattttgtatctactggtttttcctttagtccaaaattcaacgtagaaccaaaaaaatgggcttattaatttggtgttttcttgagtcttattacttagacagctttagacaaattctgtattccggtccaacagtcggaaatttaatccactgaggaaaaaatttcaacaaaaaatatataaatggtaaaatatcggcaatatttaataatgtaacaggaatatgaaagaaaaaaaaatgacaaaaaataaagaaaagactttacaattaagaattacgagttaaaaggccaagttttctagacccaattttggcccaagagattcgatatgtgcttttgaagagtgtatagccggtgggtgatgatatcattttgacccatgggctgatgttgaggcccaataaagaaaaaatataaaaatggcctatacagggatcgaacctgtgaccttcgcgttattagcacgacgctctaaccaactgagctaataggccaatctgattgtaattctcgttttagatattaatagatgtaatatagacatagtatatgaacttgtgaggtttagaaatataagataatcaaacagattgacgataattgtcttataacagttgacattaagtaagaaattttcttttgatgtctatagagtataaacatatctattatataatacgttgagaaaataaaatcatgtgctatgttacagattagaagaacacaaatatgaatgcacctggagagaagtccaccaagtgttgaagtacaaggaagtgaacatacaagtatgtggaccaataatgttgaatcttttttaaacatatgtataataataatatctgaaacattgcatgagaccgaagactacatctacatgcagaccaaaaacactttagctagttggaatttgtgattagttggagacagacaccataagaattatgaacataattccgaacaatgaacttggtttataaacacatgaccatgcgaaacaaatatactggtgtgaaaaatgaaatagcagaatcatttatggaacataacttaatttttttcttataaagatttgcattagcctcccgaaataaataacagaaatcgcgactccaataaattttatgactagtgtaaaagttatggaatcattgaatcttgaaagctattgagttcttgaaacaagactaaaaatggaaataagatatagttcacaaatgttacgtgggaatgtttagttcaattgggtaatgtaaaataaaccattaaatcggaaactccatgatgtgaacatcaacaaataaaatttggacccagaggtgagaaagtgacaagagaagaggacgatggttccggtcacgacggcgacggtggtaggaccgccgtgttggcccgccgcacgtgatcgagcctatcctcttgtctttttgacctttcaacttcttttgtctcttcctcatcaataactttgtgcgtcaagattttcttactgcagacagatttttttctcactgcacatagatggatgtacaaaacaacaagagaaccgaacttagattctatagtgacaattgcaattatagttatgatgtatcgggataatactttctaccatacagtttctttattatagatgaaaagattttatcagtctaatatgtatagtctaagctatgtaactttatcattcatataacaatatatgtatatataatatatatatatataatatatatataatatatatatatatatatattcatatgtacatgacaaaataaactataggtgtagtgtagatgagtacataagacatatgggctacatagttaaagttggccgacaacagaatttcaatgagacaatgatgcagattcagtttcttcccacctgacatttcgaccccattttcttcctttctttatcgataattaatttagtgttcaattattatttttcatttttgatacaaagtgttcaaattttaataaacttcagcaattaatttagtgttataatgaggatattttgtggttggagcggttgagaaggtctctcattcaaaacctttgatacaatgatactacaatcaatatacttgttaattttaaaaataactataaatttatttgcgaaaaagattggcaaaaaaaaaatgaacattgacaggccttttataatatgggcccattagctgagtgcatggtttgtaatcagttttagtcttcagatgatattgagtattgacgcaattacaaagaagaaaaggaaattaaaattcacttttatttatttatagtagaataaatttgacgtgatatagtacatgtctttccatcataaattaatttggcacctaatggtcacgtcagagggaccgaacaataattttcgatgatattgtgtcccttgatttatatctatagtcattgaaacttgattagtttaatttgctaatataataagaactaagcaaacatacatcatcatagttatatatagagaagtcttaatgtaagtccaaataactaaattaaagtagagttatcccatacgtggagcaccaacattacatatgattagacaagtaaccaaagattatttaatttcagtttttaaattatcttcaaatcaattagctaatgatttgaactaggaagaggttagttggtttgactaaaaaatgggagtttttagttcatgcatgaaaagcagtgttaggcaaacttgtacctcgcataatgattttgtttatttaatagtaattgggatatataatattttttctgttaaaagcttcgtaattgggttttatgaaccgaaacttgctattaacggcgatgtatattctatgcatccgtgtaatttgtgagatatattaccttcttccacaagaaagaaattatctttggtttcttgttaagttaaaacatgtataattgtataaagttggttgaaactttaagtatttaacactagttattgtgtatactgacttcttcttttttttttggcaaagttactgacttcttaagatgtaaaaaactttgcaagtttttagtcgatttgttagatatgttaccattttcttatatctttcaacaaataatataaatgcgatgtcacatattagctagaaaacaaaatttcaaataaagccaatactaatcacaagaactgatcttggttagattatgtgtgagatatatagttgaatttacacagagaattctatggaacttataaggcaaaagccattacaaaattcatcccaaacttttattcgtatatttacatatatatcctccaaaaactaaacatatatccatatcgaaagtgttcaacttccatcctcctacgattgtctatcttcttgcaaaactcaaaccagtttcctctttcatatcctcttgcaagcaaaacccaagccggtttcctccttcgtatcttcttgcaagttgcaatcatcgctttgatccggttaagcatcaaagtatcaacacttgaatcaaccaagatcaatcttgccaacataggagcataacaacacatcgtttgatgatgtaaagcttagctctttgctctctaagaacaccaccaagtcctctgctgctcgatactcttctcttcaaaactcccatcttcgatatagagattttcttttagggtttttctttgattgttttgagttttagttgcgaagtagataagagaaagtgattaattgaggtgaacaaagaaatgtcttttatagaagaagaagaagagagttgtgtagtagggacaagaagtcgaagtcgcgcgtggaaatgcaccccaacccacccgacactgtctctcaccatccacttgtgttaaatgtcacatatcattttcaatgttttgagatagacgattataattgggtggtgtgtattcgtgttaccgtcatatatgttaggatttgaattgcgaaactgatttataaaacaaaattgaaacataagtaaaaactagttatggtgattcacttttaaatgtgagaattacataaagttttcgaagttcacattttttttttcatttttcagtgtataacaaacgaattgggcttcaagagtaaataaatgaaaagtttaagacaaacaaatctacatgttaatcaacaagaaatctatcattcacacggcctcaccttatcaccaaaacattatgctccacaactcataaatattattaggagaaatccggtaaaaatgcacgtgtgatttgtgaaataaaaatctccaggttcaagatatcaaagttcttattcgctgtccacaaaaagacaatataatgaattattgtacggttatataaatattttttcaatgtttgtgttcctatatattgctattttctgtagaggatatgtaaatattacatagttaaggattatgttgtagttacttttagcctaatctccttcttgtagcacactataaatacttgtaatcctctctcaataatattaagcttcctattctacatggcatcagagctttgaaggcaatgaacacggcctctttgctacaagaaggagattaggttgaaagtaattacaacataatctttaactatctaatatttacatattcaatctttcattttccatgttttgatgaatctacagtttttggtgcatgaaaaaaatcaaattattgtatgatgatttttctggaattatattgccccaaaaaaatatttcttaaatgttagtttttatgcagtattgtgaatcagaatgaatacttatctacgttttgtttgaacatgaatctgatgaatgcgaaatatctataagccaatcgttttcatttttatatggtcacaaaccgtgaacatacatgccctctttgttccctcttttatttcccaccaaatatctttgagacctataattaattataatagattgcaagaatacaaaattttaaagctcttaaattaacatatcatatttaattatttattcgatttcagatcatgaatcaaaacatagttgaattataaacaaaaacattagtattcaactaaaactgtgattatttgtacatcttccaatatataattttatataatgtaagaatatgtattttcgattattttgaaaatatagattcaatagattcaaaattttggtaccattaatatgaaataattgagcctttcatttaaggatatagtttatgaacaataatttgtttgtgtgttggatccacgtcagtacagttagaccttccatttgagttcaaaacatatggtgcattgacgacgtggcaatgatggttttgtaagatgacatagttcgtagatactaactaaagcaaaaagtggatgtattattaattgtaactgtgttttttcttccgtatttggattctaaacatttttcacattatctctttgttgtgagtgtttatacttttagaccaaattagtataatagttttatatgaagttcaatatacatttgaaagccgtttaagcaagttttttcatttattgatattttcaccaccttcataggacttgttgacaagcaagttcgcgtctgctattttcaacactttctctgaatttatggagtcccggacggaaacatttatatataaaaaaaaagtttcatataagtttagttgtattaactcttgtgtgtttgtttgttacatggtgctttaaacgggctttgtttcgtactttgtagacaagagttttcagtttgcttcactccttatggcctctaattctgaagcatttgcattggttgccacatctatgatctatctattggtttgtcatctaaaaatcgaaatgacaaaatgtggcaaataattgcgtctggcagattgttgaacacagccatgtttctcaaagaattcaaatccagtaacacatctgggccttgctttttccagcccatgagttgcttaaatttggaaattatcgtggggcgtaaaataataccgtgacaagtttagattggtttaaactttaaacatagcaaaatatggcctacgttgatggtctaagaagggttgtaattcttatttcatctagtaacggattgattacaaataaaatgtttatagctttatatgtttgctattcatcacaataatcacttcacatcacttattaacgtttcaattttctctaaattaaaactcactccctttagcatttgcggtagtatttaatggtagatttcatatgaccaaaaaaaagagagtaacattaaaactgcaaaaagcacttcacagttttggactttttagatataaagtaaaatttggcccactaactgacatagcttagcccatttagtcagtctaaatttttttgtagcttacaaattcttatatgatgatgctggcttgaaaatatcttatggtgattatgacttgtatgatgattatggcttgaaaataactgacaaactgtaattttttatgtacataatatacacacacaaaatatacatgtataagatatactggtatgtgtgtttatatggaattttgttgagtgtatatcagttcaacgtaggtgccaaaataattattatggctgattaattaatgttacgaatttcagagatcagagaagaacttttgccattagtcgtatttaatacatcaagaaattgtaatctccctaatactcagtacaataactgaaaaaaatttcagctatttttatattgttatcttgtgttcatttttttctttatatctacaaatttcttccccacatctacaaaaacagttttcaaaccagcaggaccaacttcttcatctacattcacatcatccacagcagcataagcttcagccacagactcatcaattttcttcttcacaagctcagtttcagcgacagactaagcaacttccttcttcacaagctcagtttcagcgacagactcagcaacttccttcttcacaagttcagtttcaacgacatactcagcaacttttttcttcacaggctcagtttcagcacagacttagacacttttagaacaatattctgaaattttggcacaaagtttacagatgtgaacttggtaacaattcttcttccagacaatgttggtttcatgaatccggagcaagaaagaggtaaaccaaaagaagccataatgaaacgaagaagcagtagcaagagtagaaaagaagcagtagcaagagtagagaagaagataaaatgatgaatgagatatatagtggtgaacattatatctctatctctacgagaaacacatatagatatcaaaactgtatctatattctctaagctacgaaaagaattacctgcaaattagagaaaatctcgatcagtcaacggttctgttgtgttcaatatatatttttttttttgatgtatactagatattgactggtaacatgagaactaagaagatgaattttttttagggatataacaggcaatgagtgctaagaatcgatatgttttatgtttagtcgagacttaagtttgaaaaatacagtaagaataaaactatggtattttagaaaagacgaatattctaaattacttgaaactaggtggaattgaatctttcagaatctagtttttgtgggtaaacaaatctaagtcaattcttaatttttatttaagatctactttttgttttttagtatataaaggaatttgtgatttaggtcgggatatgagcctttgagaggcgatttttaggtccagccgcccaaaattttttcttctcttaactttgttgttccctctccgatttaccggtacccttggccggagtcgtgagatgttgtttccgattgtcttttctcttttttttttctttggttcgagccttctctagcttctcttatggcggatctaaagacgagatctagatggttgtgcttcgatagggttgtttccgtttctcggtgacgagatctagatggttgtgcttcgatagggttgtttccgtttctcggtgacgagatctagatggttgtgctcaagctgaatctcaaggttttcctccttgttcctagcctgtatcattatcttcatctgctttagtgtggcctggctcaagtggttcatgtttccttggtcatgtttagtgcattggtcgtagacttctcttagtgagctatttttaaaggttgtatctttgttgtttgttgcttccctgtattttagggctatgtctccgttgtttgagctatgtttctcctttgtttgggctatatcacccttgtttggactatgtctcctttttgggtttgtgactacgatactatcccgtttttgatagcgggttttagtatccgtctttgtatgaacttgaatgaaataaaatgagactattgtgacaaaaaaaaaaagtatataaaaaagatcgcgagtttgtttgtttgcataggttaatgagcttattacgacattagaaagaatagtagtttttttttttgtcaaacagaaagaatagtagtttatacataataacactatatatgtagctctgtaacatagattagtctggttttgtttcgcgcgatattgtagtagaattgtaaacactacgttttgggtctggtggcattgaaaatcacaacaaggctaaggtcgcgtggtcaacagtctgcttaccaaaagctgagggagggctaggtctcaggtggttttcagaatggaatacaaccctcaatctgaagcttgtttggcggttattctccggaggaggatctttatgggtggattggcataggtatcaccatcttcagggtcttggggatgcctctgtttctaaattctggacctctcaagaattggtctctgattcctggaattggaaatgtctcttgcggctgagacctttagcagagcgtttccttcgatgtaacataggcaatggccttactgctaggttctggacagacaattggacgccatttggccccttacttattcacattggtgctgcacgtcctaataggttgaggattcctattgaagcttctgttgcagacgctactcagggcattagttggggtcttcctgtctcgcctctttgttgcttgtgttcttgtgcacccgagaccagggatcacttactgttgggttgcagtttcagcaaagccctctggagttcggttcagtccagacttaggttgcactcacttatttttctgaattgggctgaacttcttttatggattcgtcgttctagcacttctgctccctccacactgaggaagcttgttgctcattccgtcgtctacgcaacttggaagcagagaaataacatgctacataactcgcatcacttggatcctgcttcagtcttcaagatcatcgataggaaaatcattaactccatcaacgcaagaagacacaaaaagaagttccgtaatcttatgagtttttggctcatataatgtttctttctgaagattgtttacttctttgttttttatcttaatttttgccaaagaactaattatttaggagttctcattgtaattcctaactcttttattttatataatatttaccgacttagcaaaaaaaaaaaacactacgttttgagctaaaagaaagtcaatggcgtaacacacagtgtcttaaacatgtcggtccatgtgtaccgtgttacgtacataatattcatatacatttggtaaatatgtatgtccataatatatataaagctcgttgactttggttgaccttgaactttaactttattatgtggtgacgccactgcgttcgtcattattgatcgattagaacataaataactaaaagaaaagctacatgttagtgggagtacaggtttttgataagctcgtttgcaacagaaaaacttccctaaagaaatatctaaaataaactaataatatgcaaattgctaagttaatcaaattccaacatatcagaaagaaagagtttgctaagttatagtaatactaatagctctagttggctgtatttcgttcatgggtgtgtcatgtcggcaacgtgaatctacttattactatagttaaatacagtattaattaaatttttgtttatatagtatattattcatttccaaatcttattccagggaaattagatcttttaaccgtgatacatattttgctaacaaaacaatcatataagtttagtggttaatatacactaaacttgatttaaaacatgacgacatatacggaaaaataggttaaagaaaatgaaaattttattttataataaatagtcaaaatatggaaaatataaatgatagagcaaactaacattttatttaatgtgtttaagaaaagacacttttgaaggtgtataccattttgaaaagaaaattttagaccacatgagtaaatatgattcaaaataaaaataaaaccatatttgtttttaacaacatacattatgtgaattcttatctagatggtaacacaatgagaagagattttgctctacatcttatatgatatgagctttttttaatcaaccacacatttattaaaagataaatccatgattggttgtccaattgagaggaaaataatttataaaagtaatttaaaaaaataataaacgagaaaaatgaattttcctcagaaattatataaaagaaaaaaaagaaaaaaattgaggaaaaggaaaataaaacatggagcattccaaatttatctagtagattggagaatactggctaggcgaatgcaatatccagacatattatgatatgaaaattggatatgaaatgagttttaaattttttcattctacatattatcaaataatatttcaaaagtatcatgtaaatttatttaaaacttatgacactaatctacacaaaaatgaataaatgttaaagaaatggaaacttcattaatttattacaataatgtggctcctttgatatcagcttctcaaccaatggcaatataaatgtatgggggtagttggtcccatggcttcgaccaattatcttcttcgtttctctcttttctttttgtttaaaactactaagtcaacaaaagcaacttggagtgataacacgaggaactagtcgttaattaattgattaaagttaaagtataacgagctttttaactgaattggtcattaataaattgattacgttattctttaattactgtttttttccataactttatttgatgacttggaatgaggtgtatgactgcatctggtccacaagtggcccatgatctgatatagaatcttgcaaaatccgtgacttgattgataattttagttattatattcagcgttaagtattacctaattagctgatgttgtattcagacaaatagcgaaaattagacagttttcatgtttctctcgtattgattaactcaattttatgtatatttgataatataggtttttctatttatctgttgtgcaactttaacggcaatgtatattatgtcaataggaaatacacgaaaacacacagacacacatatacatatatagatgataaaagaatcatacctcttttttttctgttaaataaaatgtcatacttttacacgatttgaaacctgacattagatggtaattatgattcaaaatattaaatttagcagtcgtacgaaatcttatttttcgagtgaatccttacatgtgaacacagaacagcctgaagcgacaagttgcctaatcaaaaacacataaatgggaataaaatgcgtgacatggacatggcacaacgtttccatttctccaaaaaatactatagcttccccatttaaaaaaaataactagattttaacccgggtataccgcgggacgatttatttttaaaagtaatatatattaaaatttgcaaattttatttttacaaaatatttatattttacagtttattattgttattaagtaacgctataccacgaattcctgagacaattgttaaaaaaactgaagttttgacccctattaaaatagcatattaataatattttaaaattttataaatattgatttaaatacatccaccatataactcaattccaaaataaaacacgttctgtagtttctttacccgtcccatgatttttttaagtagtaatttttaaaatttaagaattattttttatatataaaagttttgcaaattgtatcattctctaatacatttatattttatagttatattttatatatagtaacattatacataccacataacatttttggttttatataattttttctaaattaggataatttgatatgtttaatattagtggtcttaaaaaataataaattaaagatttaacccatattgaaacagtggattaattatattttatttttttattaatgttgattcaaaaacccgtccctccaaatccgtcttgccaaaaagtcaatataatctaaacattttacctaataacataggagtgcaccatatttatttaataggggaatgtatcatatgacccgaatgcatttttatccaaatccaccaaaaaagtcttgcaaaaatactatagatataagaaacgatagtcggttttgatagatataagattagcaaatatattagttagcttaaattagttaaagaatacaaattaaaaaggtatattacactttattcaaatatagtatcaaaacttatataacacagagatttgataattttttaattgttgaatactttttttttgtgctaatttttatgtgattaagatttaattgatttcatatataaaatattaaattgacttatttgtttataatttggtaacagatagatatttgaatattcagtatattttgcttcagtttaggaaatctttgatgacccgtctttagatccaataagccctataatttagagattaatctgcagtataccgcatgtaggcttatattttagttaaactaaaaacttttattgtaaagatgatttaaaaatatatgatattattttatttgattttaaatgtatagtaaactgtgaattgtatatgttttgttgatattatattttagatcgatattaatacaagatggtatactacatgtgaaactctaaaattaacaatcaaaatacaagtgtataattttaaacactaaacaatataaataatatcaacaaaacatatacaactcgcagtttactatacatttaaaatcaaataaataatatcatatatttataatattatcatacatttaaaatcaaataaaataatatcatataccttctcacatacacacctatcaaaaacttaaaacctttcaaaacctcttggtatattcaaattaggattcttcattcatggaatcattattccaagggttttgagatgtcttatgaaatgattttggcagaagaggatgtaaaaaatttcgaataaaaagtagtcagcaaaacatatgttttttttgaaaatttttagataattaaatcagagaatagggttggacatatgagtaacccattcgagttcggatagaacccgttcgggtttgagattaatggtatatgatttactacccaatagaataattctaaacatatgttttgttgatattatctatattgtttagtgtttaacattatacacttgtagtttgattgttaatttaagagtttcacatgtagtataccatcttgtattaatatcgatctaaacccgtcaattctaggattttccagcttgtattaaaaattgaatcacatctaatatgttattaactattgtagtatataagattataaattttcaatataatatgtatgaaattgaatataaatatttcaaatttatgtcccgttactcagtagaaagttttcttaaatctatttttcacccgttataatattatttcatgtattgaacaatttatattcgtttttaaaaattcaaattatggcatatgcggaaaaactctaattatttttttataatgatgatattattattccgtaaaaatagaatcatataaagatgagaagtgaactataataattaataaaaaattaagatgataatttagataccaaatataatttgttgattttaattagatacttttttggaaattaataatgtatttcgtttttctaattaaattaaattaattaaaatttagatatcaaaccttatatgttgattttgattggctattatttttggaaattaataatgtatttcgttttttaattaatttaattaattaaattagtatttgatttttaatccttaaagagataaattaatttactctttaaaattttatttttaatggcatatctatgtaattatttataaaaattaagattatatttaaaatgtatttcccaaataatatagtagaataataattaaaaacaaaattaattggctcgtgaacaaaacgataagaactaacaagaaaacattattattgttgacaaataaaaacaagaaacattattatattaacacctaacgctgccacaccttttataagatatatgttttcttttacaactatctgaatctctaatgtaataaaaatatatgaatgatgtcactggtagtttggtaccaattccatgcacaacattgtaaaccattttcattttagtgttctttgaaccttttgtaaataaaaacaatattaaaccaatggaactcattgtatagttaattaataactttcgaatcccaaaaaagttccgagtaacgttttttctcgtctctatattggattgtaaaaacaagtaaaatatatatccgggtcagttcttctaatcaaaataatcaagaatgctcattagattagactggaatattttgataaacatccataattagaattgaaagttcttaatttaaaaaacaacaactaaatataaagtaacgaatacaggaaaattatattttctattctaataatatatgttgattgttgcatattgtctttttggtttaataataatcgttatctaaagtctagaaaaaagttaattataggtatatctttttagtaattcttatccaaatacttcaaagacacgacatacaaaggacaataaaaagtacatatctataacgagatcgacctttgatcttagaaaaataaaatgagttaagaatacgaatatacgatcgatccccaagaaaatagatgtgtaatttgggagtatatattactttttttttttcgtcaggagtatatattacatttttacatttatctataaaagaaatatattgtgttaatacactaaaatcagataaagaattaaataatttagcatattacgcggctgccgacaatagatgtggagtatgacttcacgtagacatattaagtcatctagtgtcaatatattaaattgattgttgggttataattgatcttaaagtgagcaagttttatgtcgcaccaaaaataaactattgagtgttatgtgcctaacacttaagaagttaagataatctcgagcgcttttaatttaatctaaacaagactaatgtgactaatgtgcataaacattcgctttgctttttttcatcacatcctatcgatggcataatcatattctctggatacgttatacttttgggtcggcaattcacgtttttattcggctatatattgagttttcttatttaaaagaatattgaaataatacatctaatcaaaaaataacaaaacatgtagcatagtgatttatactaatatttttgttgtggatcatcatcattcagactaaatatgtattgttattgattgaaaaaaagatagttaagtttctctaaacttgtgaaactaatctatttgaaaagcatcttgagatttcataaatatttttaatgaaatataaattcggggtctattgggatagttggattggtttaatctggttaactccggttaactagatttcggtttaagtttaatgtgcatagtatataaacttgagaatgtaattaattcagtttaaaaaagctttgtaacaacattttatcagataataaagttcgttatatctctcttcttcttctccgattagacttccgatcatcggatttattatggtatcagagccatacaatcgattctcccgcttactctttcgtcggagatgagcttgttcttagcttcattgtgtttttcgatttgcgatctttcactttgaagatttgcaatttcgttctttggttcgccggaatcttgcttttccgttctgttttctttttatttctcttcattttgacctcctgtgttgacgattctagctttctttacacaaattcatcacacatttctttgtaatttcttgttcttacactgagaatgggatattatgctcctccatcgattccagtgactcgacctccgatttcgtcgaatggtactgaacaacctcgttttcaaacggatcagtatgataatccgtattatcttcatagtgcagatcacgcaggacttgttcttgtgtcagatcgattaacatcttcttcagattttttgtcatggcgtcgatccattctaatggcattgaatgttcgtaacaagttgggattcatcaacggtatgatttctaaacctccaattgatcatagagattttggagcttggtcaagatgtaatgatatggtctcgacatggttgatgaattctgtggataaaaagattggtcagagtttgcttttcataacaactacagagggaatttggaataatttgctctcaaggtttaaacaggatgatgctcctaggatttttgatattgaacaaaagcttagtaagctagagcaaggtgctatggatgtttgcacatactatacagctttacttactttatgggaagaatacaagaattatgtggatcttcctgtgtgtacttgtggtcactgtgaatgtgatgctgctatgaaatgggaaaagatgcaacagcgtagtagggttactaaatttcttatggaattgaatgagggatatgatcaaacaagacgacatattctcatgttgaagcctattcctacaatagaagaagctttcaatattgtaactcaagatgagagacagaagtgtgttaagccatctactagagttgaaaatgtcgcttttcagagtgttgctcctcccatgatgaatgaaatggataatgcttatgttgcagcttacaacactgctagaccagtacagaaacctgtatgtactaactgtgggaatgttggacatacaattcagaaatgttacaagattattggttatccaccaggacataagataggtgcatcaggatataactacaggggaactactcaaatgcaaccaagaatgcagatgcaacctcgtatgcaacctcaaactcagatgcaaatgatgccttatgcaaattctatgcagaaagctaatgcagtagctcatgtgtatagtgagaatagttcctatcctcctgatggttatatgcctatgcctatggttaatccttatggatctttggctccttagtatatgtcgcatgttattcaaggtggtaacagtgttaatcttcaagcgtttactcctcaacaaattgaaaaatggtttctcagtttcaagctcaagcacaagttcaagagtctatagctgcttcaagcacacttacggctactgtttctgaacatggtttaatggctattacttcaacttctggtactgaaattctattcccttctactagcctgaaatatgagaatagtaatctcactttccaaaatcatacactttcttccttacaaaagcttttaccacatgatgcttggattttagatagtggagcttctagtcatgtgtgttcagatttagctttgattagagaactaaagcatgtgtctggtgtcactgtcactttaccaaatggtactagggttctgattactcatacaggcacagttcatatttcacagaaactcattttgcataatgttttgcatgttcctgattttaaattcaacttgattagtattagttgtctaattaagactttagcttgttctgctaatttttatgttgattgttgtttgattcaagaactttctcagggcttgatgattgggaagggtagagtatttcacaacttatacattcttgagactgcgaatcaatttctttctgcatcatctcctgcatcatcttatgcatcatcacctgcaacttgttcattttctggatctgtcattgatggaaatgtgtggcatcagcgtctaggacatccgtcatctctagttttacaaaaacttgttagtgtcattcctgctttacaatcttttacttcttcatgttcgatttgtcccttagctaagcaaagacgattagcatatatttctcataacaatttagctttgacacttttgatcttgttcatttggatatatggggtccgtttagtgttgaatatgttgagggttttagatattttcttactttggtagatgattgtacaagaaccacatggatctatatgttgagaaataaaaaggatgttactactatttttcctgtctttgttaagcttgttgaaactcagtttaaaacaaaaataaaagggattcgttctgataatgctcctgagcttgcattcactgaattggttaaagaaaaaggaatgatgcattatttttcatgtgcttatactccacaacaaaactcagttgttgagagaaagcatcaacatcttttaaatgtggctaggtcattattgtttcaatctaatgttccattgcaatattggagtgattgcatacttactgctgtgtttctcatttaaccgtttaccatcactattattgaaaaataaatctccttttgaacttttacttcaaaaattacctgattactctttgttgaaaatttttggttgtttgtgttatgcttctactaatcaaaatgaaagaaccaagttttcacttagggctagagcatgtgttttcttaggttatccaactggttttaaaggatataaggtgctagatttggaatctcattcagtttttatatctcgtaatgttgtgtttcatgaacagacttttccttttaaaactagtgagttactttgtaaggctgttgacatgtttccaaatactatattgcctttgcctgccccattgcattatgtagaaacaacacctttgatagatgaggactctctggtagacactactgcatcatcatcatcatcatcatcatcatctgcattagatcctagtatcataccatctaatactagtacagagatgcatgattcagaccctagttctgttctcattactaggcctaaacgcactactagagctcctaactatctatctgagtatcattgttctcttgttccttctatatctaccttaccacctacagaaagcacatcacaaacacttcctccatcacctaaaaagacttcaccacatcccatttccactactatatcatatgatcgatatactccattgtttcaatcgtatatctttgcctataatcttgaaacagaaccaaaaacatttcgccaggccatgaaatcagagaagtggacaaaggcagctaatgaagagctacatgctcttgaactcaacaagacatggactgtggaaactttacctaaagataagaatgttgttggatgtaaatgggttttcacaatcaaatacaatgctaatggaacagtggaaagatataaggcacgtttagtggcacagggcttcactcaacaagaaggtatcaattttcttgatactttttctcctgttgctaaactgacaagtgtgaagtttatgcttggtattgctgccatcaaaggatggagtctaacacagatggatgtgtcaaatgcttttctccatggtgaattggatgaagaaatttttatgagcttgcctcaaggctatactccacctcagggaactactttacctcctaatccggtttgtcgacttcttaaatctctttatggattgaaacaggcttcacgccaatagtataagagattgtcttcagtcctattaggtgcaaactatattcagtctcatgttgacaatactctctttgttagagtaactgcgaactcctttgttgctgtgttagtatatgtggatgatttgatgattgccagcaacaatgatgaggcagtgcaacaattgaaggctttgttgagatttgaattcaagattaaggacttaggtccaactcgtttctttctcgggttagagatatcaaggtcttcaaaaggattttcagtctgtcaaagaaagtatgctcagaatttgttgacagattcaggtcttctggactgcaaaccgagctctatacctatggatcctacaatacactttacaaaggacatgggagtaccattacagaatccaacgtcttatcgtgatcttattggcagattactttacttgacgattacaagacctgacattacttttgcggttcatcaactcagccagtttatatctgcaccatctgatgttcatttacaagctgcacataaggttctcaggtatattaaatcaaaccctggtcaaggcttaatgtactctacagactctgaattgtgtctcaatgctttctcggatgcggattgggctacgtgtaaggataccagaaggtcagtttcaagttattgtgtttatattggcacttcattggtatcttggaagtcaaagaaacagtctgtggctagtaggagtagcacaaaatctgaatacaggagtatggcacaggccacttgcgagattatatggttgcaacaactcttgaaggatcttcatgtttcagtcactagtacaactaaactcttttgtgataataagtctgcacttcatatttctatgaatcttgtgttccatgaaaggaccaagcacatagaaatagattgtcacactgtgcgggatcagataaaggctggaaacttgaaggctttgcacgttccaactgaaaaccaacacgctgatatcttgaccaaggctctttatcctggacccttccattacttactgaagttaatgtcactgtcaagtctataccttccaaatcatgttgctaaggtaaagacttgaggaggggatattgggatagttggactggtttaatctagttaactccggttaactagatttcggtttaagtttaatgtacatagtatataaacttgagaatgtaattaattcattttaaaaaagctttgtaacaacattttatcagataataaagttcgttatatctctcttcttcttctccgattagacttccgatcatcggatttattagggttcccagttttgcaaaattatatttcagacatacatttattttaaaaaattgcaaaatattaaatagttcgagatggttcttgaagactgtcatgcagttttttttttttttttttttacttaacttaccttcattactttcaaaaacttggatagaactacacagtgtctctcgcaaaagtaacacgtaaaaaaacaacaaacaaagaaaaaaacaatcaaaagaacacattaggcattgaacatgccgaaccaagtagcgaggaaggaagtcccttgatgtcctaatctctgagctctagacaaaggatccaagtgacagcggattaaagcttttatctccaaaataattccagcagcaggtcttgaggtagcattgttaagtcgagagtttcgttctttccatagagtgtacaccgaagcttgatgagcaatcctaagaatcatagtcacattcttgtcatgacaaggattcttaagccatctaactccatccccaaacaaatgaggaggagaaacatgggcccgagaggtgaaataattccaaacttctcttgcaaactcacaataaaaagaaaaatgttgtcttgtttcatcttgcgaattgcaaagaaggcatacatatggaacactaagtctccaactgataagcttgtctctagtatgcagcatgtgcctcatattcacccaagaaatgaatgcatgtttgggaacccttcctttaaaccaaatagccttggaccaatccactctatcctctaaaaaatttaattgaaaccatgtcgcagctgagggaaacacacatgaagctcaattcctctaaccttccacaagaagagatcatcttctgcatcatcttggaggttcaccacattagaaaccggaagacagttattgagcatttgaataattgggttcctgttcctacttctattaatccaccattccccatcatcttggaagttttttctttttcttaatttgtcttcagattatgtttctgtttgtactcttaaatggaacccaatttcataaggaaacatgacatttctcatttctttgtttcatagagttatattccgtatttgttaaaactagtttcaaaaagtgatattagctgttgataaagaaaaaaaaaaggtgataatagcttgttttataaaagtacacttgagaaaaagaaaaacaaagggtggtactgttgagtgttgacatatgatcgttattacctgtaatagtattaaaattattgttatatgggatttggccatacaagcgaccgacctaaatatggaaagtaagatgacgtaagcaaagcttataaaatttattttccacctatcacgtttttgatcgatgatacgaagctatactaagtttttatttttttaattcatcagtaaacttttactaaataaggtaatactatacaaaaaaagttaaaagtaactttttaaataaattttttgatattcgcttttataatcggtaactattaaagcggtatattttatattaaaagtttaaaaaatcctgataagtagaaaataaaataaaaaattaaagaaaatttggggaaaaaaaatcatattaatatatacttcatatttttattcactaagaaaatatctttttcatattttctctaatttattttctgaaatttataaaataaaattattgtagtaaaacaatttataataaaaattaaattttatttttaaacagtgattgctattttatttacaaattaatagttaattcaactctaaagctaaaattagaatattgtttttggttatgaaatcatgtgtatgaaagtaacaacattttattttttgagtattaaatcgcacaatgtaattatatatatttttttcaatcaaaaataatgttattaaacatccaaataaaaaagggggatttttttggctttttccttatattttgctctaaaaatagagatgaatagtgttgcctaaaatttaaaaatatgttttaatactaaaatttgtgctcattataatatatgtaattgttatatacataaatttatgtgtgtgtatatatatatatatatatatagaccaaaaagttgaatatagacgatgatttattttctctttatgtaagcacggatctgatgctatgtatacaaaaaagatagaataacgaaaaggtatgatctcgagcattgaaccattgcatttgtatatacatgaaggattcatgcttgcaaaaagatcctcacggaacaaaattcattgagatttggagaaaaacatattaatttttagtgagaaaggaataatatcgtaacagttaatttgcatctctatagtaagaaaatagatcgaattccttcagctccaacttttttatttattttcttttacaacaatttgctaatcattatattattttaatcaccatgcttgtaaattaacaaattgtatataacatcagggggaatgaacttaactaaataatattctatttatcatgtgaatctcttttatatcttatggtccacttgccgaccccacttccccatgcagcccacaacatattcatatcaccttttttcgtcgtgaatatcataaaaaaagtttggtgataatcggtatcaaacagtgaaaggaatggtatatatagagcaatcataaaataaaaaataaaaattaaagaaacttaagatcaaacaagttttgctgattaataagtaataaccataaaatataaaataaatttagattcatgattttttgggggtacttttagctatagttttaatatatgcatcgtagatatatattgattgagttaatttattttatatataattatttgtttaattgaaacataaacctaatatggaaatgcgaatttaaccttctttttttaagtattctttatcttttgcatgaaccttcctttgtatttaagttgacccacaacatatacacacacaaacccatattattccgatacacctacccatatattataccatctccttaaaacacactacaagtaataaaaaggacggaacttttttttttaataacatacatgcacacttgatgtttcttatttccccttgtctctctatatatacacacattcattcacacacgttcacacatatacattcacattactaatctctcaagatttcacaattttcttgtgattttctctcagtttcttatttcgtttcataacatggatgccatgagtagcgtagacgagagctctacaactacagattccattccggcgagaaagtcatcgtctccggcgagtttactatatagaatgggaagcggaacaagcgtggtacttgattcagagaacggtgtcgaagtcgaagtcgaagccgaatcaagaaagcttccttcttcaagattcaaaggtgttgttcctcaaccaaatggaagatggggagctcagatttacgagaaacatcaacgcgtgtggcttggtactttcaacgaggaagacgaagcagctcgtgcttacgacgtcgcggctcaccgtttccgtggccgcgatgccgttactaatttcaaagacacgacgttcgaagaagaggttgagttcttaaacgcgcattcgaaatcagagatcgtagatatgttgagaaaacacacttacaaagaagagttagaccaaaggaaacgtaaccgtgacggtaacggaaaagagacgacggcgtttgctttggcttcgatggtggttatgacggggtttaaaacggcggagttactgtttgagaaaacggtaacgccaagtgacgtcgggaaactaaaccgtttagttataccaaaacaccaagcggagaaacattttccgttaccgttaggtaataataacgtctccgttaaaggtatgctgttgaatttcgaagacgttaacgggaaagtgtggaggttccgttactcttattggaatagtagtcaaagttatgtgttgaccaaaggttggagtagattcgttaaagagaagagactttgtgctggtgatttgatcagttttaaaagatccaacgatcaagatcaaaaattctttatcgggtggaaatcgaaatccgggttggatctagagacgggtcgggttatgagattgtttggggttgatatttctttaaacgccgtcgttgtagtgaaggaaacaacggaggtgttaatgtcgtcgttaaggtgtaagaagcaacgagttttgtaataacaatttaacaacttgggaaagaaaaaaaagctttttgattttaatttctcttcaacgttaatcttgctgagattatttatgttgtaagttgtaacaagtggaaaaaattaattaggtgtcaaacaaatcttgtgttaatattctttgtataatgtatggatgagctgttattaattactgtaatttttaattgggcatactcgtaattttaattgggcattattggtttataggcccattaaagtgtttcttcctcatattctttctttggtccgttgcttattcaccagggaaaaatgttgcagaagatttctcagtctatttctttatgtaacggcgatcaatttaagccgttaatatacctcgccggagctccgacgaacttcatctcttcccctctctcaggttgttctctactttactttgtttgtttcgtcaaatttcatgtttaggtttcgagaaaattgattgtgaaggaattagtagaactttgattggactaatgatttttttttggaatctatatatgaatcatgattttgggtttatgtattgttttgtttcaggcaagaagaaatcatcttctctgagaattaaaaggtatataaaaacaaaactaaatttacatgaaggtgaaattttagtatatagttttaatttgatacattttattttgtaggatacaacaacttcaaagtacattagaagatagaataaatccaccactagtatgtggaacagtatcgccacgtcttagtgttcctgatcatatactaaagcctctatatgttgagtctagcaaagttccagagatatcaagtgaattacagattcctgactctataggcattgtgaaaatgaagaaagcgtgtgagctcgcggctcgtgtattagactatgcaggaactttggttagagtaagttacttttgaatctctaactatgattgaatctctttgttgtaatggtttttttgttttgttgttgcagccgtttgttactacagatgaaattgataaagcagtgcatcagatggttattgagtttggtgcatatccttcacctcttggatatggtggatttcctaaaagtgtttgtacatcggttaatgaatgtatgtttcacgggattcccgattctcgtccgctacaggtttggagtagcatgagaattctcttttgtagtatatatgtaacaccccggtttcaggaatatggtggtgcatgcggagaggtttataatatatcactaatcaacaacttcttgtattcagaatggagatattataaacatcgatgttgcggtttacttggatgtaagtatatatttctaagtttcttttgctaatctcattcagattttaaacttcggatggatgtaacactttgaaataggggtatcatggagatacgtcaaagactttcttatgtggagacgtcaatggaagccttaaacaacttgtcaaggttaatgtgtgcctctaactttcgaactcttaggaacctgttagaagctgacatagttattgttcttaaaggtcacagaagaatgcttggagaaaggtatatcggtttgtaaagatggagcaagcttcaaacaaatcgggaagataatcaggtactaaatagtactaatcccattcaagggaagttaggaggatcagttttaattatattttcaacagtgagcatgctgcaaagtatggctataatatggagcgattcatcggtcatggtgtaggaacggtattacactcggaacctcttatatatcttcatagtaactgtaagtaatataaactggctttttctgtaagaactcttcattatgatggagttttttttgctgaaaaactctgttttgtgcagatgattatgaacttgaatatatgattgaaggtcaaacttttacgctcggttagtattatctatatagaatttgatgaatgcatttatactcttttatgaagtgtttggttcctattttttttcacagaaccaattctcaccattggaacaacagagtttgtaacatggcctgacaaatggacaattgtgaccgcagatggtggtccggccgcacagtttgagcatacaattcttattaccaccactggtgcagaaattctcaccatatcatcatgaattatatcacaatgttacggaatttacattatgaaccatccatttctgttgtaaataaaagaaaatataaactgtttggttctgagcagttgatgttggtgtcgttggcaattcctatccctgtgataaatggtggattggttctgagcaaaaattaatcacatgaacattcaaattaaatctaaaatcgagtgattaaatataaaaattaatcatatgaaacaaattaattttatggcacctctaaaatgattttggataaagatcacttgtgatgtgaaaacaaattaattactggatacaaagttaactcggcaccaaaaaatcattgcaatgtgatgagtagattcattcaataatatcggaactaactttaacgttgtgatgtgaaaacaaatttaatttggcctttctaacgatcaaaagactggataccgagtaatgtttgttttgttacatacttttgtataggactcgacataaaactagaaatccgaaaccgaaccaaatagttataaaacccgaactgataatgaatatataccatgcacagctgaatcttatagtaaatatatacattttgattagtttattatgagtttttagttttttactatgtttcaaaacatagtggttgtggtttgtttaataatggttttagaagaatcttactttattatctaaaaagtaaataacaatttagtgtaccattaacattttaataagatgacattaacaaacttaattaatatcagaatcttctatatcttatgtcagggtaaagtaattttttttctttaaatggtagaaaatcaggataaaagtatatgtcccatagtttttaaaaataatgatatgtataactaaatatattgaaacttaattatgttatcttttttttttgttaaaactagattaagattaaatgaaagaagacacatgtcacatcttagagcatgtgtttagaagaaatctctctattatctaaataaatagtaatccataatttttaacatttaaaagaaaatgacatttacaaaattttaattaatactagaatcttctataccttctaatagttaaagtaattttgtttttcattaaatgattaaaacaaactaggagaaaagtatctttacttgttataaagaattatgccacaatccacatgttagtttctcatatcatgaaatcttgtatatattttcaagtttccagtcttccaggctttaatttgttttgaagttgtttatctgacaagcgataacaacacagagagaactcgtcgataaatttcaaagatggagaaaactgagtggtctgatttacctgaagaactcctagatttaattgcaaaccgttattcctccaacattgacgtcctacgtatccgtagcacctgtaaatcctggcgttctgcggttgcgatgtctaaagagcgtcttcagtttcgctttgaacgctaccttcctacctccaacaagaagataaaggctcatctctctcccaccactttcttccgtataactctcccttcttcatgtcctaacaaaggatggctagtaagaactagacaagcctccaaaatgtatcgtaagattactctcttgtgtcctctctctggcgagcgcatcacccgttcccaccaaaccctagaccttttgaaggttggcgtttcagagattcgccaatcttacgagattcaaatattcgatggattgaaggacgaaaagataccattagattcagagatattctctaattatatcaagaatagtgacaaaataccatcaggtgtattctttagagttgctttcctagacaatattttttttgcagtcaattaccacgataataaaatatggtgttgtaagactagagaaggaagtagaagttggacaaaaattaaaaaccaagtcgaagatttctcggacattatacttcacatgggacgtatctatgccgtggacttaaaaggagcaatttggtggattagtttatcacagcttaccattgttcaacagacatcttcaactccgttggactactataaatatgatagttgccaagacacgaggctcgtggaatattgtggagatctatgcattgttcatgaacttagcataactcgaaatcatatccagaggaccgttggttttaaggtttataagatggacgaggatttggcaaaatgggttgaggttagttgcttgggagacaacacactcattgttgcttgcaacagttgttttactgtcgtagcctctgagtaccatggatgtttgaagaattctatttacttctcttattatgatgtcaagaaggccgaaaatataaaagtgttcaagcttgatgatggtagtatcacccagaggactgatatttcttctcagagttgttttcacatgttctctcttcccttcctcaactattaattacctttaatttaaaaatcttgattattaaattaaagatttttttatttaatttaagtatatttcaaatatgaatttaatgcatatctatgttacttataattaacagaaaatttaattaaataaaaactaattaaattaataaattaaatttaaaatcatgaaaataatattgtattttttttctcaggaataatactataatttaacttttcacaaaatgttttttgaaacgatcatatttcgaaattttgaatgtggcaatgaggtttagaatggaaggaaaagtaaatacatggtaaagtaaataacaatgtatgtgactgcatttataaaattataatctaataaataaaatttaaagtgaaacattagttcctaagaataatacattagagagagttgttatttattattaaatttttacataaatgaaaataaaataataccaaactcaacaatgtaattatccatcttctaaaaacgtaaataatcaagaatcattattttcatgagttataaaacaaaatatataaaaagtgatatgtaagctgttagaaaaaattctatgtaatttatgtagcacaactctttaacatgatcaaaatgaagaaaaagtttgagatttcattacttgaatcaaatgttgaatcaaaggctgactttaaacaaaatatttaaaataagtttttttttctttgagaaaaatgatagtccttatgtttttagttgatatttgaggataaatttttggaaattcacatgtctttggaatcataagatcatatgagcaagaagatttagatttcgaacctatttgaaattcccttttcaaaagtatgatttgatatgcagcggtgagaaaaaaacagagaagtagaacaaaaattctattttgttgaatagatttgagaattaattataacggttaatttacttagagaattaggaattcaaaagaaattgagccgttttataattaagttaccactaaaatccgctaatttatttacaaatatttgcttaaacacacacatgcactcgaggaaacgataatcgttttgaaatcaaatgacggggtttcagccaataatacggcgtcgtttaaccgtggagaggttggaaatttacacggtggcgtttaaaggttagttaacttagcgaaaggatttagacgatgttgttttggagttttatatgttttcttgtgtgtcaagctttgctccttaagtctgatttttttgtctaaattctcgagtttcttccatacctgtaaaaattcgttatcctaatagttttagaagaactaaatttctacagcttttctttgtgaattcgatttagtacagaataacatacataataaaagattttaaaaaaaaatcatgtctaacagagaggcatgttcatctaacaaaactattatcttttattatacacatacatatataagatgccaaatattttattttcatctaagagatgtctatctaattaaataatgtgggacaaatatgtagttagaataacgaattcaaagcttcacaagtcgcacgtttttcatttttctttctgtagtttagggaccggccaaaagtacatcaacttagacccaagctaagacccaaaaatttggaccattttctaacaacttgccgtccatggaaaccgaatcaaaaatagcatcattcgttggtgacccatttttgggatatttagcattatcccattcaccatttatcagccatcaatcattcatccaatatatatacacatagacatttcgtaaaactcaaatcactcaccacataaaaccaaagtcccatctcttaaaaaactaatcatttcaaagttttgtctctagtctttctttttattgagcaatggcttcttctacaatctctctccaatctatctccatgacaactctcaacaatctctcatatagtaaacaatttcatcgaagctctcttcttggtttctctaaatccttccaaaattttggtatctcatctaacggtccaggttcctcctctccgacaagtttcacgcccaagaagaaactcactcctactcgagctctctctcagaacttgggaaataccgaaaaccccagaccaagtaagtttattttcttcttgatcttttcgcttaagtttcgaaaaatcatataaacagagctttttccaaaaaaaatgaaatacttttttttttttttgctaaactgcaaatatcatataaatgaagggaaaggtttacatgagttagaacctaaacaaaaaaatgaaatacttacaaaacattttctaaatacattatctttatattaaaatcagtttttcatttcataatttttctaactccattaaatttatatgattccagagccttaaaaccaaaaatttgcaaacttgataatttaaacataatatcagatctcaaaatcaagaacgtataattaattcacaaattgagtttttaatttttcaggcaaagttcaagaactgagcgtgtacgaaatcaatgatttagatcgacacagcccaaaaattcttaaaaacgcattcagctttaggtttggtctcggagatctcgtcccattcacaaacaaactctacaccggcgatctcaagaaacgcgtgggaatcacggctggtctctgcgttgtgatcgaacacgtccctgagaagaacggtgatagattcgaagctacgtacagcttctacttcggagactatggccacttgtccgtacaaggaccatacttgacttacgaggattcgttccttgccatcactggtggcgctggaatctttgaaggtgcctacggacaggttaagcttcaacagcttgtgtatccgacaaaactgttctacactttttatcttaaaggattggctaatgatttgccactggagctcataggaactccggtaccaccgtctaaggacgtggagccagcaccggaagctaaggcgcttaagcccagtggagttgtaagcaactttacaaattagtgaataaaattagtcttatctttctcgtgtcctgtatatataataatctttttcatagagaattttatattcttatacttgtaatcaaataatttgtatggatcttagtatccttgtgaatgcagtatgtttgagttgaaaaatacttgtaatcgaatctttagttttgagttgtccccttttggggagtaaaatatcttcttcttatttttattgggttgaaaataggtttttgcatagttttttttatcgacctttcaaatacgtcacaattacatttataggagttagggttggtgttgtaatccatatacattaccactatgaaactttcagcgaatacaagcatatactatcaaactccaagcgaaataaatactcacaaaaggctcaccatggtcgtaaagtgaggattgaagaaaaatgatcatgttgatggatcaaataaatcttccatcgcctgatttcatcatgatgtacactcatctcaagaacaagaaaatgatactaagaagaaaaaagataagctggattaggcacgaaggtttggaagaaacccaaactctaacccaaatattgtggataaataaaaaacaatcaactttcgagttccttctccagccaacttatgggttgcaaagatacttttacatataaaagggatgctgacctagtgcgaatatcaagaaattgtgtgtgttttatgtgctccgggttcaatctctatttggtatacaaatgactgttttttaaatccggatatctaaagtctaactttgagtactaggaagattataaggcaaagatctagaactcttatagcttaaataaaaaatgattttacatgtaaaagacagaaattacctaatattagttaagagatgatatattttcaagaaataatgattctagttgtataaaatacctagttttttttttgtatttttttttgaatatttagaagtgcaagtccgaaggccatacatttcctagagatatgatccacaccaggttaaattcatttcttttggagaagagatccctcccaacagacttcgaacccaacacctctacctgcgagattttttttttgttattcgtattagatgtgattttggtgcaccacgctagcgttggagatgaaactcccacattttcgcactgaatcgactattaaagcttggtctaagctatcaatttattacagtctatgccagaaatttatggcatcctacctgatataaaaagctttatggcatcctacctgatataaaaatcagtgttctatcctttaagttgttcatgtattttcattccaagagcagccaatgttgagacagattctcttgctaagcttgccttatccgtttatgctgaaaacattgttagttaatccaagtattggcgtttcaaaaaagaagtgattttggtgcaaatatcttttcacagaatataaaataatttttaatcaattttacatacatgtatccgggacaaaaatatagttagattcattacatttagaaggttttttattttatttttgtagtttagggaccggccaaaagtatttcaacttaaatccaagacccaatgcttagatcacgttccgaccatggaaaccaaatccaaattcctcccaaagcatctttttagtttgagacccacttttggtaatttacgcacgtgctacttcatcaatcatccccattcatcactcatccaacatgtctatctataaatagacggagatatttcgtagaactcaaatcactcaccacataaagtaaaagtctcatctcttcataaaatagctttaaaccaatcaagtagagtttcttctcaagtctttttattttatttttatcaatggcttcttcagcagtgtctctccaatccatctctatgacaactctcaacaatctttcatgtaatcaacaatttcatcgaagctctcttcttggttcctctaaatccttccaaaatcttggtatctcatctaacggttcagatttctcctatccatcaagtttcactgccaagaagaacctcactgcttctcgagctctctcccaaaacgggaatatcgaaaaccctagaccaagtaagttaattgatccttttttgtcttccaaacttgattaaatatatgattacagagactcaaaatcaagaacacaattcacaaactgagtttgttttttcaggcaaagttcaagaactgagtgtgtacgaaatcaacgaattagatcgacacagccccaagattcttaaaaacgcattcagcttaatgttcggtctcggagatctcgtaccattcacaaacaaactctacacaggcgatctcaagaaacgcgtgggcatcacggcaggtctctgcgtcgtcatcgaacacgtcccagagaagaaaggtgaaagattcgaagctacttatagcttctacttcggagactatggccacttgtccgttcaaggaccatacttgacttacgaggattcgttcctcgccatcactggtggtgctggaatctttgaaggtgcctacggacaggtcaagcttcaacagcttgtgtatccgacaaaactgttctacactttttaccttaaagggttggctaatgatttgccgttggagctcaccggaacaccggtaccgccgtctaaggacatagagccggcgccggaagctaaggcactggagcctagcggagttataagtaactataccaactaattcatgaaattaaaatgtttctcgtatcgctgtgtaatgatataaagatttgtagttttgtgctcttatctgtaataaaatcattgaggaataatatctcgagtatgttttaagtcgtttggacgttggtacacgaatatatgaaaagtctttgtaatcttttggtcactctcaatgattttgaattaaaaatagttttagttatagaaatgattttatgtattgcacaagaaaatcaaataaaaagaactattaaataatgaaaatatatatcttaaataaaagagtataacaattgaattcttaaaaatcatacagtatctcaacaaatccaagaaacaacgaaacgaaaaattgatgtatcatttggtcgagttaagatacaaaatgaaaaattacatttttttttgtagccatcatcgacaaaaaaaaatgtcttagtcgcagattaaatgaaataaggacaaatgatggctacaaaaaaatatgtaatttaaaaccgtccctaaaggtaaatctgactcatcttaagagattgtttgatttttgatatataagtcataagtggttgactaatgtcaaataagtgacgccttttgatgacatggagaagtatgcagatgacattgattgatacggatggaatggagaagttaatgatctacatgtcacactcctcatttcaaaaatagttaacggtgattatgagtcttcatcgaatactcattttaaaggagttgctgataaaaaaaaaaagagtggatgttatgggcatgtatttaagggcatgtatttaaacaagaagttaccaatcgtagcctatgactaggattatggcatgcatgattaccatgatgtggatcaggatatagagtagagaatgttaacgcaagagacattgctagatcaagaattaactcatacaaaaatgatgaccggagattgatgatatcaaattaaattaagtaacatagactcacaaacgcatggtggtaatttgaagcctatgcattcaaagaatgttggagtcatggatccgaatagaattgttgatactagtgggaccagtccttccttgagaaaaaggatgcatgaaccatctcgtgattgtagtgctattatgtgtgtacacggcaaattgacacaaccgaaccgaccaagttatatatatgtcactaaaacagtctgaccaacaagagtttgaagacctgcaggctacgtttatatcttttgactattatagtatgttcccattactttgagatctcgtagtactcaataaatattacacggttttaagtcgataaataataaatacataaaattctctagctaacgcttttagacaattcgaaaccgagtggaaactacacaaagcatcttttgacatatacgcacgtgttacttcatcatcgtccaatataaatagactcattactaaactcaacaaccattaaaaccaaagatcaatctcttcttaatagtcaatcatatatcaaaaaatttaaactcttcttgatcaatggcttcttcttctgctgctatgtctcttgaatccatctctatgacaactctcaacaatctctctcgtaatcatcaatctcaccgcagttctcttcttggtttctcaagatctttccaaaaccttggaatctcatctaacggtccagatttctcctcccgatcaagatctactacttccaagaacctcaacgttactcgagctttcttctggaattggggcaagaagaccgaaaactccagaccaagtaagtttaatagtttatagatccttttgtcttttagtacactgcgactaagtcaacgcctgttaatccgatatttttcctagatttgagacaaatcaagatttaaagactaataatcctttttgttagctcagaaatcaaaatgctttatttcataagcaaaatcgattagatctttaaatgccctgctcaaaattgattggtctaaaaaataatcagatcttaaaaaaacaaagtaccgaattcataaattcgagttttaattattcaggtaagatccaagaactaaacgtgtatgagctcaacgaaggagatagaaacagtccagcagttcttaaactcggcaagaaaccaacagagctttgtctcggagatctcgtcccattcacaaacaaactctacaccggcgatctcaagaaacgcgtgggaatcacggcaggtctctgcgttttgatccaacacgttcctgaaaagagcggtgacagattcgaagctagttacagcttctactttggtgactatggtcacttgtctgtacaaggacaatacttgacttatgaagacacgttcctcgctgtcactggtggctctggaatctttgaaggtgcgtacggacaggttaagcttcgtcagcttgtgtatccgacaaaactgttctacactttttaccttaaagggttagctaatgatttaccgctggagcttactggaacggcggttacgccgtcgaaggatgtgaaaccggcaccggaagctaaggcgatggagcctagtggagttataagtaactttactaattaagtaattagctgtttaatagttgttttgttttgtaatagaatattttgatgagttgtgtgaggttagttaatgatgtgttgagggaataaagtatttattttgatgtgactttattgattacaactggtctttctacaacgtggaactgttgtactcgatttcaaagtaaaactttttacattagtttcggtattttcacggaataaattgatagctagaacctttaatcttatggtttaaaatggtacactcatatacacagttagggtagtggagttaatgctagtaattagtaacacaatattttttggttcgttatggttttggtgttaattgtgttaatgtcataatgctttaacgctaatttgttgttggcacagatatttaaaactaaaaaaagcaacctagttattgctggctatctttttaaattgagaagttaacatcttgtcaagtgaatcgtgtaatattgttatactctaaagatcgatattattgtgtctaccagtcaaaacatgtgttggagggaaattttatttgtaggttcatcatatgtcaggaacattattgtcatgtttctgtaagctttctgacatttaagttcagattttgaccataagttttgatcataaatgagaaaagaacaaagttaagtttagttttgcgaatgttaaaaaaaataaatatcttatttgcactttttgaattatttaccaaatataaaaaccaagatggtgttttttttgtaataccaaaaaagagagaattttagctacgagagaatgcaaaattcggatttgtgatccgttttattgaaaaagattttagtttcatagaacatatatcaagtagtatacaaattgaaaaatagggtctgatagatccgagacacttgggtattatcacctaacttttaaacgtttatgccagttttttgacaaacaaatcacgaagtatttgaggataaatacagtatttgtttatgttttctatctttttttaggaggatgagttcattggtttgatcttaaacaattgaaaatttataggttaccaccaattttgcgattttttttcttcttctatactttagatttaagtttatatatagatattttcgtttgatatcaatatgggaagcccacaaagttggggagtttagtggtacctttttttttggttcacaattgcatacgaatattggggagtttagtggtactattgcatacgaatattggagatacgagaaaggggtggaaaaaattgatgataaattgagcccaagtaggaaacaatacacaaggccgtatataaagttggcatgttgggttcaatacatgaggccgtctttttgttcggccgcggccagtggtgaacactgaatatggccttttgagactccgaggggacaattataatccaacactaaaatacatctctaaactctatttgccaactaatttctttatttaaaatacgtttcaatctaatcaaaacagataagcctgttaaacacaattttgatttctcgagactacgaataggtggatctatttgtatcataacatcataacatataaatcgatatttaaaattttgagtaataaatttgatgttggtctctaacaatttgcgggtaatttcttgatattttggacatcacccgaacatattagctcattacacaccaatttctatagaggcaacatattttcttatcattaaagttgacagctattagagcccttaatcacgtttgatttcatatctaattccaaattatatggatataacaacagcatagcatataaattgatatgtgtagcattaggttatatctttgaccgggaaatgcattggcaggccattatactgggaagatgcattcgcatatatattagtaggtgtacttagtaatcgtctacttgacataattaaaattaccggtcaaaaacacgagatatataggaactcatattgtgtggatatatatattagtttacatgtgtatttatggataaggttataacgaattcaacaaattctcaaggtcctatgaaatttcaacaagtatattacagttttttttttatatatggcttttcttctcccatgtttcggctgtctacgaagagacatttggcttttcatattgggatattgaaaaatacattttcaacgttttatatatgattttgtgtgggtgaaattaatacttacagaacaaaagagctcatgcacgtttagtgttattttggcggctgtttttaaggatttgcatatattctttcccacgtattgaattctataaatgacataataatcaaacttgtaaaaataatagaatgaatagtttatagtcttccaaaattcgatttctgttgtagtggaatcgcagacattttctaacttatgaatgttgttataggacttctttaaaccttggttggatatacccaaataaatataaagttcacacgaaaaaaacttggaatcacatccaggaatattcaccactggatcaatactactatacaacaagggaaaaaaaaatatttaacttgggaaggtatatacttattttataaacaaaagcaagattcgccttgtaatgcgacggcccgacttctctctttcaaataatgatccttgagaaaccctatagagccatatatacgttgtctttataaagagacataactcatctcttcttgactaactttatagttaaagttatcaattattcgaaaacaaagctggttttttgttttgtcccttaaaccagcatgatcaagaacttaagtaatatgaagaatgacaatcagaaacgtgaaaaatgttgcgagtacatcgaagctctcgaagaagaacgtcgcaagatcaatgttttccaacgcgagcttcctctttgcgtagagctcgtgactcaaggtacatacatatgcatttacatttcatataagatataatgagtttatatatatggattaaatgttagatctaaagatttttaaaaaatgttttatggaatttagcgattgaggcgtataagagggagatatcagggacgtcgacggataacttatacggacagtcggagtgctcagagcagaccaccggagaatgtgggcgcatcttggatctgttcataccaatcaaacactcttcgacctccatagaagaagaggttgatgacaaagatgatgatgatgaagaacaccagtctcatgaaaccgacatagattttgatgacaagaacatgaaatctgaatggctcaagtctgttcagctctggaaccaatccgacgcagttgtttctaataatagacaggtaagatttttattttattttattttttctttgtttacatttgtgtttttgtttgccttgaattacatttactgtattgtttccaaaccagcctattgacgttgttaattgttaacgtaaagactaaacgcataaccttctgtgtactttatgcgattgtgtttgtaacttacaacttcacaaatagattattcttttttcttccagtttttgttttttttaatagaccgaaaaaggatgggtgcacaaaaagatagtaaattgctcacaaaaagattttgttttgtaatttaagtttctaatagcattttgcgtattcaggatcgctcacaagaaaagacagagacgctggtagagttgataaaaataaacgatgaagcagcgaagaaaaacaacaacataaaatcaccggtgactactagcgatggtggcagtggcggtggcggtggcagaagagggcagagaaagaataggcggtgttggtcgcaagagttacacagacgcttcttgaacgctcttaaacaacttggtggccctcatggtgcgtttcttggttttaagttaaaacatatatatcagtagtcatatctttttgttagggctcatgaagtttaattaattcgtaatgacctttttgttcactaaattttgaagtagctacgccgaaacagataagagatataatgaaggttgatgggttaacaaatgatgaagtcaaaagtcatttacaggttagtaaatcatattccatgaaaaatacatgtaactaatatgtaaaaggtatatattaatttcatcattttagttacaaatgtttttataatttagaaggaaaataatatttattgtttcatattttttttaatgataaatagaaatataggctgcatgcaagacggccaagccaaacaacaccgaacaacagaaactctcaaacgcaacatttcgtggtggttggtggaatatgggtcccacagactaaccattcaacggccaacgcagtcaacgccgtcgcatcgggtgagaccaccgggatttatgggcctatggtcagttcgttgccgtccgagtggccgaggcattccaattttggtaggaagatttcggaagatagatcaagatgctctaacaacggattttttcggtgtagctcaccagctatgtcttgttctactcgtacaaagacgaaagatgcaaaaataatatcataaatttaatttttgattatttattaagagaaaaaagttatagacattaatattgtgaagagtgtatatatatagatgttggagcgtgactctatgttatttttagtttcttggtttttttctattagccgatgatatctttgatcaaagatccatattagctaatgcatactatatttttttacgtcgtgcaatatgcatatcgatgataataagttaataacacaaaattattagattactagttgaagaatcgtatatagaaagaatcgtaattatatgtagaatgatggtatattatcagcatatatttttatagaggctttagccaccaaaattaataaatgtcagtcacaaactcaaattaattaatttcgtccttaacatatgtatgtcggccaggtttctatttgctatagtaatataagatacacagaaacattgtagaaatgtaaaatgtcttcgaaaacagaagaaaaatacatatataaacttttttgaatgaaaataaaaaaaattatgccatacagaaggatcggaactcggtagaatatgccggaatctgaagagcataatctgcaaatatgtttttcaggttaaactttattctcttgttgcttgtactggatattaacacaaatgtgcacgttgggctccttctcgtggagtgaattattctttatttgttccttttacttttgtaaatacaatttttccatataagtatataactgtgtaaatattaaacccaaaatatgttaaaagacaagtttttttgtaacttaagggcaagaaacaaggtgtaaagccacatgaaaattgctgaccattctaactctcgacactactatacaattaatatctcttgacttgtactcattctctataacaacaacaattgttgggttttcttgttcgctctcactgttgtttattaagtgttgttcgtttgcgaggttttctgaatcaataatcaaaatgatttcgattgataagttatcctttaatcaaaatttcttggttcctatggtttcatcacctcaaacataaaaaaatcataccaagttgttaaatatctttaaaaattcctaccaagttactaaataagtgttcacaaatttagggatcctttcatgtgactctatgagccatgtgacctatttttctactacctttataacaaatggggctacagttttaataatattcttactgataatttaatttgaatacgaagaccattgggaaacttgaacattgagaaaggctattggagttcccgagatggcggtttgatctatttcaaatcttcaataatattactattatcaaatacttctttgattctatagatgtgtaagtattaataatttaatatttgacgatggatccaaaagaacaggaatcggattagggtttccttatgatatgatttattaatagattggaatgggttttaaactcttagaagcaggatctttatgtgacctttcagagtcataaaaagcctaaatagctcttgatacttactttaagaccattatgagatcaaaccatggaaaaataaacaaatagtaaagcaacaaatgctttttcttggtctatacttcattacttctcatattaactaatatcatatccataaggaatattcgactacacctattattaattgtataatgttagttcataatttatctacatttgtgcataaacaattaaacatatctctgattaacaataataaaatatatagtacgtgctaatcttgttttaatcttctcttatataagattaggattgatcaaccaagtttgacatggtgtcttagtcttataggagtgaaatttttaatcaaccttccaaggattctttcgtctatccacgatgacgaataggttgaaatggaaacagatttctttcagttctatacgtgtttgattttatttttcttttaataatacaaaataattatcaatgaaactatttaaatagtctcagagctataaatgtaataaagtaacaatgtttactaattttctaatagcaacatgatgtttcattatgttctttaattatttctgcaaaacaagtatcaatttgggattcagctaacgttgagtgctagctgctcttcacatttgcacacaattttgggctaatgagcccgaaaagtttacgaagatggaccaagcccgtttatagcccccgaggttaaaattccgaaaggttaattcccaaaaacttaaaggttttgacgatctaaattttgattttaatgaacggaaatagtaaatgacctgaaatagaaaaaaatcaactagataatctacaatttaaagatttgcagaaaatcttggacgataaaacaagatactaacatttctcacagaataattttgctataataatttaaagttcagctgctatattttttttcctttgttaatttcatctgctatttatttgaccaaattaaatatgttatcttgatttgttatcgtacgtctacatagtctctaattttaaaaaacaattgccgtaattttagtttttatttaattgaaattttatttacacatgtaacaaataaaaaaaatgattgaaaagaataatgtatattattttaaagtcataactagtaacatgtaaaaaagtagttatacatcactattttaggcagtcaatggtaatgaaaaaaaaagagcttattttctagacctgcattgtttatattaatttatacatagttgaaaatgagattcaaactatgctttcaataaataggtgaaggatcgaggtcgaggcaccatcgatatagagtcagctcgtccttcaccacggcaatttcatgccaacatcttgctcaaatgagtattccatggagagtgattggtaacctgcaaaagaaaaagaaacttaaaaaggtttatatgtataaggttcacgtcagtgtttgagtgacttaaaaaagtttgtgttagttataaaactaatatctcatggactgacgtaaagttaattaactctacgtaattgttgttaatatccttcccatttttcaatcttacctcatttatacaagtgttgttaattaagtgaccggcggtttttttttttttgtatatatgagcatgcaaaattactaactcttactactaaacaaaatctctttactgtatatatgagcatgcaaaattagtcattatattttattgttagtgaaacctaaataaaccagaaccagtgatagtaagttaatcaatataatctgaaggtgcgaaacatcagcacgaacccaaattcgagttttacgtattgcggacgttaaagataatgaactgatttatcaaaaaaagaagaagaaagataatgaagtgaaaaacaaattataaaatagagtgaattttttgtccaaaaaaaaaagagtaaaattaatgttaaaaataaaaataaaaataaaaaataggtcaaatattctttgtgtataaaataacctaaaccaaaatatggataaaataattattccagcaaaagagaaaaggtaagctttaacaagaaaaaaagaatgttaaaacgttaacatgcataaactttaaaaaaatagtaatcaactaaaagggtagtgtttaccaagctaatacgatccgattctttcaacatttgtttctgtctcgctctctttctcgatatatgaatgaaaggcatcatatttttatttttcttattaaaagaaacctttggaagaacttatataaaaaatgatcaagtagactctatttaaatagacaaagtaaagcttacatacatgtgtatgtatatacgtgtttggtaggaaataacaattggggtaaatctaaggtagtagagaattagacatataaatgtcttttatttgttttggtggttgggatatatatgctctaacctccaacattttttaatactaaattggcaatataccttatacagttatactcattgtattgtcagcggttatgtctaatcacaatcatatactataacatagtatgttctcatgctatcaattcacaatttctttgtatataaatcaaattttttgatgagaaaatgttagttaatttgtaggtttattcgaaagattttttctttaagaaaaaaaaaaaaagatcgtcaaacaaaatggatggaatcacatatgcgatgtatgctgcagtgccggccttgaacatacataaatatttgatattttcatgtataacaagtcttttaaggctgggcttgtggttttgagaatttggttattacacgcttcttgcgttttgtatttttttgggtcataaaaaatttcacccaaaatattaaaattttgaattatatatggatagatacacagatatgtaagcaagttccattcaggtatcaagtttagactaatcgtaaaaaagacgacgccatatattcgtagtaattaatatacatataccccaattaacagaattcgatttcaagcccccacaatctattagtatatgcttaattcatcttgtgtgatagtttgacgggttattatgtaaaacgtgcatgtgatgagtgcttacttagcagtcttgactctcgagcctacacgtttgttgcgcgcgtatgcatgcagcatatatacacatgtacgtagatgtgaaatgcatgcactcagggccggctcaacaaaacgtgggaccctgtgctcattagtttttttttctaatatatgttttatatgtttagattttagtttattatacactactgtttgtataatggaccttgattgcttaaagaaaatgaatgaaaaaataaaggaccctgtgcactagcaccaagggcacaccctctaagccgggcctgcatgcacacatatataatatatgtatataaccatcacgatcgcgcgatactgtttcttaagtatggtgacgtacgtaattgattacttgatggttctactacatagaaaggaaaacaaaaaataaatataaatgggttgtttcataaaatctcaaaccaaaccaaaacctaacttaaatgtagctgagttatcatataccatatggtataaattttggaatgactttgtagttatttattgtaatttagaatgttataattactgatcataatattaagtcaaaaacatcgaatcaataaaaagcgacatagattcttagtaattataccggccaaataatactattaaacaaaagttacaaaaaaggatccgtatatcgtgaaaatcaatcacatgcatcaaacaatagaatgaattaattcacgccggaacatctacttggtttgattttaaaactaaaccgaaccaaacatattaaaaatcgaaataaaccgaccaaaaaccaaaaccttaattatccctaaataatttcaccaaaataaatatattcaaagcaacatgcttgtgttaagtagcttttgaaactccatattgttccatttacactacgttatgatattaacaagacgatatatgggttccagttccacttacaagtacaaaaaagagttgtagaagcatcaaatctatgacaactccccttcaaagttcaaagttcaaagttatgaatgattaaattgatcaagtttcacgtggagtggtggatatactcaccatttaatatctcaactctatatatatttcttatttaaaaaaaaaaaagaatttaaacgcatattaaaaagcatcgcaagagctttttgcttggatggttgttggggatttcaacgcaaccatctcgctatcagatgcttccactccaaatgtcacgcattactctccagccacggaaatatctttcacttgtgctttttgaatagtgatttatttaattttgactatttaaggtcccacttgatcaaatagaaaacctaattgcgaatatgctctcttttattcacaaaacagtggctatcaaatcgtaaataacttggtacatttatcgtaaaataatattacactattcatttaaattacttgtattatatatcatttatttacggtttttgtcacaattgttttcatattaattttgctatataaatttggttatgtagctaataagcatatacaaaatattgtttttcattaatctgcatttcattttgttttatccaatccgtgattcataataacacactttagttttggagtttcattgtttcaatataagcttcctactccgatcctaaacatatatatcttgaagagttggagaagatttgttatgcattcttatggaaatgaatcacgtcttcaacacatggagtcaaaatgacttgagattcttattgcttttcaaaataatgtggatgtctttgcatgagaagattaatcgattggaaaaagattttcgtgtttaagttgattcgactcttgttttgggagaaagtttgctatatatgtatcacggattttcaagaatttgatggaagactctattttctaggttttcaactaccaaaacgtaggtagctggatcattcatggtattcaattgactgatgatcctagctagcattgagcatgtttataacttttctttcctcaatatatagtgtactgtctattttacataaatctccaagctctccacagtttttgtcattcagataaaaagttttatcagaataaaatttgtagagggtgggaatctttgttgatgatataattaaaacaaacaatttttttttggcaggtggaacaaaaacaaaataaacaactctgtttgattgcaactacacaataaaagttctaaccaaaaaggtatgtaaaatgattttattttaagaaaaaaaaaatgattttattttatttattttgggaataaatctaccaaatattaaatgttagaatgttgatggcaacggaaccatccacgcggcaatgaacatggcctttcaaaaattaggttcttttttttttttgataattggaaaacggcttacaaattcatactataacattacatagaatataactatataatataaaaatgaaatgaatactaagctgttaagaatactttattaaaagataaacatcaatattgaaaaaaaaaaaaaaacaaatcaagttgattgtggaaagagaagattagacaagaaccgaaacagtcggccataattaagcaatggttaacttttaatcttttagtgttgtggattttgaaaacactactcggtcttaagcagttcaattgtgttacaacgatgttacgtgccctcttacaaaaattgtgttaagacgatgttcacgtttttcgaaaactaatccaatgtgaaatgatgaaataaatcgaactataaatttgtttggttatatgactagtactataaaacaaaaacttgcttgcttatatcaatagtaggggggaaatcgtgatacacttttactgaaaatgatctttcttttctttttttgttctttcaatgcaaattttgtaacatgttacattttcgaattcattttttctaaatgtacttctcaaataatattggtactagtagaacattaccagaaaattttaacacgattatcaacacgttttattcgtagttagttaggcttaagcagcacgttgaaaaatacaagtaactaactacgaatacatgatctacgaaaaatgtttgttgaactaaacgaaaagttatcaacatagagttttaaacacattagtagcaagacaatggacaaaacccgtaccgaggcactctagtagtttgcgtgtaataaaaaacacaagacgagaatccactactacgttacaaaagtcttgagatttgttttttttttcaatcaaatagaaaacgattataagcagagagacaagatctaatggttttagctagacatcatcacattgtcaatagattgtagagcttggtttgcgaaaaacctgacatcaacatctggatcctcgcttagctccacaagcccaggacgaatcgtcttctccacaaccttttttcaccacaaaaccaaaatcaaacagagctgttttcataacaaactaataaactaaatggagttggcgatgcacttaccgattgatcaactattggaatgagggattgaagtactttagcgacgttgaatttgatgtttggaactctgtagtagtgaaagagttgtttatttacttaatatgtttgaagtacaatgatttgagtattaactattttacagtgagaacttgcctgtctttagatgcagtcattactacaggtaagagcttagagcatgtaatctctgagcccattacaggtgcaagaagagacaccgcacgcaaaatggtcattcggtagagatagtgagggttgttaaccatctcaagaacctgcggattaatgaatagcgactaattaacactaacaagatagacactgacttttctaaagttgtaaaaattctagacaaacctgaggaactatatgttgcattgcccattcaggaccaaattcctcagcaagccgcttgagattgttagcagcagcatcgcggattgagtgaacctaatgagagcatccgcaaaaaaaaaaaaaaaaaaaaaaaaaaaaaaaaatcaatttctataaataagaagcggtataatctgatcattcccagtaaaagtaagagagagaaagaaataccttgtcttgtaaccattgcatgcaaagagcaccaagcttatcgtcaaagaagccaacacctaactgacttgccaacaaagggatatactcgattatagcaagtcttactctccagtgtctatcttcagcaagttctacaatagctggcaacaaggattgtgatagtagatcaatcccaataacctgccacatataaaatatagaagtcatcaactgaatatggatgggcgagaaaggcaagttaaaagagtgaaagtcttttaaacaaaacatgttatcatgaagccattggcatgatctggtttgggtatttctgttgtaacaaacctgattcacttggtcaagtttgctgataatgttcaagcgtacatccgggaactcatctttcaatagagaaagaaagattggaaggagatgctcaattgttgcatcctaaaatagaaaaaacaacgtgaagttaaaatctgcaacatacacaatccaaccaaaacatcctgtataagaaacgcacgtcaattaaactcatttttgtacaattggtaacaacctaagtatatttcttcttaatgatgaaagagcacatgagacgcttcagacatcaggacgaaaaacagttggacatagtcataatcattaagatgctaaaatgaatttgtgcattatgaaccaacacatctctgtttgcaaactctcttaccttacccaagactggagccattcccattataactgaggccaatgcagatctgacatgctgagaagagtctgatgatagctcctacaggtagcattaagaggaatcatcagtaatatgcaacaactatacgttgattttctgtaaggaacttggaaaacaattgaattctcttaagcatgtaccttcacacaggggagaatgtgctggatagcaatttcagggtttagaatccgacaaaactttgtaacttttccggcagctgctatgcgtacttcagcttcattatcacgaagtaggcgcacatatgcaggcaccagctccgtccttaaaatagaagacacagtaaatagtatcaagaggaagtaaatgggatcatcaagttccttaagcctattggatgatatgcatttctatattgaacattaaattagcccatcaaaggtattaaaacatgctgcattaggtttatgcaaaacgttcttacctagtaggctcaggtcccacggcttcacaaagctcgtagagttgatttgcaaccatatagcgcacacgccaagacttatcctgctcagtgaaaaagtacaaagattaagcatttcttttaaatgtagatcatcagcataaaagcctacagacataatcacctgcgagaaattaacaatcacgggaagaatgtgttggacacaatcctgaggctccaacaatttcccaagagcagcacaaccctcaacggccaataatctaacagaatcttgatctgatatgaaaaaaacgtaagatgaaattcgacaaatatatatgctgtagagtaaataaacgctcagtgttcaataccatcttgagtaagatcctcaaacatggacataacgtcggtcttcaaatgcgctgattcaaccgtagcagcaaatttcccaagattagttgctgcagctctccttaccatcggcatatcatcctgacaaagctgagtatacaacgatcttaactcagtcttcaacatatccggcgcgctcgggtatgcaatatggaaaacaccgcaagccgatactctagctgtgaaccactcaccagcggcaagtcgcttaactaacgaaatgaaatgatcaaccaagtcactctccctcatctgagagccaactctacaaagcgactcaacagctttctccctaacacaagtttcttcgacagtcgaaagagtttccaaaggtggaagaagaacatgtgcatactcaacaccaccaacataaggaataaacacacccaattcttcagccattgctaataaaacctcatcatcatcgtcattgttttcgctaaggaaagggatcaattcctttctagtcctctcttccccaagagcacgagcgatcgtagaaagccttctgatggaattcaatcttagctgaatatcatcgttttttaactcgtctataagtacggcgattgggtacaacggctcatcgatcatagacatcttcaacaacaccaacaacaaaattacagcataattataacgagatcgtaaaatcaatttccagagcccaattctcaggagatgatcaattaggcgaatctaaattaccatttctatcaaaagataaacagaccaacaatcaaatcggaaattgggtcttacctcaacacaaacacggctcaattttctcctcaacgaaacacaaaatttcgttcgacctacgaagaaaaaaaagaggatctaatggcgaaatgtctcttttctttattgagagcaaacgacgacgtctttatttaattggaaccatacccttcttaaatgggctttaacgggccttttggcccacgacgtttatgctgtttcggtcaggactttacttttgcgattcatttcttgcaatttaccaattttatagagttttcactattccttcgtgaaatataaattcaaatgtggaaaaaacattaccgatacaaatgatagaattttctaaaaatgacataacaaaatttccataatataattacatttgttataagtacaacgacaatatgtgtgtatactaacaaattaaattgattcatcttcgagattgagaaacaaatgatatgcaagtaaaccaaaaacaggaacaaaccttagatacttcaccaattcaatcttgttcttcttcacattttgcaggttctctccaatcaaccatggctgaaagattgtgtacagacatatatcccatataaacgcgtaagctagtctctccgatcccaaataaccaatcagatactgccatctgtccatgattccaccgaaatcaccatctgctcgaccgtagagagaccacaatgctgatatcagacacaccgtagctccggtcagaccaactattggtgcacctttggtcatcacttcaccaagttgagaccttttgcttggtttatcatctgggtcagcgtcattgagccgtaaagccatgtatgggattagaaacgctgtttgcaacatgagatcaacagaaccaataatctagtttagagggttgctttccagagaaactgaacttcttaaataaaaactaaagttgtatttactgtttgtaaggaacatcatgagactccataagacgtcaagagagcttttgtatcgatttctctttcggtctgtgtatagcaatggagcaaacatgagtgtccaagctattacaaagttgaataacccttcagccatctgttgaatttaaaaaaaaaaaaacaatttcagaacgatttactttcactaatacacaaaaacctgttcagctcaaaggtacaaaccgggtgaagaacaggagcttgtaagaagtgaataccagctgttctgtcacaaagtccataagcaagaaactttcatcaaagatcaaacaggtaaacgaaatcgatatatcttaaggctgaacataccggcgtttgtaagaggcaagacaaagaagaaattcagagaaagtcccaaaagagaattcactgtctctgaactaattgcccaaactggatctccctgttgatcatagagattattttctaattaagcaaccatacaagattacacaatctaagataatgctaaccacaagcacatatcatgataatctatagagagaagagcaaatctcagtaataagttgaagataacaacaaaactattcgattctcaaagcattcaagcagagaaattgaaaaagttctcattcctaaaatcatccaaaatccaaattacttttgaagattcatcaatgtgatgctacataaaccttccaaacattcacataatccatagataaattagtagccacatagaactatggctatatcaggaactatgagtatgattcaaaaagaacaaacctactagattctcaaaacattcaagcagagaaattgaaatggttctcaattcctaaaattatcctaaatactttcaagattaatcaatgtggtgattctacataaaccttagaaacattcacacagatatatcaatgtctcaatctcaggaactatgaatacgaatttttgaaggtattatcactcacaggagcgtaagggagaagaaagagccatagtatatacacagcttcactagtccatagaagataccgaacaattctccttatagaatcatcttcaacctctaccgtcgccgtctccggtttccggcgagcacagcataagaaggaactgtctcgtgttcgtaatttgaaacgattcgtagactgccatggattgtagcagcgatcgactgtggagatttctctactccgaagaaaatggcggcgaatttgtggcgatttgatttgggaactgtggagacggtgacggagatatgtcaacgtcggtgaggttatcagaatcatcgtcgtcccttcactgcattatccaccgtttagtcggagaattttttttatttatctgagagagacttgctaaaacggcagcgtattggttatctaaatttgaaagcaacgacgtcgttttaattgaatcgaattacacattacagttggctttaaacaggccattggcccacggccttataaaacgccgtttcggtgagacactgaaattggatagtcacatcattattatgggtgctaagccaaatatctttttcatcattattattcgacattcctcaattttcgtcaacttcttttaacaaccccaaaatcatggttatataactttgctttatatctagaggcttagttaaataaataaataaattcaaaattaaaagaacattgaatcatgtaggcaagattcaatttcaactattttggttaattttattatttattttcatttaattattgtggaacgtatgatttattcatgtagatagttttctaatctcattagaatatcttatcatataatttaagtgtggaccaaaacataatttatttcttctacgttatttctcttttttttttgtgtgcaaaatacttgtattcattcaatcaagaaagaaccaaatacaaagagaactgacttatttctctatatgtaaattattgaagaaattataccttttaaaaaaataaaaatgtatcgagatacatttaaatttctgttgtatgtaatgtgtatacgtgtaatccaatttcttgggattctatataattatttatgttgttatggtctgtacaaaaatatcacatgcttataatataagagatatttcttttatacgtatgtattcttttaatggtttttaatatagcaatattaagattcattgttcatctaaataagtttttattagttagcgcaaaaataaaaactcgtttggagaaacaaaaaatggttaaagcgattaaatattgtttttcaatacattaaaattgtttgccatcttctaaagttgtttactcacttcagaatacatatgatactctctaatgggaagaatcccatgagccaaaaccaattgtctttggagtagaaaaaacttatagatctttttgtggaatcataaccctagattcagtagggtttattgaaaaaggaaaagataatacatatcctaacaagacatatccaaactaatccacaaaaaaactagacgattcgtgatatattggagatatcaaatgtacgatgtggcttcgaattcctgccaaattcaaagggatctaaaaggtctttaatgattcttcatatgtcatgaatttctactacattgggatgaaagtaagttagttagtttttatttgtttgcttttcatttttgctaaaatttttgatgaattttatcaaatataaaacacagtagcgtagactatattgttaaattttttttgatgaattttatcaaatttaaaaatacaatagcgtgattttgagaataaagcctataattttccttcatacggcttattgagtatacattagaactatattttttacaataggataacatagttctgaaatgagtaaattgaaaagagtttttgaattgattgaagtatgattctggttgtttagaaaaaaaaaaaaaattaataaaagaattaaaccattatgtgtgaactgtgaatccaaatattgttctttttctcacttttattagttaatcactgatatatctcatcaatcatagatattgtttgcaaaaatacttaaaccgttttgtgtacattacgatcacaaaacaagagaatcacataacctttttttcaaactaactttttttattaagttgaatcaaataagtttacttctatattatttaattatatctctctacaacatttaaaaaccaacacgtaaattcgtattaaaataatatggaaattgttttttcaaaatcctctacacatataagttatttgaatcattaaaacggagttacaaactttttttcttcgattatcaatgtttttctcctaaagaacaaatgaaatcgacgacaacctaattttttttggcatgtctgccaacaaaactcatagccatcagattgaactgtcttgtaatcaaacttgaactgtctccatcacttaatctttgtacgcagtttttataacttctatatttaatcatgtagaagattttaattagataaatttcagttacaaaaagtggatattagacattgcgaaaagagtattgacatgcagcaaaattgggtaaagtttgtcacactatttaattgaatatacttgaaaaataactatttatctggtaatcttgtaaataaagatataataatagatatctttaaataattgactatgatttataattttatatggtgaaaatagaaataaatttggtaaataagatattgtagttggcacatacacaaaaataaacttcaagttaaaccaaattggacaacctattgaaaaaaaaaaaaaacagaaacaaaatcatgtaccgaaatagtgttctaagtcatcattctgactctgtctatataaagttataaacgtatgtgttctccaatatattcagccagaaagaagagaatcttatactaattcaatggctactttgtgtataggttcagctcctatttaccaaaatgcatgtatccataattttcgtcttcaacgtcctcgtcgtttcatatccaaatccatgacaaaaacgatgccggatgctaatcctcttgacctccgtcgacgctcgggcaactatcaaccttcttcatgggaccatagttatctcctctccatcgagaacaaatatgtggtaaagtattcgtcattattaacgtttcatttggtgacgtttttaattacaaaagttgttactacacatgtaaatattttgggaaaactgacatgtgcatggttttattggatcaatattatctgacagactatttttctcatgaactctggttagtatacatttcatacatagatatatatatatatatatatatatatataagaacatttggttatacttttttgttaaaggtattaagataactaatgtattaaatatttaacaaaaatgatttatatatgctattagatcataaatctgattttctttctctaaaatatctcttagtagctagtattaaagatgacttactaattagttataatatgatggatacagaatgaaaaagaagtgataactagacatgtgttgaagaaaaaggtgaagaagatgctagaggaagtagagacgaagagccgtctcgagaaattagagctcatcgatgatttacaaaagcttggggtttcgtatcattttgagcaagaaataaataacattttgacaaattttcatcttgaaaatggaaaaaatatttggaaatgtgacaaggaagaagatttacatgcaaccgcactcgaattccgacttcttagacaacatggttttggtgtctcagaaggttagtattttcacactcggtaaaaacgaaatgaaaaaattctataaattagtttcactgtataaatatcatatgtaactaaaaagaccatgcatttcagatatatttgatgtaatcatcgacaaaatcgaaagtaatacgttcaagagtgacaatataacaagtatcatcactctatacgaagcatcgtatctctccacgaaatcggatactaaattgcataaagtcatcaggccttttgcaacagaacaaataagaaatttcgttgatgatgaaagtgaaacttacaacattatgttacgtgagatggcgatccatgcgttagaaataccgtaccattggagaatgagaaggctagagacgagatggtatatagatgcatacgagaagaaacatgacatgaatctttttttggccgaattcgccaaaatcgatttcaatatcgtacaaactgctcatcaagaagatgtcaaatacgtttcctggtaatagagattaatagaaggaaaatatataaatgctggttttggtaaatctcacatcaatattttcatatatatactctttctaatcctctccttttaattgtatgaagttggtggaaggaaacaggtttgggtagtcaacttcactttgtaagagacagaattgttgagaattatttttggaccgttggaatgatatatgaaccacaatttggatatatccgacggatcgtggctatagttgctgcacttattacagttattgatgacatctacgatatttatggtactcctgaagaacttgagctcttcactgctatggttcaaaagtaaggactctactgcttatatttattctgaattttctttgtatataattacaattacataacattatatttaaaataatatagtatacgatgtaaattaagtgtgtttaatatatcccatattcacgttttaaaatatatttttaagtagtagtcgtttaaaagtatatataattaatcatattccacacaagttcacataaatatttttttcaattccatctttctattagtttttttttgtaaataaaaattataggaaaaatgatatgttgatgatagattattaggattttaatcagctatttttcatgatattcttagttttaaataataatgttatctaaaatatttatttgcagttgggatataaatcgtcttgatgagctccccgaatacatgaagttgtgttttcttacattgtttaatgaaatcaatgccatgggatgtgatgttctcaaatgtaaaaatattgacgtcattccttatttcaaaaaatcggtaagttcaaatttgtatttacacattatagttttattttttggataaaaataaataattattgattatatatgtttttgttcaaactatagtgggcagatttatgtaaagcatatctagttgaagcaaagtggtacaaaggaggatacaaaccaagcgtggaagaatacatgcaaaatgcttggatttcaatttctgctccaacaatgttaatccacttttactgtgctttctctggccaaatctcggttcaaattttggagtctttggtccaacaacaacaagacgtcgtccgatgctctgccactgtgctccgtctagctaatgaccttgcaacttcgccggtaagtgttctctcttgtaacttcgccacttttatgtgttttaaatcgtgtatgagtatttataacaaggataatcttgtaagtaactcacaaatgaaaccaaagtcttaaaactcgactgcataaattaggtggacgaaagtctctatatcatggcaaaaaaccgctaagcaattcatatatgacttgacaatgtaggatgaattggcgagaggagacgttctcaaatcggtccaatgttacatgcatgagaccggagtttcggaggaagaggcacgcacacatgtgcagcagatgataagtcacacgtgggacgagatgaactatgaagcaagaacagcggcacgcagttcttcgttactttctcgacgttttgttgaaactgcaatgaacctggcacgtatgtcgcagtgcatgtaccaacatggcgatggtcatggatgtcccgacaaagccaagatcgttgatcgtgtccaaaccttgctcgttgacccaatcccattagattaaaagacactaaaatatttcctaatagtaagaaaacaagttatattatactttgtgtgcgatgttggattacggaactgatttaaaataaaagtttcgatttccaaaattaagacttttgcaaagttaacaattaatttttaaacttaagcaaccatgggatactttcgcacaaaaaccagcaaaatcggctcacattttaaaccaatgaattatatacgttctttacgatttctagtgggcttttaagaggcaagacaaagaagaaattaagagaaagtcccaatagagaattcattgcctctgagctgaaaatagagatgttgtataaattgaaaatagagatttctgaatatagaagaaaaaattgagatttctattttagagttagatatttttgctttaaaatagaatttacagaaaaaaaatatagagtggagttggagatggtcttatggaaatcaaaaattcaaattttttgtcactcagcacaaaaatatattatacaaaaggccagggttttagaacagataatattttaattactagttactataattattccaaatttcttttagattttttcaatgtgattcaatataatcacacaatctttacaatagtgactcggaaaagattcaacaaacacacaaatgtatggccacagtttgatactatttctacagtttaaaccctaaaaacaaaattatataacgaattcaaatagagaaacatggcgatataacactactcttcactcatctttgcaccaatcaatgaataaagatgattcgaaaacaataacatgcaaacatcttgcagtatcaaataaattttttactataaatttttgcatgttatttgtctcgaaccattttgtttcatattcttacactttgtaaaaccttctcttttcaaaggaacatcgatggggttgaattaaaactgatgtcatagaatactgcttataaaagtcgatcataatgtagatctaataaagctcattagaaaattcctctattatctttctttttttgaatattatgttaaattatactcaaaagcaaaaatcactgagttttacatatgaatgtaaagaacttttcataatatatacaagaaaaaaaacagtactagtcttggtttcttcttgttgcaaaccaaagtactatgccatcttcatactttggtgtgcctccggtcttgagcgtgcttagccggttcttgacgtttttatcgatcgtctttacaagcattgcagcttgtaatggatgttccccatgtctcatgttgttcctttcccgccatactgagtgaattgtgttttgaaatcataccgtgtgatgaacgtcattgtttggtctctactcctttttgcgattagctttgtgatttctttccagtccgccgtgaatttgtccaacagcaagcctctcgtgagctcctcccatatctgatacgtataagggcatgagaagaacaagtgatctcttgtctcctctagatcattacaaaagacacattttgcattggcgttgcctttccacttcaacatccggtccccagttgacaatctattcttcattgctaaccaagtgataaaagagtactttggggtggaatgtgggaaccatatccctctgtactcttccatacttggtttggctgtccgaatctgtgaccatgtttcttttctcataaacgtattcctacagtgatcgttctttcctttccacaacacagtatccaaatccccatttcttttgagtttctgattacttaactcctcctcgataaggtttagaactgggtttcggtgatgtctctttcggtgtgactccatcacttcacccaccgtacaagtttttgatattcctaagtcaacgaagcctttttctccaagctaatcatataaacttcccatagagcaccactcatcaaaccagaaagatgttagatacccatttttaacctccactcgataaaactgttttgctatacccccgtatttgagaatcttgtgccacatccatgagccccgagttgtgttgccttttatagaccagaacgaaccatcacggattagatatttttgcacccagttcacccacaaagacccatgtgccgagaggatacgccatattagcttaagcatacataccttgtttgcttcgtctattgatcgcaaacccaatcctccttcctgttttggagtgcagacctccgaccaagcaactttagccttctttgggtttagagatggacccgaccatagaaacgctgaacagagtttatctatttccttgatgcatgcttttggaagacggaaagcggctatccaaaaattggtgaggcagaaagttaccgaacttaagagttttagtcgtccagcaaacgatagcgtacgagtcgaccaggagttaatttgcgacttgatcttttccaacaagggcaggaaatctgaggaggtcattcttcttgttagcagcgggagccctaagtagcgaactggaagagagccatactcgaaagggaattgttgtaggatctcatctctctggtgctcttgtaaaccagccatatataaggtggacttttgaagacttatctttagccccgagtgaatagcaaagtcttcaaacacttctaaagtattctcaatggattttttgtttccctcaataaacaccattaaatcatcagcaaaacagaggtgagttaagtttaacgtcttacaattcgggtggtagtctattcttttatcacttgcagccttgtctattttcttggacaaaacattcatgcatatgacgaacaatagggactaagagagcagccctgtctgaatcctctctcactaccaaaatagcctgcgagttcaccgttcacttgtaccgagaaagacgctgtagagatgcatacctttatccaattaatgtagactccggaaaatctagagcttgtagagttgtggtgagaaacccccattggactgagtcaaaagcttttgatatgtcaattttcatggcacatcgaggagaaactgtttccttgtggtaatcctttataatctctgttgctaggaggagatttttcattaatagtctatctttcacaaaggcagattgatttgaagagatgaacttgggaagaatgattttgagtctgtttgcaagaatcttcgatatcaccttatagagaacattacagcatgatatcggtctatagtccttcatcatcacagcttcttttctcttgggtatcaaggccaaaatagtggagtttactcctttgggtaggaagcctgtcttaaaaaaagattggatggctaccacaaaatcgtttcctactatcgaccatgtctcgttaaagaactcacaagtatatccgtcagggcctggggatttatttgaaggcattgagaagagaactttccgcacctcctctgcagtgacttctagtgtgagcttgtcttgtcattctcatcacatctataatccagtagagtttccagttcctcccgcgaccaatccacgtagtctggcggtttgagcgttaaaaagtctctgaagtatcgaactgcctctgcttttatttgctgctgatttgatgcaatatgtccatcatcacacttaatctctctaacattgttacgaacctcccgaatctttgcagcattgtagaaagttttattattttggtctcctatcttcatccaatgcagttttgctttttgcctaaggtagctttcctcaatacccgacagccttaaccacttctcatatgcgtccgcttcagctaccactgcctgtgaagatggccttgtcatagtttctgcttgcttttcacataaagttttataggcttcttttgctttttttgagatatcaccaagtaactgcttccccatctttctgaaatgtggcttcagaccttttaatttttttgataagcggtgcatggctgaggtagaatgaaagagaggctgagttgtcttccaaagctcttctgtctcacttctgaaatccgaatacgaaattaaagcatttataaatttaaaaggcctcttgactcgttgttcctgctccataatatagaatcgacatcttaggtgatctgaacaaccgcctgattcaaagacgctgtaggactgttcatactattgcatccattgcttgctaatcagtaccctatccagcttcttacatattactccttcctttctcttgttacaccatgtgtatctctggccttggtagctcatatctgttaattcacaatgtctgattaagtcttgaaaatctctcatcccttggagaacgaatggagatgattcatagagtgaatggtcctctccttctaatatctcattaaagtctccacatattaaccaagctttgttatagaacaaaggggaatcatgatgatatttaatatcactccacaaatcctttctttctgctgcaaaatttgatgcataaacaaacgacacaaagaactcttcttgtcttccttctaataagacagagcaagtgatgagttgtgacgtcttatatattggagatacacgcacgttatcttctattatctttcaatagtaatttgatataaattaagataatgtgcagtgaacgagtggcgattgttaagccaagtgaacattatatactttattttatactttctccaagcttcgaatggagaatttatttccatacgactaactctacctaaaagggccatgtttgtttgccaacataacacgacgatcacgagatacacataacatttagaatttggagaagatacattttgtttgacttcactttttgtgcgaatggctgttctacctgaaggggccattagtataatttttttgtacataataacgtcaccaaatataacacgagaatcacgaggtacacaaatcatttaggcttggacattatctaatcaaataagctatgatatcaaatttacatacatatagtggcctcgtgggtataattacacaaggagcttttggagaaaaagaagtgtgtgatttaaatgacaattatacaaatgtgtacaattatcagatccaaagttcatgttttaaatcatcaaaaaaataataattgatgagttaaatgatatttttttcatttagatttagttagattagttgtacggttgtaccattatttaataatttaaaagttgaaatgattataatgtataaaagttgaaaatattgtaacagatatagattaagcatttttgcggtcaatatattataaaagcttttttagctattaattgaaaaatattttacacccttagatcttttgatctcctaattatataaaatattttcttctaccgtttgtctatataaccatatgtgttgtctagtgcatgtattcagccacgaataagagaatagtctactaaatcaatggcaactttacgtataagttcagctcttatttaccaaaataccctcacccaccattttcgtcttcgacgtcctcaccgtttcgtatgcaagtccatgaccaaaacgacgccggatactactcttgttgaactcagtcgacgctccggaaactatcaaccttcaccgtggaaccattgttatctcctctccatcgagaataaatatgcggtaaagttttgtactatattttcataattttttattgttgcacctaagtttcacttttatttatgaattcttttattaacaagttgttactacgtgcatgtttaaacatatgtatgtatatacagagtgaaacagaagtaataactagagatgtgttgaagaaaaaagtgaagagcatgcttgatgatgagaagaagagccgtctcgagcaattagagctcatcgatgatctgcaaaaacttggggtttcgtatcattttgagatagaaataaatgatactttgacagatcttcatcttaaaatgggaagaaattgctggaaatgtgacaaggaagaagatttacatgcaacctcactcgaattccgacttcttagacaacatggttttgatgtctcagaaagttagtataatataatgaaattttaaatttctatatataataaattttgttgtgtgatcaatatcatatattaactgaaacaaccgtttatttcagatatatttgatgtgatcatcgaccaaatagaaagtaatacgttcaagaccaacaatataaacggtatcatttctttgtacgaagcgtcgtatctttccacgaaatcggatactaaattgcataaagtcatcagaccttttgcaacagaacaaataagaaaatttgttgatgatgaagatactaaaaacattgaggtacgagagaaggcgtatcatgccttagaaatgccgtaccattggagaatgagaaggctagacacgagatggtacatagatgcatatgagaagaaacatgacatgaatcttgtcttgatcgagtttgcaaaaattgatttcaatatcgtacaagctgctcatcaagaagatctcaaatacgtttcaaggtaatactatcaaagaaatatagatactagtctttcgttgttaattattgtatacataattcgttctaatcctctttcgttaatgatatgaagatggtggaaggatacatgtttgactaaccaacttccctttgtaagagatagaatagtcgagaactatttttggaccgttggattaatatacgaaccacaatttggatatatccgacggatcatgactatagttaatgcccttgttacaaccattgacgacatctacgatatctatggcactcttgaagaactagaactattcacttccatggttgaaaagttaagaaatattctacctttttttggtcaatcaattggttattttgcagctgtaccatggtctaccactagaccattattacagaaatcttctacttaagctt

SEQ ID NO: 1049 - DNA, 71184 bp, Arabidopsis thaliana
agttttaagaagattatggagaggagggatagccattttttattgatcaattatttggtctgtgtactctgtgtttttttgttaaacaaaatggcatactctgtttctctcagagttttaatgaaccagtgttatatagcactttattatatcttttgctcaaatttaatatatcatttatactattcaactgaaacatgtgtgttatattgtgtcgaacatagttcttctgaaagctgattgtaaagttgacgtgcacattacgttacatttctttctcatggtgtgacttgtgatgtacgttacatcttcatggctaaaagaaaatttcacaaaagaaaaagtttctctctcacatttccttaaacacatagttggctaactaaagaaacagaggaacatcagattttgtgttctgtttaggtataatcgatgctacacttattctgtaatctcatgatgaatttagttcaagagttcagttgtctaaatacttcactggcacaagtagaaggtcatttttcttgttgacagtgagtccaggagcttcttccatgtccatatcttcaaccttcatgccttctggtaacttccaatcaaaatgatacaaaagattcgcaagaccaaactccaccattgttgtccccatgtacattgcaggacacattctcctgccgcctccaaacggtagcaactcaaagttctgtccttttgtatcaatattactatcaataaacctctctggaagaaactcctcgggatctttccaggtattgggatcacgtccgatagcccatacattgacatgaatctgtgtcttgggttgcatcgtgtagccgttgatctcaaactcagacattacttctcttggaagaagaagaggtgctggaggatgtagcctccatgtttctttaatcaccgttttcaggtaatgaagctgctctatgtcttcgaagctgattagttctctgttctcaaatttgtttcggatttcagattgaactttcctcatcactagtgggttcttcgcaagttctgccatcgtccatgccatggttcctgcagaagtttctatccccgctagaagaatgtcctgttacaagaacatttactaagttagaatacagaacatcttaccattggattttgagtattttattattagttaccatcaagattgctttaacattgtttcttgtgaaattgttatttccaacaacagtttcttctttctccaatttcaaaagcaagtccacaaaatcttcacttcctacttccttttcttctttatgcaaatcaataatttgttcatagaacgcatcgagatctcacacgcttttttctctccgcccttgcaagccagtgaaccgatcgatgatccaacctatgtacggtataaaatctgaggcagagaaacttcccaacatttcgaatgcttcacggattaacttgttgaaactgtcattgctaagcacagttccttcaaaactcacaccaaatgctatcctacatactatacttacagttaaagcaagacacttcttgttcaagtttatcggagtctttaaagaagctgattccgcgattgaaacgataagtttcttgacctcctcgtccttgatgtgttgtgttgagtgaatatttttagcactgaagagctcttgagtacagagcttccttagctctttccaataatcattgtaaggagagaaagatatgtctcggttgttgtaagagagctctcttccccctgaggagtgagagatgaattaatgaagtaacaattcaagattttagtatgtggaatgatttatagtacctgctaaggaaggacggctacaacaatggagatcatagtctcttagagcttgtttcgctgtctcggacgaagaaagtatgactgttgggacctttccaagattcaaaagcatcacaggaccatacttctttgagagcttccatagagactgatgtggtaattctccgagctgatgtaagtttcctatgatcggaaaaccaggaggagatggtattggtcgatgttgccgccgctttgctcgtttgaaggcggtgagaagaagcaagatgacaaggaagagaagtgatagaatcaaaatgttaaccatttgtatattaatgttttattgagttatatgacatatgaagaaagttcatgccttgctatatatactactttgggaaatgctcactttactaatttaattgatgaatgcgacatgaaatttttagagtagtaaaattataataattgctacgtttactttcacaaatttttggcttgttattaaaataaaagtatattatatcacaataatgacttttgaatcttgaaaaatccataggagttgacactataactactttgtctaatgaaaataactaattaatggaagttctttcatataaataaatatttgacgttaacttatcataatccacgattttacaaaaaaaaaaattttaagttagaagcttacggttttaaggcaaacttgtaaactcatcccaatccagttcgatttcaccgtgtgcatatactgcttatagaccacttttgtcaactggacttggcccaagtgttatatatggtagactttcataaaaacttttattcataaaaaaactttctcactcgcaaaatcattccaacatatgggaaaattttggattatcggtagcaacccattcatgttgatatgtatgaatatctcttttgacgagtgaaatctgtgtaaggtttcagtcgttttattctgatttgtttttcaaatcatgatcatacaagagtacaagatcatcccatcttagaaccaaattcttgagagcacaatattacaaaacgtaatgcgttaaaacattttatttaaaaagaagaaactctttttttttgtcctgtctgattaaacatcaaaggaagatgcgatgtttttatatattccatgtgatgacattattttaaggatctagaaacttcgttggcacaagtataagctcgtttttcttgttgacagtgagtccgggagcttcttccatgtcaatatcgtcaaccttcatgccttctggtaacttccaatcaaaatgatacaaaagattagccaaaccaaactcgaccattgttgtccccatataaactgcaggacacattctccggccgcctccaaacggtaacagctcaaaatgctgtccttttgcatcaatattattatccgtaaacctctccgggagaaacacttcagggtctttccaggtatcgggatcacgaccaatagcccatacattcacgtgaagccgtgtcttaactggaatcgtgtagccgttgatctcaaattcagacattgcttcccttgggattagaagaggtgttgtaggatgtaacctccatgtttctttgataaccattttgaggtactcaagcttatcagtgtcatcaaagctgattctttctttgttcttgatttgacttctgatttcggattgaacttttttcatcactcgtggattctttgcgagttctgccattgcccatgtcatggttattgcagaagtatccattcctgctagaagaacatcctgtaacaacatataaacatcaattgtttaaatttttcttacagatttgattgtgaatatatgattagttaccatcaatatcgctttgatatggtttctagtgagcttgtcatttccaagaacagcttcttctttctccaacctcaacagcaagtccacaaagtcttcactaccttcttcctttttctgtttatgcagatcaaacatttgttcatagaaagcatcgagatctctcatgcttctctctcgccgtccttgcaaacccgtcaacaagtcgatgatccttccgacatacggaatgaaatctgaggcagaaaagcttcccaacatctcgagcgcctcacggactatgttattgaatcgttcactgttgagcacagttccctcaaaattcacactaaacgctgtcctgcagaccacactaacagttaaagccagcaatgtcttgttcaagttgatcggagtcttctgagcagctgattcggagattgaatcgatcagtttcttgacctcctcgtcctttatcggttgtatagagtgaacttgtttactactgaaaagttcttgaacagcgagcttccttacttctttccaataatcatcataaggagaaaaagcaatgtctagatagttgtaagagagctctcttgcccctaaagaatgattcaagatacaaaaagattcaagatttcaagattcaagattcaagggtttgaacagagaaaccaaagttaaaattgtagtacctgcaaagcctggacgactacaacaatggaggtcatggattttcaaagcttgttttgctgtttcagaggaagaaactatgactgttggtactcttccaagctttaaaagcatcacagggccatactttttggagagtttccatagagattgatgtggtaattctccgagttgatgcaagtttccgatgataggacagccaggaggagacggtggtgtccgttgataattcctccgattcttgtggttgaacacggctacaagaatacaaatgacgaagataagtgacagaagccaaatgtttgtcatttctgatttaattgcaattaaagtggctccataagtgtagtctttatattatactagtacattgctgctctcttcaattattattatcttacaatatatattctctgctacgtagtacgtaacgttaaacttaattttatattcataagatatactttttaggtttgaaaagtcaaacaagaacaacaacataaccgtcgatatgatgagtcagctctaatctcaaccacacgatcttctcatctctggcacaagtaggagctcgtttttcttgtttacagtgagtccaggagcttcttccacgtcgatatctttaacctccacgccttctggtaacttccagtcaaaatgatacaagagattagctagaccaaactcaaccattgttgtccccatgtatattgcaggacagattctccgaccgcccccaaacggtaacagctcaaaatgttgtccttttgcatcaatgttattatccataaacctctccgggagaaacacttcagggtctttccaagtatcaggatcacgaccaatagcccaaacattcacatgaagccgtgtcttgacaggaatagtgtagccgttgatatcaaattcagacattgcttctcttggaagcaaaagaggtgttgtaggatgtagcctccatgtttctttgatcaccattttcagatactctagctgatccatgtcttcgaaacttatcattgatctgttccccatttgagttcttatttcagattgaactttcttcatcactcgtggatttcttgcaagttctgtcattgcccatgtcattgttattgcagaagtatcgattcccgcaagtagaacatcctgtctcattcaaaacatatcagactctttggtactactacattacataaaggattgttagctaaatcttgttttagttaccagcaagattgctttgatatggtttcttgtaagtttatcatttccaagaactgcctcttctttctccaaccttaagagcaagtccacaaaatcttcattcccttctttctttccctctttatgcaaatcaaacatttgttcaaagaatgcattgagatctctcttgcttctttctctccttccttgcaaacccgtcaacacatcgatgatccatccgacatacggaataaaatccgcggcagaaaagcttcccaacatctcgagcgcctcgcggactattttgttgaatctgtcactgttgagcacagttccctcaaaactaaccccaaaagctgtcctgcatactacacttactgttaattcaagacacttattgttcaagttaaccggattcttctgagaggctgattccgcaattgaatcgatcattttcttgacctcctcgtccttaataggttgaatcgagtgaacttgtttagtactgaaaagttcttgaacacagagcttcctaacttctttccaataatcatcataaggagagaaagcaatgtccagatagttgtacgaaagctctcttggccctaaacaatgattcaagattcatgaggtttcttttcttttttttttggtttaaagattcatgaggtttcttgaattctatgaggaacagaaattgaaatttgagtacctgacaagcttggacgagtacaacaatggaggtcatgaactctcaaaacttgtcttgctgtatccgaagaagaaactacgactgttgggactcttccaagcatcaaatgcatcaccggaccatacttctttgagagtttccatagagtctgatgcggtaattctccgatctgatgtaagtttcctatgatcgggaagccaggaggacatggaaactgtcgatatttcggatgtttcttgtggttgaaaacggccagaagaatacagacgagaaagataagtggtagaagccaaatgtgagccatttctgttttctgaagggaaacctcaaaaaatgtataagcacgttgctgtcttcaattattttctgactggcgggtaatccatgtttatagataatcatatatataattagagtactctttctatctaaaatatccacatcagcaaaacaataaattaataaaattaaaaaatattaaaaatatcattcaattcaaatctatacatgagaataatttgaaatacataacaaaagagttaagtataattaataaatattaataataatatatacaaaaatatgaagtatttatgagtataatatttttaatttaaatcatatatataattagagaatactatctccatctaaggtgtcaacatcagcaaaatattaatttaataaatttaaaatatattaaaaatatcattcaattcaaatctatttgtaatatatgaaatttttaaaaaatatataagaaaagagtttaagtataataaataaatattaataataatatataaaaagatatgaagtatttatgagtataatattattaattaaatactgtatttgattgtaaatttgtaatacaaactttatgcattataaaatattaaaataggtaaaacaagcataaaataagagtattagatccaaactatatataaaaacttaaaataaataagagtaatttattaaaatataaaattgagtgacaagattattgtataaaaatagctataatagtataggataccaataaatccacacaacgtgtgggttgatttctagtaataataataaaaacattattgtcttattgtgtcaaatttttttttctatagtaaaacttacttttatattcaaataaaacttttctttccgatactacaaaaacaattgttttatataaaacaattgttttatataaaacaatttattgataagggataggcaaaatattcgttaggttcgatccggttcagtttgattcgaaaaattcggatatccgtgattttacgaggcaaatcaaatactaaaaatgatattggttaaaatcggagcaaataacaaatactaaaatttaaacaggcggatatccgctccgatccgttgtacatgaacatatgtatatgtatgtagataattacagatatatattataattttacactttttaatgtaaattttctaagtttttgttcatcaaattaattatataactattagttttaaaaattaaaaagaaataatttttcagtgaaatattacttaatttggattcaatttctgattttgtttttcattataatttttataattgtttttgatagatattcagcaaatcagcaaatatctttgattctaacggatatccgtacatccggatcttcggttactttcgaagcaaatactaatcataaaattaattattcgaacatagcaaatctgatcacaaatactaccaaatccagaatattctcgtgcccacctttaatattgaataatttcttttgagctagcaattagaccaactgataacaaataaaaagtaataaatgacaagatttatttgtatacactttattttgtaatctcaagaaaaaacaaagtttaagtgattagtgatctaaatacttcagaggaacaagtacaagctcatttttcttgctagcattaagtccaggagattcttccaagtcgatatcttcggccaccatgcctactggtattttccagtcaaagtgatacaacatattggcaagaccaaactccaccattgttgtccccatgtacatggcaggacacattcttcgaccacttccaaacggtaacagctcaaagtgttgtcctttcgcatcaatgctactattaacaaacctttctggaagaaactcctccgggtctttccatgtatcgggatcacgcccgatagcccagacattcacataaagccgtgtcttaactggaatcacgtagtcattgagctcaaattcagacattacttgtcttggaatcagaaagggtgatggaggatgtagcctccatgtttcattgatcaccattttcaggtaatggagctgatctatatcatccaaggtgatcattgactttttcccaatttggtttctgatttcagattgcaccttcttcataactcgcgggtttctcataagttctgtcattgcccatgtcattgttattgcagaagtgcctatgcccccaataaggacgttctgtgtaagatcataaaaaaaaaaaaagttagaatatctagggctacaatatatcttaatgatggaatgagaaacgttgtatagttaccatcaagattgctttgatatggtttcttgttagcttgccatatccaataacagtttcttctttctccaacctcaagagcaagtccacgaaatcttcaacaccttctttgtttccctgtttatgtagatcaaacatttgttcatagaatgcatcaagagctctcacgcttctctctctctgcccatgtagccctgtgagccagtcgatgatccagccgccatttggaaaataatctgaggcagaaaagctccccaaaaacaaatatgtatcatggattagtttctcgaatctgtcactgttgagcacagttccttggaagttcacaccaaatgttgccttgcatgtcactcttacagttaaagaagtaaacttctcgctcaagttaaccggagttccctgagaagccgattctgagactgaatcgataagtttcttgacttcatcttccttgataggttgaaaagattgaactcgtttaacactgaagagttcttgcacacatatcctccttaattctttccagtaatcatcaaaaggagagaaagcaatgtccagataattgtaagagagcgctcttggtcctaatcaatcagggcttttgtttattaatgctgtgaacacacagacaaaaaaactaagactttagtatgttttgagtgagagtcacggtacctgctaagcttggacggctacaacaatgtaggtcatggattttcagaacttgctttgcagtttcagaggaagaaactacgaccgttgggatacttccaaacttcaaaagcattacatgaccatactttttggagagtctccatagagattgatgtggtaattctccgagctgatgcaagtttccgattatcgggaaaccaggaggagacggtggtttccgttgatgttgctgccgcttcttgtgcgtgaaggcggctagaagaatacaagagagaaagagaagtgatagaaacaaaatcgtagccatttctgatgatttgatggataatgaagggcagctatacatttaagaaccattatcttcacttattatgatagcaatgagcttagggaccactacatggaggtaatgagacactttagaggcaaaaaagtcttgtaaccaattcggagactattccatatcgttgaatccagtatctttccagaagaaaacaaaaagatgaatattgagttgattacataatccaatatattctcacaaccacatgaatcccaagaacataatcatatttctttttttttcttaataattttagttggattattaataataaataatatttcaaaaaataataattagaatttaaagttaaagcaaagctccgacttgaaatgcatattgatgctcatcaggaaaagtcataagactttttcctgcattacctttttcttctctcaacattgaaccaattcgaagggtttagagtttattattatcaagtttcaacaaagagagtgttcaaagttttttttttttaaatatcctatcggctgatccggtcagttttggtaggaacgcaccaaggtgctacagagtgaatttccccgattcaagtagaattgggccaccacactgcctgatccgagtttgagagagttgagaaaacatcgtcttctcggttaaacaatgttgttttgtaaggttgggtggaaattaaagaattgattactgtaagagtcaaagatttattaagaaagaaagaaacagaagatatagttttatttatcatagtcgatactacattctttagtactatcatgaaaagcttattttacagatttaaatacttcctaggaacaagtacaagctcatttttcttgctggcattgagtccaggagattcttccatgtcaatgtcttcgaccaccatgccttctggtaatttccagtcaaaatggtacaagagattggctagaccaaactccaccattgttgtccccatgtacatggcaggacacattctcctaccacttccaaatggtaacagctcaaagttttgtccttttgcatcaatgttactgttaacaaatctctctggaagaaactcctctggatctttccaagtatctggatcacgcccgataccccatacattcacataaagtcttgtcttggctggaatcgtgtagccgttgatttcaaattcagacattacttctcttggaactagaagtggtgctggaggatgtagcctccatgtttcattgatcaccattttcaggtaatggagttggtctatgtcatccaagcagatcattgacttgcccccaatttgatttctgatttcggattgaactttcttcattactcgcgggtttctcataagttctgtcattgcccatgtcattgttatagccgaagttccaatgcctccaagaagaacattctgtaataagaccattataatctttaggtattataatcctacaattggaaagcaaagctttgtatagttaccattaagactgctttgatatggtttcttgtgagcttgccatatccaagaacagtttcttctttctccaacttcaagagcaagtccacaaaatcctcaactccttctttgttcccctgtttatgtagatcaaacatttgttcatagaatgcgtcaagacctctcacacttctctctctctgcccttgtaaccccgtgagccagtcgatgatccagccgacatttggaaaataatccgaggcagagaagctccccaagaacaaaaatgcatcatggattaacttgtcgaagttgtcactattaagcacagttccttggaaactcacaccaaatgctgccttgcatatcacgccaacagttaaagaagctaacttctcgctcaagttaaccggagttttctgagcagctgattccgagaatgaattcatcagtttcttgacttcctcttccctgatgggttgaatcaaatgaacttgtttaggactgaaaagctcttgcacacacatcctcctcaattctttccagtaatcattaaaaggagagaaaactatgtccaagtagttgtaagagagcgctcttggtcctaaataatcatatgacttttgttttaatcctacgcacacaaacaaaatatataaaaaaaatagtaagtgttaagtgagagttacggtacctgctaagcttggacggctacaacaattgaggtcatggattttcagagcttgctttgctgtttcagaagaagagacaacaaccgttgggatacttccaaacttcaaaagcattacaggaccatattttttggagagactccatagagattgatgtggtagctccccaagctgatgcaagtttccgatgatcggaaagcccggtggagacggtggtttccgttgatgttgccgccgcttcttgagtcttaaagcggcaagaagaagacaagagagaaagagaagtgggagaaaccaaatagtagccatttgttgatctgatgactgatgaagggacaactatatgttgaagctcagtgttgtcttcaattatttctgacacatctttattactaaacttttgaaaagaaataataacttaactcaatttgcatgtataaataataattttaagacgattgtgggtgaccttggactatttatatttttctctagcgttttacgacggaaagaaaataaataattggccagaaaatccgttttcaaaacgtgattgtaaaataaaacaattttttaaagtctattaaagtcttagaaatatatatattaccaaaaaaaactgaacctcatagttcatatttggcaggactattcttgtaatcttacgtcccaaaaatgttggttaaatttttatttgagtaactttacaaaaaatagtttatttgatttactatacataaatacacatatagatgaagtttttgtaccaaaaaattcaggtgagaagagatcatcaaattaatctataggtttgattggtgacctataaagaaatataaggaatgaagaggaacatgactaaaaaaaaataataaagaaaaaaaaaataaaatagaaataaagaggaatgagtgtagtggcaaaatagaacaaatattattgtaaatgataaccaaaacatacaaaataataacaaaaattaaaaaataaataaattatttttctaaataaaatattaaacaaattgaaaaaatttataaaaagaactacaaaactacgtgaaactaatatggtaattatagtgagtggtcatttgattttagctctgtaataatgagttcaagcataatttgacagtgcctttccttccacacatactataattgatgtatataagtaatcatgtttggctttaatatttttcatcctacgtatatgcattgacattcaataagtaattatgtttactacgttatcataaatttaatttttaagttttaattaataaatgtttaatttgtttttctgtttgttcctcatcaaatttcggaaggaacaattttcttcttcgattcctcaaaaaataaggaataaataggaatagtgtacgatccacatgttataatttggaaaaaaaattactgttgaatggtaaagaaaagaggaacaataaggaacatgttgttcctatccattcctttcctaaaaagtagtcaccaatcgaagcctatctttcaatagcataccttcttgattaattgcttctataaaaaaaatcaagatcgttttaattaatctctatatgtttacaaaaattaacaattctgaattgttaaaagcattatttcagaagaaaaagatgatgaatatagaattggttaggtaatccaagatattctgacattcacatgaatcacatggatcactagatgctatatgtcatcatattttcttcttctttggtttttccataaaacctttagttggataaataataattggaaaaaaaaacatcacgatattgttttctagttagctacttttttctaaaatttgaactaccaccatagaacatggtattttataatctataccattcatgggtcctatgtgacttaaaacggttaaaaacatattaacagtaaaaaagcgcggaaaatagtacaacactgtaaaaaaaaaagtggtaagcaaaagacattcacaaacaaaacttggttttgattgcagctaaaaattcggtttggattggtaacttgtatcgtatgatgaatcaagtgaattagttttatggtctctacaagtaataatttattatcttctgtacagtcacttgaaaagtagttaagcattaagggacatattttggatacttgtgtgtatctacattgtacaacaaattgaaaaacagaagaagaaagaaacaggttatctattatgttatctattatgcaacgtgatcattgtggccaaactaacgtctacatcattcgcaatacaaaagaaacttgaatctatgattctgttcattgatgaacaaaacataagtgatgtaataaaactcttagtaagatagacaagaatcacagtacttattcggcagcctcttccatcacatgttccgcggtgattggagccacggggtaataatggtaatgtagctcgccaacgtcgtctccagagagtttcgtccatccttgcggcccaacgtggtacactgatcatacagatttaagaaagtttaatacaaaatttaaaggaaaaggatcacaagatgatgatgtattggcagaagaagtaaggattgatctttaccgctagcaactccaccactagctccatcacggaatgtagcatggtagatggatctccttgctaactctgaggcttcttcaaccgacatatcgaatttgtatctgttaacaaaaaaagaaccataagattgagtggttataatagtaaagcaagatctagttttggtttgggctttgactaaaagagaagtagggcaatgatgatatcttgaaatagatacgtacccgctgtccagaacaccataagcgtatggtgaacctgaaccgacagagaatctgtctcccttaagccgtcctccttcgttgtcaacatagtacaatccagggccctatttcaaaaaagattacaattttagcatctcgactttcgctttggtgagtgaaactacagaccgagaaggaaataacagttaggatataaagtttagggtactgactgtttcatcccatccagcaatcattgtgccaacagaaagtcccattccacgatatgaatagagcatgttagcaagaagctttgaagctcctgaaacagagattctccttttgtttgccagctcatgtagacggcactatgatacacaaataaaacactctctatcagggtcatagtttcaacataatccagatttggtatacaagttagcaatcaaactattaggataaaactgggactagattttggatacaagaaatcaacgaaaccatttgtatgcccttgaatacaacaactcaaaacaaaaagattgatgcataatgatatataaatgtttagttcacagtactgagaagctaaagccaccacaccacgcagaaaaatacattactaaaattgaaagagacacacgttcttaggtcaccaaacagataataaagactattcttattccaggaaacagacggatacaaaacgtttttaagtctctaacaaatgactcaacagctttcggatatcaatacattagctatatgaagttatgaacaaagggaaggtaagaagtaaccggattgccacagcaaggaagataactgatagacccaatcatcaattcagaaagctaacaaaaactaacgttagggtaccttaattcccagatttctgtgccagaattgacaatcagcagcaccaccagccattgtaccaagcatataaggattaatttcaataatcttcttcacagattgcgacgctgaatggaaaaacacaaacaaaacatcagcaatcacagaaatttctcctttcttttactgtacagtatcactggccaacacaacaaagattagaaatttctataacaagaatctaactcattctccatttttaggatcctttagagagctcacaactaaaacacaaacagaaatctgaaataaacataacaaaagagaaacatacagatatatcctcccatgctagctcgagaatcagcagctaccataacaccttccttaaagataaacgcaagtgtagttgtaccctttgcaggcttcaccatctccacagcttttttctgaaacccatcaaactaaaaaaccaacaacaaacaaaagcaacatatcacaatcaaataaaagcaaaatcaaagtatattggaatccgaaagaactctaatttcgtaactaaaactcacatcagtggtacgaggaagatcaaacgaaggtgcagacgaaaacccatcaagcatctcactgtttgatccaaagccaatcacaggcatagttgtctccaatccactagtgtcaagcttcattgtcaaatttctacagaatcatcgaatacccacaattattcaataaaattatgcaaaatcatgaagcttgagaggtacccaaatcagggtattaacaaaaagagcttcctttcacaattcaaatcggatctagcacgagattacttttgtacgtgtgtgtataaaccataaaccctaatacttcattgtaaagtcaaagtaacgacaattaggggcctgagacatacctgaagagcgaaatcgagtagaaaattaacgaagcagaagaatgtgtgagaattggagaaaagagaagcaaattatggagggatgtttcttgagctctgggcaaaccgaatgcgaacggggcaagatatgggcgatcgggtcgggttgaatcatttcgggtcataccgcttaagtttaaagacagaacagtgttcattatgttgggcttcatgggccattattggccttttcttctttttttttttttttaatttccttggttatatgaatattaggtatataactttttattaatcatttgttattcaaataaatttagtaagacaagtcaaaatatttggatcaaatttatcaggtattattcgtttattattttattttattagttggaataaagtgttattttaatcaaatttttatggattttacattggactttaacagattttaaaatgtttatggttaaacatacaagagaaattgcctcatatagcaccatatcaagatttttggttcatatctaaaagttaaaaaatttaatgttaatgtttggttttaaaatcaacaaggcattccaaatcctatgtgcattcaaaattaataaacacctccttaaacttaaatattagatagtattcttctctttccgtgtgaaatttataaagttaaaagtcttaaaacagcctcttaagtttggaacattctagtttacaaaaactaacgacgcaattaaaaaatgattaaacaattaacgattcttgtagacttgtaataccaataaatacagaagattaattatttctaacagtggcaaaaaaaggtaaaagaaaaaaaatgagcaaacgcaattgcaaaatcgctagcgtttggtattgcatcttctagctcgcatagctcctaaaggaggaccattcaatgaaacgctgcaatgagtatgcaacttataagagtacctaaacaatggtcctatatgcgaacgtgcatgaaacattcctctcaggttcaacaaaaccggacctgtttcaatctgacgctgcagctcccggctctgcgttgcctgaagctggacctgactgctcacaagatgaacattcgcaaacattgacgttttcttaggaaccttgaaaggttcaatgtattgagttgctatgagtgtgttgtaatagtaaagctcgaatgtcacatagctaaactccacactacttttcttgcttgggtttgtgacgtttgctaaaatggttagatcaccgtttagaagaaaacccatgtcgagataagcagcgtttaggttagcagctgagatgtcgacgtaaggtgagcgaggacggtagacgaggtaaacgattaggatgataagaccgccgagaataagaatgacccagaatattgcacagcaaaatgcagctgaccatgtcattgcgtttgtctctcttgagggtggtggtaaccgtgggccacggcggtgatgcggggatggtgttggagcggttctccatggacttggtttgggtattggaggtaatgttgatccataaccccctccgttgcgttgtggtgcttgtggtggtggaggtcgttgttgttgattatcttcagggcttaatagcaatggtcttttcgatgagttttgagtttttcgtggtggaagtctctcctctgggcttaatggtacaggtattacagaatgtttcggttcttggattggattttcacggtggcgaccacgagtcttgattaggattcctggtggagctactgggtgaggttgcgtggttttgtggtgcgatttttttgggtgcggaatgggcgggatgtgtggttggttcgaagatgtttgtgaggtagaagcaccaccgcttttgagatgtggattctgcgatggaattcgcgcaaaatgagggttagtttcatggtgatgatgatgagacatttagatgaagaagctaaaaagcatcaaaggaaactaagttaagtaagacttgagatgaaagaatgagaacagagagattttgaactgttttaagtttctaaatgagatagagagagggagagaataacttggtgacaagttcaagtaaggattctttgttgtagaaaacaaaataaagaaggaaagtgatagcacgaagcaagtaatctttgttgtagattccttgcactaaaattaaaatcagtttctaatctcatgaaaaagtataaaaacattctctgtatctttttctcattcaaaagtttttttaagaaaattgtaattactcggtccaatttatctaaaacccaaataaaaagatctcgattttaggagagacagggttaaggacttacagtaacagtcatgaatatgtcaatctttctacttcagctcactccaggggaaagatgttgattctcagagcaacttacgaaaacttgtcgaatatgtcagtaaactatgaacatgttaagatatgtctcccatagatcaagaaggccgcagattagttagcgcaaatctgatgcgaaacacgttgcttctgcaggtagatactctgttctctgctcaatttctgcagcatcaaacatgaaaccaactctgcaatgccggttactgcaaacgttgacaaagacaactaccaatcgagcctgaccaaacagatactagtaaaaaagctggaagcaaactgaaaactaaacccatacaaaaggtattttccacgatcttcggtgcaattgttcttcctatatctcttatccccattctttggcatggcatggtatatagtaacatgaatatacataaaatgaaagtgtaaacgcctggaaagagctaacctacgctttacacgcgaagaaagcagaacaatctcagagtaatcatggccggaacaagaaacacaattcaagcacagagacccacagaacacagtcatacagagtgcaggagaagcaacgcacttgccctgaaacaactttcaatacatgtactcctaagatctgatgttctttctcaagatcattgaaaacttacgaaagagaagccatagagtaaacaactaatcaaatccaaaattccaattccacattgattcaactcatcaaaagttcaaaatgtaaaactgtgttatatcacacacagatactagtactgatcaacatagcagcactcttgcttcacctcagctctcataaacctctgcaaagaataacaataagaaatacgcaagatcttactaaactaaacaacaccattaaaaccctaaaaaatgtgaagcttttgagaaaaatcagaaaacattacctgactttcttgatgaggattgattggagttttcgagcaaagtcaatggatttgattctgcgttcaagattcttcctagcgagaaccttcttctccgaattcttaatgtgatgagtctgagtccctttgatcagcctctccattccactcgattgcatcttcttctgcaaaatcgtcagtgccttgtctaaatcattggagaacaccttcactcttatccctcgctcttgctgcaactgctggtttagactcggacgagtcaccaaccccgtaactcgcttcgctatcgtgttcatctcttttacttgttttctgaaaaagtatgtttctgaaaacgtaaatgagattgacgagagacagtgataggatctgaattcgacttaccggtcggaatctcgccggagagaatcaaagagccaatttgagtgatgatggagaatgtctaggttaaaaaagaggcgatggaggaaatgagataaaaaccagagaatttactaatataggggtggttatgtaagttttatgagatatagggatgtttttgtaaatatccttaaatctaatcttctgtttgattcagagagtattgactttaaagaagaacattcaagcctttcaaaaaaaaaaagcttctttaatttctctctctctctgtggagtgttcgaatctccaagctctctctcaaatggcagcgtccacatagtagagctgaagaagcactgtatctatctacagagaaagtgaagaggaagaaaaggaagagaggatatagaaattaagctggcgacttttagtccgaggcgagcaatggcagagttacggcactcgagctctctcggtagccgatcttcttcttctccgttacgtgccgccggagatgaggattcttcatcgcctcatgtacacgatcactctcctaacggcggagacgacgaagatggtcgcccacgtcatccttctagagatcgagaccgtccgatctggtttcactctttgtttcctttcttcggtgatgatcctagggtttctcctcagaagaataaaatctcgcttctattgattttgattctcgctattgctagcttgatctcagtttatgggattattaatcacttggtaagtctcttccttcgatctaggaattgagatcttcaaggctctatgttctaactgtggaatcgatttggaaaagtatttagctttgttttgagtaaaggggtttgtttatttaggtggatttggattgacattgttctcagactaagattgcttctatgtctatcttctgcagaatgctccttatttatgtaaaaaagatgggattgtgctaaactgtcctcatgtaagtgtttgaaaactttggttatgtgttttgttgaatgcataagctttgaatcctgtaaatttaattgtgtgttggtttgcatttgtaaggtaaaagagtcaccttctccttgggagaatcctttatctgcaacaacttcttggaagccttgtgctgagcggcggattggtggaatctcaggtattgaagggctagagcattgtcattttcattgtcatgtgttattttttttttttattttttttttttcgtcgaaacacattgtcatgtgttattgatctgtcttttcgtgaaagttcaagtctttttccttggttagcttattagattgtgtcaactgtttttttcagatcttcctcctgagaatgaaacaaatggctatgtattcattcatgctgaaggtggtttgaatcagcagcgaattgctgtatgtatcttccaacttttatctctttttcttctcgccattatccaatcatggatcaatgtctaaatggctgttgttcttcttgccatcgtccaatcttgaattcatgcccttttgtttccagatctgcaacgcagtagctgttgccaagattatgaatgcaacactgattctaccagtactgaagcaggaccaaatatggaaagacacaacgtaaaatcatattcagatattgatttcatttcatcttgaattacttctctattttctttttggtttactgagcttgttaactttcttttgcagaaaatttgaagacatttttgatgtagatcatttcattgattacttgaaggatgatgtccgaattgttcgagacatacctgactggttcactgacaaagcagagctattctctagtataaggtttgcttgtcaactcattatttgttgatgatgtacttgttggacgatttcaaaagttagcttgtggaattatggcgtcactgggtgctccttgtgtatatctctgatttaaaaatcgatctgtattttttaatcagatatgatgttgaccaagttatttatttatcttctgcagaagaacagtcaaaaacattcccaaatatgcagcagcccaattttatattgacaatgttttacctcggataaaggagaagaagataatggccttgaagccttttgtcgatcgacttgggtataaccaatattcctatagtttagtgctcagattttggaaatcgtcttataaacaatgaatgatttattcttgtgatgctggaaattttttcaggtatgacaatgtacctcaagaaatcaacagattacgatgccgtgtaaattatcatgctctcaaatttcttccagagatagagcagatggctgattcacttgtttctagaatgagaaatcgcactggaaatccaaatccatatatgtatgccatatcagagattcgactttgttataacttaggaccatatgcattatatcaacttaaaactatacccatgtctcttgtatagggctcttcatcttagattcgagaaaggaatggttggtctatcgttctgtgattttgtggggacaagggaagagaaagttaaaatggcagaatacagacaaaaggaatggcctcggcgtttcaaggtgacatttataagcagttgtcaacttcttttggtggctaaacaacctcaaccgctaccttaatgaaatttcttgacatatattgcagaatggttcccatctctggcagctcgccttgcagaagcgcaaagaaggtcgatgccctcttgagccaggagaagttgctgtgatcctacgtgcaatgggctatccaaaagaaacacaaatctatgttgcatctggtcaagtctatggcggtcaaaaccgtatggctccactaagaaacatgttcccaaatttggtaagcacaacaccggactcttataattctttgatgaatcagcacaaacttgtctctcacattaactgtcctttgaatcaggtaacaaaggaggatttagcaggcaaagaggaactaacaacgtttagaaaacacgttacaagtcttgcggctctagatttcttggtgtgcttgaaatcagatgtatttgtgatgacacacggtggaaactttgcaaaactgatcatcggagcgcgtagatatatggggcatcgccagaaatcaatcaaaccggataaagggttgatgtcgaaatcatttggggatccttacatgggatgggcaacttttgtggaagatgtagttgtaacccatcaaacacgaaccggtttacctgaagaaactttccctaactatgatctttgggaaaatcctctcactccatgcatgtgtaaagcttgatgatgatgcttttgtttggtcttggattttgtctgatgaggagcaacaaactatagagattcgtagttttcttcttcttcttcttcttttttgacctttcaaatctttgaagtcttcatttaccatctttgtaatcattttgatattatgtaaagttcctagtgatgaaaaaaaagtttcttttttatattaaatttgatcaaattgatgcactaaactttaattaaaagaaaattagctcaacggttactaatccaattcttaattttttgtcacgctctctaatagtacccgccattaacacaaccattgcgtgttgtcttctctcttactctcaggttctcaacaacaaaagaggaaaacaaaatcagaagctatcgtaatcagttctcatctctatgaccggactatccgtagagaaaaccgggtcgacccggtccactgtcttcttcatcatctttaatctatccatttttaggtactccgcttcactgggtttttgaatttgattttggtttttgagtgggtggtgtttgagtgatcgatcaatcacaaaagtttcgtctttttcagtttatcgattgaagcaaggtcgaggcaacaacatgctagctttcctccaagaggatggaattcgtacgattccttttgttggactatctctgaagctgagttcttgcagagtgctgaaattgtttctaagcgtcttcttcctcatggttatcaggtaattgtgagtttctttatcctttagaatgtaaaagtttaggtttttaattgcttgtgtttgtgtgtgttgatttggatacagtatgttgtggtggattacctttggtatagaaagaaagttgaaggagcttatgtggattctcttgggtttgatgtgattgatgaatggggaagattgcatcctgatccaggtagatggccatcttctagaggcggtaaaggtttcactgaagttgctgagaaagttcatagaatgggtttgaagtttgggattcatgttatgggaggaatcagcacacaagcttataacgcaaatagtctcgttatggatagtgttaaggtattgagttgattgattctttctgagtttatgaagtttgtttggaagttatcaacaagtgaatcttttaatggttgaagggaggtgcttatgaagaatcaggtagacagtggcgagcgaaagatattgggatcaaggagagggcttgtgtttggatgtcgcatgggttcatgagtgtgaataccaagttaggtgcaggaaaagcattcttgaggtctctttatcgtcaatatgcagaatggggcgttgatttcagtaagagaatcgacttcatttccgtaaccttctttaactttattcgatatatgattatctcaatcttgtctcactttcttggtctttagtaaaacatgactgcgtatttggcactgacttcaatatagaggagataacttatgtgtcagaggtacatatttgtgataactaccaatcttctggttaaagtcagaggtacatagagatgaaacattgttcttatttgtcgcaggttctaaaggagcttgatcggcctgttttgtactccatatctccagggacgagtgtgacacctacaatggctaaagaagttagccaattggttaacatgtatagaataacgggtgatgattgggacacatggaaagatgtcacggcacattttgatatctcgaggtcaggtttcaagctgaaaaatactcttgccaagtttttacctttctttgatgtcatataattttcattcttccagagatttatctgcttctagtatgattggtgcacgagggttacaaggaaaatcatggcctgatctagatatgttacctcttggatggcttactgatcaaggtttgacttaaaaatcttgaaatttcaattctgtatatggttccaatgaacatttgtcttttttataatgtttggtaaaggttcaaatgttggacctcatcgagcgtgtaatctaaatcttgaagaacagaagtcacaggtataccacaagctttggacctcatctaaggatcctagtttattagtaaccttctcaaccacaagttcaaatttcttatgctttttatattgcttactcagatgacattgtggtccatcgcaaagtcccctctcatgtttggaggtgatgtgagaaatctcgatgccactacttataatctgatcacaaatcctacactgctggaaataaactcttatagctctaacaacaaggaggtgtgtaaaaatcataacactttaatcttcaagttcaaactcatatccgtattttgaaactccaaacttctgtcatcaaactctgtctgtttcgttatttacagtttccttacatcaccgcgacaagagtttctaggaataagcacaaaggctatcctcatcatccaacgggcaagaacatttcaactaagcatgcttttggtctcactagctgcaaagaacaaaaagccaacacttggttcattgtagacaagaaccgtggacaaatttgttggaaccaacactctagtgaaaaattagagaagccattttgcttatacaacagaaaagctcttctagcttcgtaagattttttattcaactgtttctttctcccactttacatttcacaaactgcccttagccgattaatctgcttcgttttggtgcagcgataagaagttaaaacacaaccagctttaccaaggtaagcttcatttgcatacaaatgataaagcacagtcttgtttagcagcttcctcgcagcaaaagctcacttcgaaagattatagtcaaggtgctttatcaccttgcaaactagatgcaaaccaggtatagttaatgattttcgatatctctcgcttattaccttaatatcttatcttgaattccatacttttacttaatgttacacgcgctataacttcagatgtgggagctccacagtaatggaacactggaaaacagttattccggtctttgcgctgtgttaaatccagtgaaaggtttgttcttttcagatcaactaacttctcctctcttttcttcgacatacccttttctaatccttggcattgtcacccatcttgcagcagccgaagctagctccaatggcgttcgttcttggattgccacgggaagaagaggagaagtatacgttgcgtttttcaacttaaatcaggagaagacaaagatatcagccaagatatctgacattgccacggctcttagaggcaagaagaatcttgtaggagcttcgtgtacgagccacgagctatggagcggcaaagatttcggaccaacaaaagattcagtatcgattcaagtcgaacctcatggtcctgctctgtttgttcttcattgtagcaacgcctgactatatcagatcaacaggcatttcttttaccttctcacgtcttttctcatcgtagtaatgtttcatctttagtctataaaactcttgtgtaatcgaaagtcgaaacatacaaagtaacgaataaaaaaaatgcaagtatcaacttagataagtaaaagaaataacgtatatcaaaataaaccacaacttataaaaactcttaataattaattaagactaaaaccctaaatataatctctaaaatattttaagaaaaaaaaacaaaaaccaaacacaaagacctaagattgatagttaatacttatcatgatccttctgttctttcaagtttcattgaaatatgtagggatcccttttcctcaagacatcgatcactgttcaaaaggactagacttgccttacgatagatcttctcgtggctgttaggcaacccaatcttagcccgacccatcacaacaactccatgggaggttcccggatctttcctcgacgataatcctagcaattctacgtaaagataacttgcatgagaatctaaccgaatcattacttctttgttaaacttcaacttgtcaccatgataaacctttatcacttgtgtttggtctcgttcttcagggtctgtatatagcacaactacgtacttcttaaagccctcgtaacgtttcagaagagttttgtcatcgcttgcgaatgctcctaccctcacgattaaatctgttgtttcgtcttcattaatttttcttttccctttgctaatcattagtcttcgtttcttcgccgctgcttgccccaagttcttcatcatctctagagaacaaagtgaattaagatttggagttttagggttttatatacaattatttcctcttttttctagggtttattctaaatatgtttttccttttttctttgcatggtgataatgatgaaattatatactccctctgtttctgaatatttgtattttaagggttttacacacaaattaataaaacatacaaatctcatttaatttatctcttacctagaaaaacatcattaattacaactaatctaaccaataaaaaaatatgatgtaaaatataattggttaaaaactattaaatatatttaatgtttgcatagaaaagtgaaaacaacacttatattgaaaaaaataaaaaacttttaaactacacttaattagaaacagagggagtatatgaaaattggtcaagtctctccacataaatgacatatcatcacacaacaaagtgacatatgtcattcgatgttttttaaattaataaaactaataaaattaaataagcaaattaaatatatcatcaattctactcttaattgatttctccaaaataaaaataaaaaataaaattatgtaaacaaattaagtactactttcattatactctttttattttattaattttttatcatcaataatcatgactaatttttttattgtgttgtaattgtttgctacctaacctcttattagtttagtaatttaattttgagtatttgataaccttgacattcaagttttttcaaataataaaccttcaaaatattagacctaccaaataatgtaatacacgatcatttctcttatattgatatatgcaatgacagacgatataaaagtattgactttaatgatactttaatttttgcattctttttattcttttcatatgaatactcttgaaatcttgttcagtttatatcaattctatatatttaatcatgagcctataacatagttgttggagtattatatctagaaaataaataaaaccataaatagtttatttataatcaagttgaacaattttcaaattatccaagacacgatcatttctctaatattgatatatgcaatgacaaaagatccaaaagtgttgacttcaatgacattcaatttttgctatctttttatctttttgtacgaatactcttcagatctttttcagttgatgtcaatcgaaactttaatcatgagtctgtcacaatgttgttgaagtacataaaacaaggaattgatttatttataatcaagttaggaaaattttaaaccacaaaaattacatagttacacagaattgtatcaaaatatcattattgttgttatatgtattcatgaagtgaaaaaatattaaaatcttacaaataatcagctttatacacacaaatatataaattgatatttcaagtcacaaatgaatctaaccataaaaattgtaactacatattatagatctaattttattaacaatacaagaataaacaaatagtaaatataaattagcataaagaacaatcaatgtaatttttttttaacaattttcataacaacgctagggtaatcatctagttagaattgatttagttatgaattatgatgtgtgatttggtgagtgtaagtcactcgcttctcatgtaaactataatatattgaatctcctctctcttctctttttcgcaactttcacagagaggtagtttttgatgtttgccggccggaatattttccggtgaatagccgtcccgagtggctcggacttctgcccggtatctttcagctttgatagtggagatagccggtttacgtctggcaaacccaatttctatgaatggttttggccgggtttttatcttttctcgccgtcgatcggtttataccgattgcttttcacttttatttcaataatttctacagatctgagttaggaattgatttttaggtactagatcctaaaaattaataattctggcttgtgattttggaaacctcgatttgcaggaaatctatcaagcggttatttcttggttgaaagattgaagaatattccgatgcatattaccattcccttatgttgtgttctttaggagttccgttcagtgttatttcggtggtaaacaaaaaaatttcgtgcgatgtttcgacgatattttcttcaccggattctgggcttctcgacggcaaggttgatgtcgttaaatttctgatgatgacttatcggcatgtgttacagttgaattctaaagtcaacacgtgttttcggataagagtccaacgttaagaatctttttgctgtacatgttactctaatgggctattgttgggctccaattttcttgctgcacaatcgttgtaggctttaagtcttgtatcttttgtttaataaaattcacttgggaaaaaaaaaaaaagtcactcgcttctacagcgcgtgatggcttgtttctccacccatctctccttcgttgagaagcatgcaccaaaaaaaaaaaaaggcttcaaagagaataaatcccaaaaaatttcaatctttacgcaaaaggaataaacatttctgtgacggtttcaaggtttcatcggaaccctagatctaatactttttcccgatttgaatttgcgatttcagatctgagagaattagtcaaattctgaaatttcaaaattgatgtcgaaagcttggggtggaattggaattggagcttgggctgatgaagcagagcgtgccgatgaagaacaagcggcggaagctactgctgcgacggcggatacacagagttttcctagcctgagagaggctgctgctgcgactgcgactagtggtaagtctaggaagatgaagaagatgagtttatctgagtttactacaggtgcttatacagcacctggaggtagaaactctgttggattgactcagcaagagattcttcaattacctactggtcctagacaacgttccgaggaggaaatgcaacctggtcgtttaggcggtgggttttcatcttatggtggtcgttctggtggaagaattgggagagatcgagatgattctgatggctcttggagtggtggtggtggtggtggtggaaggagaccttatggtggtggatttgatgatgataggagggggaatcagtctagggtttcggattttcctcaaccttctagagctgatgaggttgatgattgggggaaagagaagaaaccacttccttcttttgatcaaggacgacaaggtcgttacagtggcgatggtggtggttttggaggtggtggaagtggttttggaggcggtggtggtggtggaggtggagggttatctagagctgatgatgttgataattggggtgcagggaaaaggcaagcaccggttagatcatctacgtttgggtcgagttttggtgattcaggtcaggaagaacgtcgtcgtttggttttggaaccaagaaaggttgagtcaggaggaagtgagactccacctgttgttgagaagacgagtaagccgaatccatttggggcagctagaccgagggaggatgttttggcggagaaaggtttggattggaagaagattgactcagagattgaggctaagaaaggaagttctcaaacgagtaggccaacgagtgcacattctagtagaccttctagtgctcaatctaacaggtctgagagttcaggattgaataatgtggtgaaaccgagaccaaaggtgaatccttttggcgatgcaaagcctcgagaagtgttgttagaggaacaagggaaggattggcgtaagatggatttggaactcgagcatcgcagggttgacaggtccttattcatttggattattttaattttcactgaggattgtggatcttttccaattctatctttctgtggtatttgaatgttactttatttaatgatcccatcatgctgcatgttgattttctgcttgaccaatgcttcaatcagaaagttaagaattttgaagaaatatttaagtgcttgatacattatgccacaggagtcaatctttatgtagttggataaattttggaggtttaaatgtctggaactgagaacctaaagtagtttgccatgtatgctttaggtttcacatccctagtggctgttatttgatgagcttctttgtatttagtgataaagttttcatggttattaagtgtctatgagttccagatctcgccgcatgatgcgaagttctgaaaatgtgtgatactctgtttcagttctttgtcatatttatgctctttttacatcggtgattgtttttagtatgtcatttatattttttctatcagtgcattgattgagtttcagagcctgtgttagatagcttatgcttgtttctcttgggtatttccttatgtttgtgcatgatataatctccatcttgattttgagatgcatcttgtgtgatccttatgttatgaactctgtgatgcttcttttttagctttatgacaatcggctattgatctgagtgttgtgaaaaatcaacttttccaggcctgaaacagaagaagagaagatgttgaaagaagagattgaagagctaaggaaaaaactcgagaaggaatccgttgctccagagatcaaggaatctgatcaagaacctggcagtaataataatcacaatgatttaccagaaataatacgtgggaaagagaaagatctggaaatactaacccgtgaattggacgacaaagtcaggttcaggcagaaaccagttgagaggcccgggtctggtgcaggtagaaccggaacatattcagaaagaacacattcccgggctggctcaattgatgaaaccaggagttttgaatctacagagagacccagatcacgtggtgccgtcgatgcctgggttagaccagccaatgagcagcgaagaaactttcaaggaaccaaagagcgcggattcttcagcaacaggttagtcccggggattagtatctaaatgactaaatctctttagaagtctagagatttatgcagttggtacaatagatgcatttaggctcatcatatctttaagtttaaccaaatttggtgaatcgatgttatactaatttctaaatctcgggttttcgacaggtcttcctctagggaaggatggtaagaagaaaacgaagaacaaccaaatgtgggatatctttaactactactacacagttcccagattttgaagaagacttagagcagcgttaatttcattaataaaatattcataaaaaaccctaatctttgttctttttttgttggtccatcttcggaatcggagctttgttgtttcgttttggtcttctctactcagcgaaggcgtgtctcaagagaatgtgtctcttcttgttattatattgttagacattttcgaatgttgattgttatattttttgtagctattcctggagtctctcatctccttttgatgtattttgttaacacaattatttgccagtaaccctatttgtattggaacaacaagaaagacaaaaacgaaattgtttagcatacaacaagaagaaaaaaacacaaaactaattgcttacacatacttccctctatacttaggttttggatctttgaaggctttggaatcagtgtcaatctgagaagaatcaatgggtttgaatatagaggagtgaatattaccatcctctaaccacttaagatgattctctctaaactctaaatgcattaaacgagcagcttcttcaacctcttcactataaggctctactttcaccatcgttagcagaacccgactgtaccgcgagctcaggatctgttcagatacagctactaacttgaaacacgggtgctccgggaacttaacctcgctgccagtctcatctctcaaaaccgggaagaaaaagacgagcctgcctttcatcaccaacattcttgcagcaagatgaagtagatcatgaacacactccactagactatatgcaccagtggatggaatgtgatctgttcttttgtcatcagggacagtgtaaggatccactgttcctctaaggattttcctaccaccggatttacgtccaccagcacgaaccccgtaaggtggatcgcagataattgcatcaaagatctggaccaatagatacataagacataaactcagtgatctctctactcaatataccaaagataataatgaaagaactgagatatagagcattacctcctttagccccgatcgccaaggaggaacgttattatccattctaagtaaagctaccggcattggtaatccatactgcataagtattaacagatgtaagaaccagtgatatcgaaagaaacataacaatagaagtcacacactcatactaacctgtttgaaattgctccaaacattacaatctggaccacgtccatcacgcactactctgatatcgatatctgcaccctaatacaacaactcttttatcagttcgagattcagaaaccacaaaaggaaatcaataaactaagggaaaggttgcaaaccattgtcattgcgccaaagcgtgcagcagaaacaagaatgctcccagtaccaacaaaaggatcatacacaagttttcccgaagtagctttcgcttgattagccattaagaaagccatttcagcatccatagcagttggaccaaggtaagtacgagatttcaactgaaatgtaggtaaaagcttcctatcagcaaaaccaacctccctcccaaaaaatatccttctctgtagaataggttgaagtccattgttctcttcagattcaatcatttccattagaaaaaagttatgatctgggttcttcaagttaacacgaccctgcaacaaccaaatcaccaaagaatcaaaacaatgaagataaacaccaaaagagattgaaacaagaaagtggaatcagacctcaaatggtatataagtaaacgactggattcgatctttctgctcgtcaaaagttaaagcctttccaaaagtttcaacagagattctaaaagttgaatcagaagtgagaaatggaagctttcgagaatcagggtagctttgaatcgagtctttaagctcttcataacaagttccttcaccccaaagctcatacattcctttcaccaatatgcttcgtttagcaatgttacgagcgatttcttcagatgaaagttgaacgaaatggaatggagtatcgttatggtgattttcaggtagacgccattggagagactcattctctgcaatctcttctccgaagagttcagctaaagcttccacttctggctttctgaagtctaatagcctgtgatagaagacacacagaaaccacatctctctctctctctctttcccctgaaacgaaaaccctaatttgacaacagaactgagaaagaagacgaagacggagaaggaagaaacgaagaacgacggcgactaaaaccttttcttcaaaacccttatacatgggcccaataaagcccatttattcaggcccacttgtacttaaatgacgaaattaccccgttagctgtcgaatacgagatatatcgcgtcgtttgctttcacttgtgtcttgtgtgttctgccaaagtttctctgcagcttctcctcttctcagaaattagggttccgtctcaaattacgagcagatctcgtactctctggtaatgatttctcgtttcttatactttgtttataccgaagtatcgattcgcttgcatgtctcgtcatctttgtaccgattctgatttgaagtttctagggtttaccatcgcgcaattacgatttgtagatatgttgtttgcgagtagagatcaattgaaattaccttcgtggatttgtctcgtaagcgcgaaccatgtttagagaaacgagttcagatttgcttcacgcttaattattgtgttgtagctgtgtatatcttctggatctgctgcgtgtgtttggtttttctgggagtcaagtcatattaacgttgttcaaaaacacttttggctgtttgttttagaagatgtctgaagatccggagtaccgttgcttcattggtgggcttgcttggacaacgtctgatcgtggtctcagagatgcctttgagaagtatggtcacctcgttgaggccaaggtaaattttttatctctctttcctcagtggctctctgttcttctggttactgaaacttagaagctttgttctgtttcgccttcagattcaaacactgaagctttgatatgttttgtaatttgtttgctttctgcaactctgtttatggtgaggcgtgtctgtttagtaactgacttcttttagtggctatcagctcttctgattgctgagacattgaagctttgagtgatttgttcattttcttgctctttgcaaatctgtttgtagtgttgtctgtttgataattttatttgaaatttatcttactaccttatttttattgccataactattatgagagataaaccttatctattgatacacaggtggttcttgacaagttttctggtcgctcccgtggttttggattcatcactttcgatgagaaaaaagctatggatgaagctattgcagcaatgaatggaatggatttggatgggcgaactatcactgttgataaagctcagcctcatcagggtggtgcaggcagagataatgatggtgaccgtggtcgagaccgtggatatgatcgtgatcgcagtcgtccctctggtgggcgaggtggtggagattgctttaaatgtggcaagcctggacattttgcaagagagtgtccttctgaaagtagtagagatggtggtggaaggttcagctcaaaggatgataggtacagttcgaaggacgataggtatggtgcaaaagatgataggtatggtgcaaaggaggataggtatggtgcaaaggatgataggtacagctccaaggatgataggtacagctccaaggatgataggtatggtagtagggatggtggaggtagtcgctatggacctgatcgcagtggtgaacgcgctggaggacgcagccgggatggtggcagccgtggagctccaggaggtgagaggcacagtcgtgctccatatgaccgccccagagctggtggtttccactagaattctactccaaagggtatgtatgcattctgttattttaactttttctattgtatcccttcaaagttaagttctggtaagacttttgttgaagtcgctttatatcttcttttgcagttaaagaagttgaaggtttctgctttcagctcgtgtcaagtcaaagttacgcttgatggtctattttcttcaatgtatttggatagctcgagaaagaagatgtgttctctattttggccctaaactcaagagtcgactatgttcctaaagtgctctctctccttttgatatgttgatccctatggaaaccttgtgcttggttggtttgagacaatttgagatgtgctactttatgcttatcgtaatgaatgcgtgggttatcccccaacaccaaatatgcaaaagcctcaggtacgtgattgatctccacggaatatccgaggtcgacatttggtaaaattcaaatgttgttatatatggggatatgccgtttattgattctggtaaacaatgatgcaggatggtctgatactcgggtttagccgtgaaaattaaagactgatctataaaacttgtgatgggattgggaaatatacattgctgattgatacttggctactggaactcaaacatcccttcatgagcaacaaattgtcattttcaggaaaaagattgactttgtgcaattttagatcttggcaagtcaaatccaatagttttcttcaactagggaaatttctacagccaaatggtctctggttggctcgtctagtatagctcactgggtttatcttcgatctattctttgtgggttcttcgtgcctcttcgtctactttgtttcttgctcgtgacctctacctctgcctttgattctcaagctctaaactccaggaattgggaaatggtgttaatgtatatatagttaatatacgcttgaataggtatccttactttgataatttgttgaaattgcatacataaataggtcacacgagttatgtcgggaaaacactgacttgattattttatacaagtgaatagtatatgtatggttagaacttagatgcatgactagttcgttcaccttctttcacaattttgtattgcatacatacatacattgcttaggtgaatatataatcaatttaccataaataaatgactttgtaagtctcataatttaagactttgtttctaacataaagaaagactttgtagaacatatgagttggtgtatagcttaaacgttgactcaattatttgatagaaatcgaatagcatagctattcgacgccactattcggttactcgtacctcgaccacaccaaattaagaacacttaccggaagaagataaaaggagaaaatggaaactaatctcttgttggtaaagtgtgtcttattagcatcatgtctcatacatccccgtgcttgctctccttcttgcaatttcccggcgatattcaacttcggcgactctaactccgacacaggtggcctttctgcctctttcggacaagccccttacccaaatggccaaaccttcttccactccccttccggtcgtttctcagatggtcgactcatcattgacttcataggttcttagttctgaccacacattcataaatttcgattctttacttagttttctcacgacccatttttgaaatcagcggaggagttaggtttaccatacctaaatgctttcttagactccatcggttcaaacttcagccatggtgccaatttcgccaccgctggctccaccgtccggccaccaaacgcaaccatcgctcagagcggtgtgagtccaatctctctcgacgttcaattggtccaattctccgatttcatcacacgatcacaactcattcgcaatcgaggtactttaaaagtttcaaccttttgcaaaagattatcagaacgttttgtaatccgatttggtttacaaataggtggagtgtttaagaaattgcttcccaagaaagagtatttctctcaagcattgtacacattcgacatcggtcagaacgatctcaccgctggactaaaacttaacatgacttcagatcaaatcaaggcttatataccagatgttcatgatcagctctctaacgtcattcgtgtaagcaaagataaagtctttattcactagatagatacaaagctgtgtgatttaactgaattaaccaactgtctttaatgtctctgtagaaggtgtatagtaaaggaggaagaagattttggatacacaacacagctccacttggttgtttaccttatgttttagaccggttcccagtaccggcttctcaaatcgacaatcacggttgtgcaattccgcgtaatgagattgctcgatactataactctgaacttaaaagaagagtgattgagttgagaaaagagctctctgaagctgcgtttacttatgttgatatctactctatcaagcttactctcatcactcaagccaagaaactcggtatacttcaagccttttatcatgttttggttactcgggctcggtttagactggttctaatggtttattatatgttgagtttggtggtttaggttttaggtatcctttggtggcttgttgtggacatggtgggaagtacaatttcaacaagcttattaaatgtggagctaaagttatgatcaaagggaaagagattgtgcttgctaagtcttgtaacgatgtgtcgtttagagttagctgggacggtatacatttcactgaaacgacaaacagttggatctttcagcaaataaacgacggggcgttttcggatcctcctcttcctgtgaagtctgcctgcaccagatagaagaacttagggaatcatatgaccaaagtgtccttgaaaatggggacaaataaaagttctttggaatatttgttttttgtcaagttctaagaaaattctcatgaaagtgaaatcgtaactacctgtcatatttatctgaattttctatttagaatgaagtgaaacgtatttgatgaaactaataataaaaaaatgatagagatattagttttttttttttttttttttgtcgagagatattaggttttttcattaatttgagacagttggaaattaaaatagtttattccttctatttttttgtttgttttgacatattttctataacagccaaaataagtgttaaccatattgctaaaacacttaatactttaaaattacccattgcatattcacacactctttctttcgtattattgtatcaaccacatatgctttcgtcctctccacttcacctaagactcatctatattcataaagggcaattatgtcattcaagaaaaataatattcttaataccacttaattagccacgaatcaccattcataaaccaccacgtggacaattgagcgcgtggactacaccgtcttccagtctggctgcttcgtgagagtcaccctccttccacgagcctcttaaaagtcaactcctcacgtaatcccgtgcaccgcgtcacacctgattacaggttctcttcttaattattttctcttaatcgtttttattattaaacccgcgaagaactaaaacatatctcagaccaataaaactaaggaaaatcaaattctcagacaacttttttcgaagaagacgacgaattttaaagattttgttttctatattctcttctggtaatctttttgtttgtttcttttttttgtcatccatatttgatctttctttgttgctgattatcaacttttcttttactagctgatttttcctttttcaaaactaagcaagtttgtgttcacgtcttcatcaatgacataattgcccttagtttattccacatagttgtcatacaaattactttcgtttctatgtgttttatattcacaatcatagatgaagttcataacttagatgttaaagaaaaaaacagagttcataacttgtgattttgtgctttgtcttatttgttagattacgggtacgtaatttcttacgaaagaaggctctctttaataagataaattcatttttctctcatcttttgagttaatacttcttgacctgatttgagtttggtcgttaggtttttcttgatttcggttcaagttttctcttagctctgaattatatgtaccgtgtaagaaagtgaattatatgtaccgtgtaagaaagtgaaattttcggttcaagaagtgaaattttctttaagttgtgttttttttttcacttatgaagtcatatgataatttgatatgaatcttaaaaagcttttttttttatgacatgatgcagatagtgaagtctcggagactgaatgatattgtttctggtcaacttaaccaatttcagaacatggcaaacagagcagacaactcaatgcgttggtttgtgacttttacaagattattgaatccttgagttcattgtgaaagagatgatgattactgattcctagtgttctgtttttatttttgtgcagttcaaatagtaagaaaccgaatgacggtatgatgctcgtaatatcgattttcgcgggaatagttatcggatttttattaggcatatctttccctacattgtcactaactaaggtaacacttttaaaattttactttttttcaagaaataatgttttggtgtgattttgtaaaagatgtgtttatatattttcagatgaattttccatcaagcattcttccttctgttgctactgtctacatagaaaatgagaaaccggagaaatcatctaagacgagttcacaaaacgaaagtgatgcatcacatcatcataaggcatgtttttgtttctcccttgtgaacattactcatctttagtgaatttagttacaagatttgtttggatattctgcagatttgggttccatcgaatcctcgaggtgcagagatgttacctccaagttttgttgcagccgaatcggatttttacttacgaagattgtggggattgcctaaagatgtaataacatctctaggtttttgttaatgatctttcaaacatcttaatcattgacttgatctctaaatcatgttttttttctttaggatttaccagtggtgaagcctaagtatcttgttgcttttactgtttcttatgaacaaagaaaaaacatcgatgcttgtgtcaaaaaagtatgtctctagtttttgttctctttcccctttgcttctaatctttcactcttattaaactaatatcttttactctctcaatagttctcagataacttcaccattgttctgtttcattacgatggaaaaacctcggagtatgatgaatttgaatggtctaaacgggcgatacacgtcagtgtacctaagcaaaccaagtggtaacaaaacaaacactttttttttatctctcagtttccattgatctaaagctttaaataaaacgttttgaatatgtttctattgaaggtggtatgctaaaaggtttctgcatcctgatatcatagcaccatatgaatatatattcatttgggatgaagatcttggcgttgaaaacttcgacgcagaagagtaagtactctgcttcttttgataatataatcagaaactgttatgaaatgttttctacattattgcaggtacatcaagattgtgaataagcatggtctagaaatatcgcaacccgctgtggaatcaagaaaatcaatcacatggaagataacaaagagaatacccggaatcgaagttcacaagtaaaacaattaactcttgatataaactgtacaatgccatggtttaagtaaagtaaagatagtgattctttttcaaattctttgatcagagaagtcgaagagaaaccaggccgctgcaatgaccctcacctacctccttgtgcagggtatggatctcatttgtcaaaaccaatacaataagtattcatactctcttgatccattaagttttgcacggttccttatcaggtttatagagattatggctccagttttctctagagaggcatggcgttgtgtgtggcatatgattcagaatgacttggttcacggttggggtcttgactttgcgctaagaaaatgcgtcgaggttaacatacaaatacaacttattcacaaacgcgtataattttacaaaacgttttcgaaactaagaagaaacactttttaatgattcaataaacagcctgcacatgagaagattggtgttgtggattctcaatggatcattcatcaaaagattccttctttaggcagccaggttattaaatgatcaaactttatcttcctatactcaactacattatttactagcttctttgttcatagttttaactatgagatgatctctcaaatacattgatcagggaaccgcgcaggaagggaaaaccgcgttccaaggggtaaaacaactcaaccgcggctattgtcttgtgttatatacttagaaggttcttgaacttagcgggttctagaccgagtatattgttaattactgaattatatacatgttttgatcaggtaagagagagatgtaaacgggaatggacaatgtttcagaaaagaatgacccgatcagagcagaagtatctgaaagaaattgcatctgcctcttcaaactctacacgtacttaaaccaaaagagtagaggaactgaataacaacctttagtgttcagatagcactttcagtaagaaaaaaagagaaatagaatgttgatatgataagcacataagcaagcatacacacacaagacacattctttgaaaagagcaatatagctctgttctagaaacagttatactgtagtaacaaaacagttaataaagttcttaataaactcttcatttctataatatacaattgtcaatactaatctgtgttcatttcagattgtggcaaaataatttgagaaattgtagtatgctctcattacaatacattatgtttcttggttcaaagaaatgaccaaacctcactcttatcataatgagtaatgactataagctttcatcttgaatataaactcgttgatacgccgtgcaatgccatcctgcatcagccaagatatcatcagatagatagtgggtaatgagcataacgtgttttacccatctgaaacctgtgcacggaagctctccagctcttgttatcaagaaggaactcaaacgaataaagactgttcttgagccgtagatgagggatctgcgtaatctcattgcaccatctcaaaaggtttacagtatgtctactcgggatctcatcaacatcagacattatcaacaaatcagcaaggacaaatgtcggaacaatcactaacaagaacacataagactccatatctacaccacgtagaacacaacaaagcctatagatactgaaaactgtaccagaatcctacaaaagtcctaaaaccctaaacagaagctaggaacttgctcttgaatcgagcttagcttctcaaaattcgagtgaaagattaaaactttaaagaagggtacacgaaaacaagcagatcggagaatcaaaccctggccggatatatcatccatcagtcttcttaaaacactagtgagtagtgtccgtcgtcttcttccttcaacagttcatccaccacatttccgtaaaccagataatttgggcttgacttatataaggcccattaaccgccaagtcaaagactccaacgacgatgaccatggcttcatgggcttgtttatgcaatgaaagattgacatcaatcagatagcacagggcaagacaaccgttacaaaaaaaaaactacgattcaaacatgaacaaactcatgaatcgctggttgagttttaatatatatatatgcttaacaaataaaaaatcaggaaaatgaaaatttgatgtagatgttcgattacaagtttatttcaatggaacttatttattactttttcaaaaataatactttgtcttttctgttatgtctaggacctccgtaatatacaatattattgacatgtatatctgaatatatatttattttttttgttaataaatattttattgcatcatttcaaacatataataattttatgaagtaatagtgaaacaacatatctaacaaaatcctaaaagttaaaatttattatatatacaagaaaaaattatataaaattaaacagtttggattctctttcgattttaatctttgatccaattatctttttttatttaattatagagaatcttaacatacagcctaaatcaaaagatttcaaaaaaattaaatcatttttttcagtttcaaatattttataggtggaacgtatttttatacgaaataaacgtaaatttaaataaaacgaaaactttagttacatattttcttgtatacaaacatatatgatatctcatataataattttatacataataatttatttcaatcattttatcccgcacattatacaggttcttatctagtctattatatataaatgaaaacaatttaataaatatataggatgatggtgatggtggttgtgatgatggtggtggttgtgatattgattaagctttaaggacgtggtcctccatatcaataaccatactcttgaggagttgcatgtagctgcttggttcggggaaatcatcgttgcgcttctcccatatcatagtgattttgcagacgcaatcttcttcagagttgggaataaattggaagtcaatctcatacaccttgaactgctccatcacgtgaccttccaatcctacaaccttcactatcttattgtcatcgtctatctctctcctctccttgaatacctcctcctttccatctttacatacatgtaaatcattatttttttctttttttttgttaaagcgtgtaaattaaattattgtcatatttatataagactatctacaatggcttattgaaaaaatttattcaatagttgaatgcttacagtggggtattgaataaagaaatgaatcatatgtagattaaatggtgttgaatcgattcaacaatgttgaatctttaaaaatggaccctttattaccacttgttattaaataattggagacagaaattgtgggggagagttaaataaagataggacatgttcttttatttgctactgaaatttcttatattttcttttcctctgaattattggaggtcaattatcttataaaatatttatttgttttaaattatttttacactaaaattcatcattttttaaactctataaatagagatttgtttcatttgatttgaacatagaaaaaaatacatctattttcactaaaaaattttcattagccgctaaactcgtatctatatctttttttgctttttccagtgaaatggatcccaataataactcatttaacccctaaaatttcattacttatccatttaaaacataaaagaaaagaaaaataatgaaataaaaatttgtggggtagggtgttgaattttattaaacaaaccattgtagagtataaaatttgagtaggtattgaattattatgtgaaagagagagaaaatgatgtggaagggaaagaagcttatgtggagggtgttgaatggaaaaaccattgttgatagcctaagtaaatgatgcaataaatttccaacatgtcaatagttagacttctcaggccacctccatgggctaggttctaaagaaaatctcacctatttagaaaaaagaaaaagagaggagagaaacacataaaaagaaaagatctcaacaagaaacttgtagaatttgatgagaaaaggtatggatacatgtccttcacttaatgatagattttttgtttaaagtaaaattttaaatacatacctaaattgattgaccataaaaaaaaatacagacctaaattatgtttaaaatattactaagaaatccaaattggtatcttaacactgatggagatggcctcataaggatgaatatgcatgatattatgatcacatatatatttttttgcaaattaatgttgggtatcaacccatgccccatactcaaagtttagataattgtctaatatataaagaaaggtatacctccgagtgtgtagttccaaatcttgatgcctccttgagtgtcccattcgccatcgtgaacagtaacactttggatgtggtggccgatagtgtcagggaagagatagttctcgttcctgtacctcttgaagtgtttctccaccgttccttttaacggcacctgcgtcacgtatgttcccgacgtcgccatttctctctctcttttttaattttgtttaaaagcttccactcgtgtttcttcttttgttttgttttggttgatgaaataacacttgttgccttggtttatatagagaagatgacgcttaagaatactgtttcttttaatcatgctagaaacttctcttcttcatttttcaacctaaagtatttagtgagcattaattttacaaattataaaataaaatattagagcattacattattgggtcatagaaatttattttctttatttgataaaataattccggaccacgttattaatgtgtacagttggtccatcatccttctagttcagaaaaattaagtttttttttttttttggtatgaatgtaaaattatattttaccccaaaaaacagttttacaataaatacgacatgaaaataaaagaatttgagaagttttgttatatattacaaatatttcagttcccttcaattggtaagctttagatcatcttgaaaccgtaaaatttagtctccaagtgtatcttgaatggaaaagatgtcaacatctaaaggtatatgctacagaaagtaactccacaagacccattttcttatatattgatttaagaaaccacatggtacgtatatagtattccgaaaggaaacacactttattatatataattgaaaatatagcattccgaaaggaaacacactttattagatataattgaaaacaacttaataaacatatagggatgatggtgatgttgattaagctttaaggacgtggtcctccatatcaataaccatgctcttgaggagttgcatgtagctgcttggttcggggaaatcatcgttgcgcttctcccatatcatagtgattttgcagatgcaatcttcttcagacttgggaataaattggaaatcgatctcatacaccttgagctgctccatcacgtgaccttccagtcctacaaccttcattgtgttattctcatcgtccatctctctcctctccttgaattcctcttgctttccatctttacattcatgtgtacgtatcagtcaaattatatttgggtcatattcatatgtaatgatgcaaataatttccaacgtataataaaggtatatacctcccaatgtgtagttccaaatcttgatgcttccgtgagtgtcccattcgccgtcgtgaacagaaacaccttggatgtggtggccaacagcgtcagggaagagatggttctcgttcctccacctctggaagtgtttctctgctgttccttttaacggtacctccgtcacgtatgttcccgacgtcgccatttcgctctctccctctcttgtttaaaagtttccactcgtgtttttgttttggttgctgaaataacacttgttggtttatatagatcagaagctgacgctttcaaatatggtttctaccgtttcttttaatcattaaaataaaatataagagcattagtggatcatagaaatgtattttcttgatttggtaaacgaatccgcgaccacgttattaatgtgtatagttggtccatcatcctttacaagataatcaatcatacgcgaaacacactaatcgtgaggacaattatcgcgtatatgtttactaaattttatccaatcattaatcgcaactgcgacttgtagtcggtactgaattgtgatgttgtgtcatatttgtatagtgattgataaatattaatatataatcgtcgtgtcataagtaacctgaatccatagatttgatagtgtgactgtgcttgcgtgtggaagttatacttatacatgaaaatatgtataaattaaaatcacatatttttattaatttagagatttgaggtagaacgaaaagattaatttatttttgcattttatggatcgatattaaaagttttgaatggtaagtcagatttttggtagtccaaaatgtgtgacagataaactgtttttaatttttaataagcaaaaaaataaaaatcaggcggctaactgcatacaatttttgttttattgcttttttagtaataaaagtagattaactgcgtacagttctttctcatacgttaatgtgagtggtccaacggcagtccataattttgtaataaataaaaaaaacaaaaggtaaaataaaatattaaccttttattctataaaagcacaattctttttttgtattttgtaccatcacacacactacaaaaaatgtaaatatctctctcatttttttttaacgttgctttttaagcttattatccaatattctgatattgccttaaagagcaggattgaaaaatatatgataagttttcgtcgttttataatttgtttatatttaatagtatacaactggtattgtaattcattgacgttaattttgcttaagtttttgaactttttagaatctataacaatatggtcatgtttatgtttttgcttaagttttaaagaaaaaaagtaaaaaataaaaaggaatctataagatttgcttgtaaccacaaactcagcagtaatatgtacatacaccaatcaaacgatttaatatgatcatattacgtcagtgtatatgtcagtaatttgactctaagaaaccttaattaaaaatttgtaaacaagacaatatgccaaaataaaatatacgtctaccttctcattaatttccttgtttcttcttcattgaactcttgaacaaatattatatggagatgtcacttgtcacttcgagttgctaggaaacttccaccggtgaattcctcctctatacagattaattagttcatatccccttgtctctcagctctctatctccacactttttctctttaacatatcctttactaaatggccgtcactgattatttcgccggtgagatagcgacggagcttttgaagcagctctttctgatatctgcgagagcaggccggtacaaaaacacagccgacaacctcagcaccttgatcgagaacattcaaccgacgatcaaagagatccagtacagtggagttgagctgcctgctcaccgccaggctcaaatccgtatactctttgagtctctagagaagggcaagaaactcatggacaaattcttaacatgcaatcgttggaatatgattcgacagttatatctcatgaagaaaatggagaagctagagaagaccctctctgatttctttagggcttccattttgacacacatccttgccgatcttcatcttctccgggccaattctgatgaacgttcccatgaggtctatctatctttgttttcttctctctcccttgtgatttcttgttcaccaagtttgaaggccatctctataatactcgtttcttttgcagcacgtcacatcaaccaaagggtgtgactacgacggacttggctcaattcagtaccagcacatccagcctaacctagacatggatatgcgggtcaccattttggaggctgaattccgcaccttctccaacaacgtcatcaacaacatgcttgcgatgaagcgagcgcaagatgtcttactacgagccaacggctttgaccccgagaccctcctaccgatgatgtctcctcctgcagcctccatgaatcctcctgcttgaccacatacgacttaggatacttgcaacccactcaaccttgcggactacgatctttaaaacacaaattgctttcgatttatgtttttcaatttgttaaattatgtttcagtcacaattttaaatataatttatcgtccactactctgttttagcttcttctttttccatacgttacaattgaccttacttttttacgtattaaagagagaattggtttatacacctcaaatcagcaggttctacatgatgaatgaagcccttttaatatcaaaacaacccttttagtagctgaaggaatcagattgtatctctaacaaaaaggctaccaacaaaatgatgttatccaagttgggttccaaaatatggggtctctcaagagctatgtctttcaggttgtctatctgctctctcacacacctctttctgcatccgggaactgaagaacgaagcgcacaagtcggggaaaggcgggaaattgagtgttgatccacaaaacattgtttcccaaggtttctctgacatcaatgctttcttcctagatctcttcttctttttgcttattgctgcaagaaaaacttcataatctatggcgctagtctcgagtttttcatcgctataaggatcaaatagaacatattcatggctcctgtttacatacgcgagaagcggctgagactttttaccatcttccacaaatgaaagtgttcctcctctggcctgcaataaacattgtaatcaagtctcttaacggcaatgagagaactttgattaatccttccttagagtatataccttcattacagtccaaatagctactggtttagggcctgacccatcaaacaagaggatagcaccatctttcccgcggaatatctgttcgttagattttaccaacctatcagattctggaagccatgttaaaactgcaaagtatggtgagtccacttcagtagcaatggctgcaaataaacaggaaaaatgaaatatacttagacaaccaaaaaaatcaagatttcatgatcaaaaagataaataataaaccttctatgtataatctatatgaccatgataagcagaacgtcatcagatcccagacagataagtgcggtgtggaaccatgggatgcagcaataaggaagcctcctccagtgaatgagagttccataattggctgaaacatttacatatcatttaagatttcaacaatgactgtaactaatgaacatggaattgcttttgtgtgttatacaagtcttaccgcatttgcctttccaactacatacaggagttcgttctttaacgggtgccagatcgtaataactgttttagccgcaagagccagacaagaaccatccccggaaaaaacagcagctgttattggcgttctcctgaaaaatattacatcaatttcatttgacatcacaacgactaagtaatgagagatgttaaaaggttcctaatcttttacttataagagccaactccatgacaaatccagtttgagtcctcaggtgtcagattcttgtcgctactgcaaacccaaatcttgacagacataaagtcatatcagtaacacaaaaggtcaaacgatattccaaggaaatgatccatttttcactactctgtaatcctaccttgaagtccccagcagaagatatactaacagccatggaacgggcggggttaagggcaatggctgtaattgcagcttccctgtgagaatacagaaggatcaaaagttacactcacgatgagaatcaaggagtttaaaagtttataagaacattgaagtaaaaacctgtgaggttgatttatgactgtcgataagctgaaagttttgctgtccggtacaaatacccaaaacttgagagaaactatgccttcactgaaattgcttgcagcaaatctggcctcagctgtagtcattactgagccattccgagagagagcaaccgcagtcacgagaacctattttccataattcttcaaattattacaaaacagaaagagagcggatcttttactagtaacaactatgtcatcttacagagaagaaacaaaatgtactaacccggacttgatcatcatcgtctggatgatgatcgcaaatttgaacctgcatatgttaggtttgttaaatagtaaaatcatacaactatcagatacaaaactcaataagccttttgggaagctaacctctgaaatgtcatggtcacttaaaaggttgtagagttgaacacgatgattcgctgtgcagaaagcagctataccggaagaacgatcaatggatacagttctggtgaggcatatatcccgcgttttgacgtagcatataaacccgtgacgctctggtgtcggaggctattacatagtaaagaacacaatatgcatgtgaagttaactccaacagaaacggtatacaatatgagcatgcttaaaccaacaataacaaggaaaaatttcggatgatagtaagaacgaaccttgattccagatatcgttctcaatatctccatggaaggcattttaagaagatgaatttgattatctgcacaaatcacctgaaaattcttgatcttagtagagttaatgaaacacttcatttgctttctacggttgttgtaaacggaaaaactcttacagaagaaagagttgaatctgaagagaagatgaaatacaacaagggagatccaatctttggcaaaagttgcttcttccctgtacctagctcccaaacaacaaaatcacctgcctttacccctaaaagagtcacaagcaaaggaaatatagcataagaactcaatatatatatatataagaaacatgaattccttatcaacacacagagatacagtcactatgatgaaaaaataactcagactcaccagaatacaaaagtgctccatctgaagagaaattaaggacggttacttcagcgctgtgccagttgaaagtagtgcaagattcagtatcatcttcagttttcactgaagtaaattctccaataccattatccttccaaattaacactcttcctgttacatcaccggctgctaatattctctgattgggatggaaagcaaaaacagtaatcaactctgtatgatgtaatgtcgtctcctttggcatgaggtgctctgatgccacattccatatatgtatactgcagttatgacagacgccgaaaaactctccagagggacttaaaacaataggttttggttcttccatctgcacattaacaaaaatgattatagaatcaaacatgaggctaatcgaaaaatggttaatccacaaatctgacctctttcaaagtgtctccactatgaagagggtcttgagtgagatcatatctccggatttgtccaaacaaatctttggacacacttgaatagtcctcaaccgaaacataagcaatcacggaatgtgacacttgagctggaatcatcacctacaaagtcccaacagacacttagaaaagggcaattgaaagttatcaaatttttgtttataagctgcaaagtatggaactttaacagaccagagagtgaattggaaggtgggtatcaaatatcttcaaaagcttcggcgcagagaactcccaaatccgaattttcccatcgagcgacgaagtccaacagtaactgacggtttcgtcggaagacggatcaacaatcacagacgtcacaggcgctgtatgatcctcgagtgaagtaatcttaaaaacacacacacgcatacgctaatgagagaagaagattagagggaaaccctaaaaggaaggatgctcgagtcgagagataaaacctttaagccagtggcgacgctgtaaacagagacggtgttggctgtgcataaaagaagcttctttgcgtctttcgaaaacgccggagcggaagtaatgttgtttcttccgccgcgaatcattttccttcaactcacggagattctgagaagacgcaaacatcttactcggcgattaaaaattagattttgcgacgtttttccgacgaaatattacaatgtacccagttttcgaggaaattatgtctgtgaccaaattgcgactagtacttagtactatatgcttgtacttgtagtttcactttcttcgtaacacctggctctgtgatgactcctctcattctcttcctccatgtttgggtttcgcttcttggactaggccttgaccttgttgggcctcggcctgtttgtttattttttctgttttatctttaataaaatgagacggcaagaaaataacttacataatttttcaagatcttaagtattttgtattttcttaatttatgtgaaaaaccctgtggataaacaaaatataatgtatagtccaataattggaaattttgtagttaacaaactcacttcgttttaacaaaatatggatggatgattcagaggcatagtatgcgacattaactgtattacaatggtcgacaatgactttgatttttgaggtcgtccaataaatactaaaatgtatgggtatgattttaggttgaccaataaacttcgatatccatcgttaattccatgaatgttttaaaaaactgaagttgcttctattatatataagttaatctattttataattttattttatgacagtttagctataatttcttttcaaaaacatttatgttcttaatttatcaatctatcactttcctcgtcaacatattactttttttataaatcttttgcatatgactagcttatcggaaaatcgttcatatagatagcgacataactaaaataaaattagaaagatgatattgttttgatatagtgtttgtttgtcttgtttcaaaagactatgcaatcaactagttgtgcgtcttgtggatctaacagttttaaaaatgtttagggtcaatagtttaatcagacttggaacggtagtttatacctttagatacaatattatctaaggttaatttatgtcatggaaaagttatatatagacaaaatgttcaaaaaatttaggatttattgtgaaaaaacgagaaatggtagatgattcatatacatatcaacttattccaaagtaaaaagtttaagaaataagaaaaataaaaattgtagcgtaacaaacattgacatatggctcgttggaaacaaactaaatgtaataattatagttgttcatcaaactattcgcatacaaccatcatgaacgatgactaaaaatgggagacaaagtgggacttttgtaaatcctacgtttaatgaattagaatgttgaattattttttcagatttttatacatatgaattgttgctttcagtgttctcttaaccaatgaaagtaaagatgctcaaaggctaaatataaagaagataaatttcatttctcttgattattctctttagggtttaagattacatcatgtttcctttcataggcattataatcttagtgacactagggttttcactgacacatgtcaggtctctattgatcctagacagtcaaaacagttttgtaaaaccactccttcttttccagcacagctccttgtttttgtcctttgatccaatcttgatgtacttttggttttgtcttcttttgcaggagatgaccgttggagctgagagttgtttagggtctgcgcttgggcctgttgtttattgggcttgaggtttgctgcattctcaatttggcccaatctcagaaccttcttgataatgtcatctgaagaatttacctttacagattcctctgcttcgtgtccgatcacagctctgatctggttcttctcttcaccaatccgagttgttgtctcaacacaagatgcattctctctaatagccccccgcaaactcggcgtaggtggaacatcgacgcctagtttgtaacgaagatcgcagaacggcttgatggggagagatttggtgaagatgtccgcgatctgttgatgaccaggtatgtgcttcacaatcagagctccaagtgctactctctctcgaacataatgatagtgtagctgaaagtgtttacttcttttgtggaaagctggattcgcagagagatacacggaggagagattgtcgcaatagatttctggagtgtcaagtagaggaatgcccaattccttgagaacagatcctaaccaggttacctccgaggcagtgtcagacagagttcgatattcagcttcggttgagcttttggagactgaatcttgcttttgtgaggaccatgagatgatatttgtaccaaggaaggtacagtaacctccaatggatcttcgtgagtctatgcaatttccataatcactatcacagtaagctctcaatctgcaatatgtgttcttattaaaggagatccccattgttatagttcccttgatgtacctcagaattcgtttgagcagattgaagtcagacactgttggagcatgcatcttctggcaaacaaagttaacagcaaactgtatatcaggtcttgttaaggtaagatattgaagtttacctgcaagacttctgaaatatgttggattgtcaaagatttcatcttgtgcaggtatagcagtcaactgaagtggcagatgagtaggcattggagcacaatcactcatcacagccacagcaagaagatcttctgcatacttctgttgggagagaaacattccttctgaatgaaactgcacttgaatccccaaaaagtaatgtagtcttcccatatctttcattctgaattcagtattcaagctgtctaatagctttgacatcgcatctgaactgtttcctgttattatcatgtcatcaacgtaaagcagcagcaggatgatactcttgttcttgatgtatacaaacaaggatggatccggcttgctacattcaaagccaaactcaatcagataagtgctaaatttatcaaaccaagcacgtgggaattgttttaatccgtagatagacttatgcaaaagacagacatgatctggctttgatttctctacaaaacctgcaggctgcatcatgtacactgtctctgtgagatcaccatggaggaaggcattcttcacatccatctgctttatgtcccactgcatgatggttgctaggtgaagaactgatctaactgtcggagttctcaccactaggctataagtttccaggtaatcaatgccttcttcttgattaaatccctttgcaaccagtctggctttcagcttgtcaagggacccatcagcattgagtttagttctgaaaacccacttgctgcctaatacatgcatatttggtgtatagggcaccaaggaccaggttttagcttcagagcaattgtccatttcttcgtgcattgcatcagtccagccttcatcttttaaagcagctgtcactgttttaggttccgggtaagatactctttgagtgtgtaaaccatacctcggatttggttttctgattccatcttttaatcttgttgtcatagggtgggtagactgagatggctgagctgtttggacctgagatgactcactgttggaagatgcactctgagaagattgattctgagtagactgttctgtagttgatggcagcggttgaatgataggagagtcttctgaggtagtgatttgctgagtagaagaagaagagctgttgcctataggaacatgatcaaagcctgccgtacacccagtactctcctcttctctcaacaaaaccctaccagaaggtactgaattttgatcattgtgatcttgattttctgttgaagtaccagtctgattctgttcttgtactgagcaaccctttaaccaagcagacatcaatggtgtaacatttgcaggttgcaagtgaatgtaagccatagatgaaaaaggaaagagtgactcatcaaagatgacatgacggctgatatacacacgccctgtggttggaagtaagcatctgtagcccttatacttgtcattgtatcctaggaacacacacttgagtgatctagggtcgaactttgtggttgcataatctcttagggtaggatagcaggcacacccaaagacacgtagtgatgtgtaatttggaggctttcccattagaacttcatagggactgcatttcttctccaatactgaacttggtagtagattgataagaaaatttgcagtgtagaacgcctcaacccaatacttctgtggcatactactttggaatatcattgagagtcctaattcaataatgtgtctgtgttttctttctgctaaaccgttttgttgaggtgtgtgtggacatgacatcagttgttgaatgccatgtttttgtagatgagctatgaagtctttgcttataaactcacccccaccatcacattgaaaggttccaattttctattgaaactgattctcaaccattgcttgaaacacaggaaatatcaaagcaaagtctgatttcaacttgaggggataaaaccagctgaagcgtgagtaattgtcaatgagaacagcatagtatcgaaaaccttgtactgacattattggtgaaggaccccaaagatcacaatgtattctttgcaaaggtctagaggctacaaacgaagaagcagaaaaaggtaacttaagactcttcccaagctgacaggcttcacataccatcttggtgtttttgttgactgaaatagctttagttgttgacaggtgctgaagaatctgagcattaggatgaccgagtcttctatgccaaacagcatcacttgcagcttgctgtcttgaggaatagtagacttcaagaggtgagtgattcttcaacatgtacaaccccttattgtgatgccccattgttaacaacctctttgttgccttatcagtaatacgcacagtgtcacagtcaaattcaacacaacagggatagtctgatgtgagcttagaaacagatatcaaggatttattaatatcaggacaaactagaacatcagttaaaggaagattacctgaggttgactgaagactagttgatccagtgtgagttatggggagaaactcaccattaccaaccattactgcatcagatcctgagtaaggctgagactgctgaagcctattagttgagtttgtgacatgagctgttgcagccgaatcagtaaaccaatcatgaccagcagtctctgtaacatctgtaatccttaacgcagctagagcacttggcagttcctcgtgttggtagctgttgttgaagcggtgccagcatttcagagcaggatgtccaggtttgccacatatctgacatattattctgtcacctcctgaagaacctgatgagatttgctggtgaaagcctcttccttttgttgtaaaatttaatctccctttgttgttgtttccaggttttccatttccacgaccttggctactatagtaatgggaaccattagttgtggtaatgttgaatgccaagtggggagacacctcatttccagcattgtaaccagccattctatcagcaaaaccagtcaacctaggaatcacagactcgaaagtaggtggaggatgtaagtccatagatccttctatagaagtcttgattggttcataatctcttcctaggtcatgtaatgcagcaaaaatcttcattttctgactaaccggattaccaatagatgcaagttgttcacagattctcttgatctctctaacatagtcttccatagatttatctaacttttctatggtttgcagttttctttgcagcttaaagagacgggatgaagataccttattgaagtgctgagctaaagctgtccaaacctcttgtgctgtgatggtatgaacaacctctctgagaatatcttctgatagagatcccagaagccatgctcgaacaacttgatcagatctctgccatgcttgatagtcaggattttggacttctgtggtgagaccattgatctgtgtgagagtgttgacagctggaggaggcttgatagcaccattgacaaaccctagaaggttttgtccagagagaaaggactcaaactgagtcttccagagaagatagtttctctcagtaagttgaaccgtaacgtagttggaaatgtgaatgacaggatgcgagtagagctggatttgagaatccatggctctgataccatgaaagtaaagatgctcaaaggctaaatatgaagaagataagtttcatttctcttgattattctccttagggtttaaggttacatcatgtttccttttataggcattacaatcttagtgacactagggttttcactgacacatgtcaggtctctattgatcctagacagtcaaaacggttttgtaaaaccactccttcttttccagcacagctccttgtttttgtcctttgatccaatcttgatgtgcttttggttttgtcttcttttgcagtagatgaccgttggagctgagagttgtttagggtctgcgcttgggcctgttgtttattgggcttgaggtttgctgcattctcaatttggcccaatctcagaaccttcttgataatgtcatctgaagagtttacctttacagcttcctctgcttcgtgtccgatcacagctctgatctggttcttctcttcaccaatccgagctgttgtctcaacacaagatgcattctctctaataaccaactcatccagtttatttcttcttaatgttttctttaattacggattttgcacaatatataccttatcactgatgtgtttgtaacaacttacaacagtccgaagaagaagaaaaaagaatctcaattaggcaggattcaaacgttcttagctccctacagttttcaaataacaatatacattcgatatggcgggagcgtaatggaaggaagcatgatgagcagctgattcctgcaactaaactcgtcaattggatggaaaagcaaatttaaaataaactctcggtcattcgaaaggaaagcgacatacggtattactattactcttaaacatggtttacgcccttaacaaattcatgcatcttcaaattcaggaaaaaaagaagcaacttttgcattttgatgacctaccctttattttttcttgaatttaatttaatattatattcagaaaataaaaagactcaaaatgtaacatattaatgtatgagctgcttaacaaaacaaaaacaaattatgaggagctaatagtaaaaagttttataattatggacccttatatggggcactcgagatacccattgaaagctttggaaaacgaccgatccgagacagacaaaagttgtgtactctgttgtttgattttgttgccaacacattttaaatactgggaactaagaatcacagatttttaaactggaaacattatccaaatatgttcaaattctgaactgatatgtttagaaattaatttattaataatttgtaccaaaggatattcactatatgtaagaaaatgagtgactcctatattcatgattaaaaaatccaaagcataaatacactgatgttacatctacatgggatatgtgattagtgtattagaacaagtaaacatataatctaatgatttcaataggtacggttcttctaatattgttactatgaagaaatgaacttggccctagctagacctaaaaaacaaatgtccctagagtgcgtcgcgacttggttaaagcaaaatcaagctgatcttctgtaaagacataaaccacctcatacaagtacctctgataaaataaaaaatcaatgacaacatagttcattcaaagatgaaaaattggattcgaaagtggatagattgcaccaatgttatcacagttgataatcagagattttcttatgtgatgccaattttaccgggaagataaaaaatccattgtatcccgaatctgtttatttgataattcgcatccgaggaagcatgaacggccactggatgtgagagagatctaattccacacaagtagcacaaaattattttggaggccaaccattaatgctcttcttttattgatggattggttaggataattttgttgatagcaaggtagttatcatatatttttggattaaaggatctagaactcataaagagtttccatgaagttgaagtgcgagagaactcgattccatgaaaatattgtcaattatctagatccttaattataaaggagaaacgagcatatgggatccataaatcatgaacttgttgaaaaaaatatccttgataacgttatcatcgacataaaccaaaagataaagcgtgacataaactctaaagagaatgaaagatatatatctgctacagagttgagaaaatccttgagaacaagcgtatgatgccgataaccaaaatataatattaaataaattttgcattttacaaaagatatatactatatatatatttttcttaatagttactctataaaagatgttatatcaattttgtattttagatattaatttttttttaaacgacattaattatattattggatttttttttgtcatatgctgattagatatgcagatattttgatttctatatcaataaaaaggaacaaagaaatccaactaaaaattcaactaaatgcaagttgcaggaaaaagatagaaaatgaaatgaaatagtatgaaaataaattggaaaattgggtccaaaattaattgaaacaaagacaaagtgtgttttgtggtggcgatggtatggtcccattgggatgatgattcctctcttgtagacaaaccttagacaaaaaccattatggtaatttatcttcatttagcaatgaccaaaaacaaatcttgtgtcttccttgtcccgcgttttttgtcatcggtttgcgtaagtgtaactcaaaaccctaattttggagacaatgaacgccatttttcaaatgtatgttgtatttagttgcatgggtacatcagacgtcccaagtctctatattttcaaagatagatagtaacactacttgtttccattaaaaaaaaaaaccacaaattgttgacagaaagaaaaactaaccaaattattctatgttactacaatcatttaactatacaatttctagataaacaaaattgataataattgttataatcaaaactgatttagttggaatttggaaacactagctaactattagatgtaaaaatgaattgatacaacggtttatctaaaccggtaaattgtaattggttcactgtctaaaccggtaaatatatgcatatataagatgtaaaaccttttgtctttttctacgttctttattttttttagatgctgtttagccaaattaataatgtcaaagttcataaacacacatccaaattaaatgcaataagaaataaatgaattaactcatatctttgtattatattaggtctcaatgtctcatcatatctcatatgcgatttctaatatgtctcatcgaaatgaatattttgaaccattcatttcgacagaatctcactatatatatgattggtttcaaaattagtcaatttttcgggttctccattgggttgttttgtgaaaattaatcagaaattagtagatgaattttgatttcttatatatcactttaatatatcaaagtagcaaatttacgctaggaaaaagaaacaaaagagtaattgcatgttattagctaaccatcacgtttcattcgttaatttgacaggctgatgttgcaaaacgcttggataatattggttatactactatagtcttgaagataagacaatctattagaacgaaatgacaaaagtagaatcctaaggtgattacaactgtggggagcatgaaagggacaccaaatagggaaatccctattgattagctttctcaaccaaaagtacacctatttgagtgtgacttatacctgattatgtaatcaactattatatgttttaattttgctgttttcattgatttagttggaaaaaattgccatataacaaaattcacaatttgcttcacttcaaaccattaaaaagtttttaatctcactttgagtgtgattaatatttgatataacgagtccgggtggtaacactaaacaatacaagattttaatgggtagaatatggtacgaattataaaaaaatcgtattaaaaagtaatacaaaatagcgtataaaacacttgagaatatcatttttggtaatgcttttatgattggtaatacaatcaaagtggtgcatcccatatcacagcgggattaccacttaccaatcaaacctttcatgtagactgtagacaatgttatattagctttgtgtttacttgtttccccttataccacttttgtatattcttcatcatttcaatcttgttttattaaagcaatatcaactcatttatgaacttataataaactaatacttgacaaagtaattattatatttggagtacaaaaatacttgaaaaaagtgttggatcatttttataagttttgaaaagtattaataaactaattaaaacaagcggcgtcgaatttgcaatgatcggaagacgatggacaacaattcacatggcgctttcccttttgcagtcacgaaaatacaatctaataaaagatttttccaattattggtattattgtctctcttttttttagatttgaaaatccaagctgtcaaaacaaagaaaaaaaaacaggtgctaacttttgaaatgtagttttaattgttttttttattaaacttttcaaatgtagtttgatcttgataacccaacatttatctaattcgttgaaataaatgcacttagttttgttgtcttttgagcaatatatatagtgcagtaatatgttttagtattgtgttaccagatgtgttcaacagtttctaattattattattttatcgtcaagtttataatgcttattatttattggcaaaagaatatatgttatttgttattattatccgttatagtactgtactattttttatgtaattcatgcattgtattatatcatttataggtctgaaataatacgatatgtaaggttattggtgaacataatatatctacatcaatcttgtacaaaagaggagttcccttaaaatgaaattccatgaaaatgtaaaagttatctacacaccacatgtcatgctttgacatccaataaaaatggtaaatgcttttaattctattaaataacatatcatacttttcaatgttttcatcatttgagaaacaatcatcagctttaaaattattaatatcccgagttcgttccaatgcctatgactacgaaaaagagagtaataataaaaggaaaagaaaaatggttttattagatggggtcactgatgataaatacataagctattaataatatattgtaaaaagagaaatacaaaacctattcgatccatataatattggtagaaaataataaataaattccacgatatagtaggaaaaagttcaaggcaatcatgctaaatgctgagttaaatagacagacagtaaaggaggggttggcaaaaaaaatgtagatagtaaaatgatgagaaacttaaagaaagtatctttcaattttcttatagttttttattttcttctaaaagtaccataattttagaaaattaccaaacatactgaaagttgggtaaagaggcataattttatatttcttgacgccgagaaatttgtaataaaaaaagttttcagatgatatagttaacaagagttgggagaatgatttttctcgtgccaacccgtataagatagtgaccacctcttagcatacagttatctagcatcactttatattatggtcgttacgctttgttgatctactgtttttcttggcaaaagaatcactaagacaatcccgatagcgaaatgaagtctaaagaggtatttctccaaataactaaattaattgaaaaaattatggtttttgaaaataccacaaatttacatattaactgaaataatattttttctaaaacatcacaaatttatatataatgttttgaaattatctcccttatttatttttttaatctaatgttacattatattcaaagaaaacatagcgtttgtacaattagtgcatcggagtttgaatataatagaaagagttagagagagataaaatttagatcgaaattgaattaggaacgacattggagccaaacttggaagcaagcctcatatcgactgtcctttaaccgtttgatgattgtgatcttattcctaatttgtgcatcaatccacttgattaactagccatgatacttgggtatttcgtcgtgccgtcggccatttctttcatgccaaatggtgtaggcagtgacttagaaaatgtatttgatcaagaagccttctattcggttttggtggtgagacgaggcatggaggaggatctgtgaccaggagctggtgtagtgtgctttgtaaactcctttcccgagcgcattccacacctctgaagcataagggcaagcgaaaaagagatggtcccaagtttctatgcagttggtgcacataacgcagtctcccgaggctcttctgttccacttaattatacgatctcctgtggctaagcgattgtgggctgcgagctataaacaaaaaggagtacttcggcttaacatgggtgaaccaaactgctttgtgccaagctaccacatttgatgtaggtcggataagattccaggtatcttccttattatacactcaacaaaattattatatcattatcgactattatcactttagcttttcctttcagctgtaaatttttctaataaacattataatatacacttttgtgctttctgctaaatttgattacacgaaatttctcaggtggtgtgacaaaaaagccaatgatttcatttctcaaggtaatcccctaaaccttaaaaaaattacatctgagaaaagaaaataaactatttttattacaacaaccactcgtatatatgtttctctataacagatcctgctacacactccacaatcgaaactttcagacaaagaactgcttttttttccttcaatcaaactcttttctcacgaaacttcacatcgatcctggtcgaaccaattgacgaaattaccatcgttaagctctctctaccgtcgccggcgccacaccggcatctttctggcgaacttgacggaggctgaattcaaactgtacaacgtaatttccccggagaccatcaattcccgatttcgactaaaacccagaatttgtttttttcccggcgaaccggatacgaattctccggctaaccggagatgaagttcatggaattagggtttcgacctgacacattctacactgtggaatcagtaaggtagaagacagaaccaatcgtctctctcaaaatttcgaatcctctgttttcaatcaatctcagatcttttgactctgttttgttttaaaattcccaggtctgtgtcttctgatttattgaatgatcttgtaatccaagtcaaatccacaaaataccttcttcacaaggtttttttttcttgttttgtgttgtttcttataacatttcatgttttgattctgatttttttgtgtttcttggcaatgcaatttacagtttccgatgttatccaaatgcttacgtttaaagaacttagtctcttcacaagaaacagaaacctctcaagaacagcaagtcattcaacttgttgattttcccggtgaaacagaagcttttgagctttgtgctaagttctgttacggcatcacaatcactctctgtgctcacaatgtagtcgcggtacgttgcgcagcagagtatctagggatgacggaagaagtggagctcggagagacggagaatcttgttcagagacttgaacttttcttgactacttgtgtgttcaagagttggagagattcttatgttactcttcagactacaaaggttttgcctttatggtctgaagatcttgggatcacaaaccgatgcatcgaggcgattgctaacggtgtaactgtatcccccggagaggatttttcgacacaattggagacgggtttgttgagaaaccgatcaaggataagaagagatgaaatcttgtgtaatggtggaggaggaagtaaggcagagagtttgaggtggtggggtgaagatttagctgaattgggtttagatctttaccggagaacaatggtggcgataaaatcatcacaccggaagatatctccgcggttaatcggaaatgctcttaggatatatgcatctaaatggctaccaagcatccaagaaagctctgcggattcaaatcttgttttggaatcggttatttcacttctaccagaggaaaaatcctctgttccttgcagtttcttgcttcagctactgaaaatggctaatgttatgaacgtttcgcattcttcgaagatggaactcgcgataaaagccgggaatcaactggataaggcaaccgttagcgagctgttgatacccttatcggataagtctggtatgttatacgatgtggatgttgtgaagatgatggtgaagcagtttttgtcacatattagtcctgagataaggccaacaagaacaagaacagaacatagaaggtctcgttctgaagaaaacatcaatttggaagagatacaggaggttagaggatctttgtctacttcttcttctcctcctccattgttgagtaaagtagcaaagcttgttgattcttatcttcaagaaattgctagagatgtgaacttaacagtgtcgaagtttgttgaattggctgaaacaataccggacacttcaaggatttgtcacgacgatttatacaacgcgattgatgtctatcttcaggtaaaagcaaacaagaagctagtatacattttaagagaaacatctaacactctcgttacgtattgcaggtacataagaagattgaaaagtgtgagagaaagaggttgtgcagaatcttggactgcaagaaactatcagtagaggcaagcaagaaagctgcacaaaacgagctgcttccattgagagtgatcgtgcaaatcctcttcgttgagcaagcacgggccacactagctacaacaagaaacaatatcaccactaatgaaacagcagttttgaagagaagctttacaacgagaagagaggaaggaggacaagaagaagaagaaagagatgaaactaaaccaagtggagggtttcttcagagcacaccttcgaggtttatggcgttgtgtgcgatcccgagacagcctaaaaagctgctgtgcaagttgttgtcgatcagtaggagtttaagtcaacgaatttaagaagaattgatggtatgagtattatgatttttttcctactggtttcttgtggcccaagtcaaattgtctgcgtcgtccttgtgaagcttatttggttctaaaaattcatttgtcacatgacattgtataacccaacaataaaggaaatatatataatctttctttgatagattttgtggagtttagtgtggtggttcaatgataaattgattctttgtaatttcatcttctgtttattgtagttatttcttgatttgttccagtcaaataataaaccaaaactgattggaaaaccaaacgataatccagttatacaaaaaaaaaaaaaaaaaaaaaccctggaaccaacaaaataataatcgattgaatttaaaaaaaaaaacttggtcgatcggaacatctagaatttcttatgacttgaatcatgcttagggattttggaaggcagcaacgcaattcaaaaaaatacgatttgttcaacttaagttttgaaaagctattttcagcagatgaaaccaaaatcggaatcgtcaatggtatttgataagcggctcataagtttggataacaatttcaactgttttaagaaaatctaataccctaattgtttgataacagattttgacaccttaattgtttaataaccttcgcttacccaaatttctcttgtaacacatttattatattaagtaatggtttggtttttaaattaattaattaagtccatggggctatgtcaatgaattgtggaagcccaatatttacattctattattaatatatttgcttggggcatcaaacatatttatataactctgttaaagagtaaatctgtaatatatgccccaaaatgtttttccataatttgatgccccaagcaaatgtttcttttttcataagtgaggcacggccttattggttacgtggttaatattatagaacaagtcctttaaaatgtaaacaataaggtctatttatcttaataacaaaaaagtgtctatttagtatttatcttatccaacattctacaacaatattgttacactaactaacgccgtagcctccggctcgttcttcttcttgaatttgaaccaaatggccagaaggaacatgagggtggtcaagagggcagcagtcagttccaggagttttgatagtactgttggtcccaaaaggcttcctctagtttcatttttctttcttgtgcttggttaattatttgtgttttcacaaagctttggtttt

SEQ ID NO: 1050 - DNA, 82646 bp, Arabidopsis thaliana
gatcttttaatctctaggaatatatctttgtctgcttatctatctctttccatcactaccggcaatgttgactctacaaaaaaaaataattgtgatattttgaaaaaaacgaagttgatacttgagagttgagatgaaactgcttcttcttctgtttattgttttgtcatttcttgatatgtccagtcaaaagtaaaccaaaactgattagaaaaccgaatcaacaataaatcagttatcaaaaaagaaagtaaacaacaaggtctattactattggagtttgagtctatgatcaaatcggctaaaaggaaaagaaaaaacagtgagaagaaatgaagaaaagaaaagaagcaaaagctaagcaaaagctaagcaaaaactaagcaaaatgagaagaattcttatgattaatataagcgttatattgcgtattatttttaacttcgtatgatcaatccatattttctggagatgcagggtaaaattgtaaaaaattagcgagttgaaagatttttatggttaggaacttgacgaaccaaaattttaagaaaaaattctaaaccctgatatttctagtatcagttgaaccaaaacaaatagatactatataatatgcaatagagttttgtcctaattcgtgagaaaacgtctagaggaaaaaaaaaaacatatttttatgttacaaaatctacgcaacgcaatggtaaacaaggagtgataagttcacaagaaagtcactccaaatttttgtatacaaaagtgtagattacaagataatttagcagaagtcagatttggtgataaaagtacgagtctcccggtttcttatctccaccatcgctagttgctcctccaaatccaatggtatgggtcactccagaaacaagattagtaaccatggaggttccccaatagacccacccgttttcatctccatgtcgctcagcctcaacgccaatcctctgttgctgctctgccatgatatcaccccatctcttcctcataaactctctaacaacttcagctccttgagtagccacttcttgagatgggatctcaagcgggttttggtccaagttcagtttctctagcttcctcagcctataaaatgagtctggtatagcttggatttggttgttgcttagatcaagctccctcaggttagttagatcagtgatagtgtcagggacacccatcaagttgttgaaattgctgcttaggtttagaacctcaagtttcgttagtctcccgatcgagtttggtatcccgtggatctcgttcatgtgtgcgtcaagatactttagattatacatttcacttatcgaacctggaaagtaacggagtttgttcagctggatcgataatctctcgaggttttgtaatccgtatccaatgtttgtaggtaatgaagtcaagttgttgtagcttgcatctaactcaactagtgacctaatttatgaaaatcattgaaacctcaggacaaaagtagaaacaatatacagaacatttacaagaatagacaagaacatgaacctgcaatgcgcgatgctctcagggagtgcggttagattgttcgcattcacattaaggattctaaggttaagcaacatccctatagagtcaggaagagattccaaagaatttgaagatacatcgagctcttctagcttcttgagtttcgagattgcatccggtataaactgtaaaatgtttaaattacaaaatcagtttcacacattacatgaagcatttaaaaaacaatgataattccttgcatcacaagaagcatcaaaaacagatacagttacttgtagtccaagtttctaacaaaactatatcagtcaagtgtctttttcgatataattcatgagattctgtaagctatgttcgagattaatattatcgagctatcattagagatagttcaaaattttgggatcttagtattaccgtcaagtcattgccagagagattcaagtatactaagccaactactttccaaaaagcttcagggataagcttaagttcttggctggagagatcaatcctctcaacggttccgccggattccgcctccttgagcaccgcaagaaccttctcgttcacttcttcaccgcttctcaacatcgattccacctccgtagaataaaccctagaaagctcctcctctgtatccttcaacttcttctcgtaactatcgtgcacttcatccaaccgcacaaccccggcataaatctccgactccttcgctgcttcctccggcgagagcgaatccataatttgagcgatcttgaatcgagcagaggaaaccgctaagggatcaggtcgagagccgagagagttgaagacgaaaagcgtctgtgtgatcgttgtggggatggattgagtcaacatagacatgatttctggattggagagaagaggaaaagaaggaaggagagtttcttgcgcggccatagacggcggcgcgtggagattggagtcatgttgatgaaggacgtaagagagtaaagggaatttgtcgagatcgtgatccatggtttttgtgattattagtcaaaggtaattggagattaagagaggttttagtaaaggtatgttcatggttgaacaagtcagaaacattgaagttgatgttgccatgtttgtgagcacaagtctagttgggttgaaaagtgtcgaagttgaccgaggaaattaataagattccaatgataaagtcaatcgagccatcttttttgaataatcgaatcaaagaccaatcctgtccagttaatgtaataggatatatggcattaacaacgagattatgatatcttataagttaggggaattgtccgcataggaaaaaaacaaccgttaatcgtttgaacattgatctaaaagacttggtccgtgaaaccaatgtggtttttgagctacattcttcaattacacttgatcgtttctaatatttttgggttcaactcggaagcacttctatcttacatcatatgtgtttcatattttctttgctaaaacttcatatgcaagtacttctttgaaaaatgtaatggttttaataattgcaacggttggacgaataaatccatttgttgatttgaccgctttttatttaccattcatgtatagtcctataatgtgtttagtttattccacccattcatatctttgtgtatgtttccaaagtcaaatctccggttgttcgacccacatcttccggaactacaaataaagaagattaattcagctcatgttgctagtatgaccctcttgcttttaccatcagatttcagtttagttgtgaattgaacaagctaacaaaatccaaacgtaagtcaatgaactatagaatcataatcccatctttccaaattaccaagagaaagaaaaagaaaaaaacttaaagatggctatcacgtcattgttagatcattaagataagcgaccaatcctaagagatgcttgatggcctaaaatgcctactttcgtcgtgtttataccgcctaattcctcttatgaattgccaatagtccctaactccctactaatacgtccaccacctaatttatgagcttaaaatatccgaaaattcagaactcacgtcgctttttaaggtcattaaagtttccattttccacagtccaagacctcaattttgttattggatataaacttgtacttggtgtcttctcctcccccacccaaactctctataaattcatttccgatagtcttaaaaacttgtattattatttgtacttctccacaccagctgtatttcgggacccgttttaaattaaaatcgaatcttatcatcatcactatcacttcttctccttcttcttttatccccaacattcttaatccatttcttattttttttgtcttcctcttctatttctccaagcttatcccgtttcgaatttcgtctaccataaaagttaatcagaaaagtatatatagtgatattcaaaaaactggaccacataccataaacgagaaaaatcgatcacgccattgctcgaattttacaaggatagattaaattacctgcaaacgacaaaaaaaatgattatggaagttagctcaacagaaattgtcaaactgaatttaacctaaactaacacacaaacggtgataataacacgcaagcaaaacagaacaatgtaacagaaaaaaagataaggtagggcaaacacgtggtggaccggtccggttaaacgttgacggggaaaatgcaacggacatagacggagttacacgatatcaacggaaaaaaaaaggaattaaagtcactcacccaattcatcatcatcaccaacaaacagagaataaaaagcttttgggatgatttcattaatggcgatggttagatcacgtacacccttctattataatctctcgctcttttttacattagaaaaaaaaaacgaagattctttttttttttaatcgtatattcgaagattcttcacgttattgccagtgattgccgttgtgaacaaggtagatatttctggaattacggtgaacataacaaccataacacggattcttcgtaaccgtcgttattctcggtggagacggaggtagcggtggttttgatagagacggagatctaggacttgatgaagtagaggaagttgtggaagatgatgacgtggtggttgatgacggtaacgctaacggaggaggagattttttagatccggcggcggattttggtggatttaagaagactctgattttcatcggagatgaagaggaaacgagatcgtactcttcgattagattcactagatcttcatcggaagtaattgaaacgagcgcgtcgagatcttccgtcggaagctgacatcggatcgttacggttatagatccgccgacgccgccgcacatctccgccatcttcgacgctaactctgttaaaacgcaccacacgtgtggccttaatttctctttccacaaaaccgatttcgtttttttttttgtgaaattcaaaattgacaatgagatcgagagcgtgaaactaaccggaaaatgagacggagcgaggaacggcgaggacgcgagtgtgaccaccgttgtaacggagtttaccgtcgggataacgaggtaggattttgccgccatagctacagagaaatttgattgttgagttcgtcggagatgtaaccatatctggagaagtgagagagagttgaagaaggaaggagaagaatctagaaggttggtttgttctgtgcaagccaagtgacgagtaacgtttagagcgtatttatagcggttcatggaattgagtaaacaaagagagattgtgaagggtaggatcgtcatttggaggaactattcagatacgtaagctatagttttgtactgttcttatttatttttattttactttaatgaaaacacccgtaaaagataataagatttaatgataagtttttttttaaaaaagctttttgtatggagtactatgaatgaatactatatattagcattttttatggtgcacatttcaatttttttatttatataattggcgtatttctttttaaaaatctttgatagacttattattattataagattattattattattattataagatacactagaaacgagtttttctctgcaattttatgtatctcatgacaaatctctttctcgtcctaaattgagcctccctcttgctttacctcgtcctgcaacgaacctttctcttgctcaacctcgtgcagcaaccaacttttcttctccacgtcctccatggaggaacactccccttaacaactcttcggtctgcattattttgcttttggatggctaatcaacgaatccatatataaccaagttgcattgtctctggtggtaaactcaattctctacctcagtagagtttcgattttttgtgagtgttcgagccttggtaataacccgcttgatggcgcttgtgaataatactagtagtaattttgaagtaagaaaatatatagtagtagtgcctttttttttaattgttaacaacatcaaatatataaacttgaaccttaatgaaatgataatacgtcgattacattagcaactattagtttttaatcatgatattatctgttagctcttagtagtgattagaaaaagattattttttgttgatatttttagatcgataagattccatccataaataatttttattatacgcgctaatacaatttaatgcaatcaaattttggaagaaaaaacggaatcaaataaatttaaccacttaataaaatgcacattttaaatcaagtattatgtttttttcataactttcaagtattatggttttgaatgatgaacaaaattaaagtattatattttgtatagctttcatttctatcaatcataaaagttttattaaaagtgttacaaatatttttactctcaactttattatacagctttcgcatacaacttttttatacagttttgcactattttcaaaaaacttataactccaactaaccgctaataattttgtacagctttgtgttaccaatcggatcatgtatcttagattaaatgtcactttaactagtggacattgttcccaactgttgtgaacaaatttgacaataataataaagagaactgtgatgtaaaagaaaagaagagaataacgggacccattatcacgtgggccacacatggagatggtccataggactttgcatggcccgtaatgcaatgacgcattcaaggcattttgtgatagcccataaattgttttttattttcgtcagccgataaagttttaaacaccaaataaataattttgttttgaaacttaagactttaattaagaacgtaaataaattttcgaaaatacttataattatgttaaaaagaaaaattaagttgttataatgaaacagtgtttaaatttttctatagataatgctatgctaatcttcaactagcaagagatatataaagataatattaaaggtggataataaaagaaaagagataaacataaaagtgaaagaacaaattcaaggttacatcaacattatccaatgaagtcatgtatacacagacgcatcaaaaaaatatgaaaaatgtaaaacaatcgaatattcttttggaaatatgcctttgtatgtcctcctatatatgtatgtatatatattatatatatagatgaaagaattggaaatgataatgtttttttttttcacactgaaggaaatgataaatgattatctttgtgtatacgtgtgtatcagtatctcccgatctctacgtccaattattttaaatggtcctactctttgcaacgaaattataaacatatatatatataccaatatctttagtttaatatattatatagaaattttataaattgtaagatatcgtgtggtatagtgtataccaatgaattatcaccaattaattaacgaggttaatgttgataagaatataaaaagtaagttggtcataaacataagaagaaaaaaaagaaaaaaaagtaagaaaatgcaattgtgtggagtcttcttgagtaattattttatttaattaaccataaaacgtagaattaaaaataaaatgggtattggtatttttacataaaaaaattgtattattttagtaaaccataatattttagtgttaatctagttatttttctctaaatttgggttaaactaggtaaatttcagtaaaacctaaacaattttttttttgacatgttctttattaaattcaacttgaaattacaaatatattaatgaacttataagtgaaagctctataatccatataccaataagtataacaaaattatagaaaaataaaattacacattgcctttttctcggtaaaccttacaaatctgtttttttttttaattgttttcgtcttcagtctaatttgatattttctgactataaatttcttttttatgaaactccaatacttttcttaaaaatcaaaaggttgtgatctatcgattatattgcaaactatacaatcattgacatctcatgtgttaggtgatggcattggtttttgttgtaaatatctcccataatagatctataatctcaattcccttgttttcttcaatgatcagagttgagaagtccttataattacttcatataactattctggcgggttatcttccatgagtagaaagaatatgaaaacccgaatgtgaaaatgtcacacacatttcgggacacaagcccctaaaactttcaatcttcaatgtgattggccattgatcgtagaatcataaaatccacgtcagagataacagatctgtgactgatgtagaagaaacatcttaccacgactgttgttgcatttggcaaattgttttataaaaaaaaactacaaagaaggaaatgtatttatttacaatttaacttttgttttgccaatttctccatagttcaaagtgtgcttctcacgtcactaatatcttgaacatgcaacgataacattaaaattataataatagtctttgcctttttctttatgcaacgaatacgaatagataattgcagtatttttaattcacaagctcgcgtgacaaagcttcaaagcaataccgatacattatacaaaatcttttttttattcgtacgaacgacttgaaatagttctgtgatatatttagtgttaattgtcaaaccgcttaaaacgacaataaactctttttaaaaaatatatatatacactacaaatagggtttaaacacatcttgatttcatccaaatttcaaaaaataagaacacacagacatacatcttaatttattttctttagctactcaaaggttaaaacctaatatattttatcagaatgatcatgttacagtagtataataaataatggggagattttaaagcatcaaatctagaaaaattattattttccaaatcttatataaaaattaaatattttgttatttaaaacgtctagaattactaataataattcgaaaatataataaaaagcacgatatttgacatataatcaggttacctaaacatgaatctgacatatgttcttaaattaataaaactatccaaaatgtcaaatgtaactcattaaaaaaaattaatgtagattttgatggaaatttaagttaatatatttaaaagttttatcaatgataataattatttatttgcgtgatttcttacaaaagttgactaatctttttatcaaattataacgctaactaataaaaatttaatgaaaattttggttttcaatatcaaagtattgataatttagtgaaacacacaataattaaaacattgaaaaacctttaaaaaatactaactaaatgatgtaactaatattcctcacttttctcaagtttttctcaaattttccttgagttatcctcaatttttcatttggcaaatgactaaatgatatgggggaaaaaaaacaattccataactttctctcaaaaattcctcaagttaagcagttagactcaatcatgtccaaacaaatattatatattttaataatatataattcaaaatgatgttattctttcaagttttccaaattattcattaatggtctggtttaatttggtttgttagttttgagaagaaaatcgatactatttctttaatttcatttttaaaggcacaagaaaatagacatattaaatacgtccaacatttatgatgagatggcttattatcctcttctatgggagaaggcgagaagcaatgggcactttgcgtgtctgccgcagaaataacaactcgtccatttcctctaattcataccatacgtgtcgatttgtccttttgtcaaatcctctccaattaatttgcaaaaattaatatgtttattttaaaaaattaaaaataaataataaatacattacatttattaacagatagataagacaataaaaacaattaattatatattttgcgactagaatctaattttacaatttttgaataataaatataaatgtttactcgattaggataatttatagtttgtttctatttgtattttcattctaaaatttactattattaatattttttgctatagtaacagtcatagatttgacaacttttgtaattaattaaattattacaaatattttaaatttatagtcagagcttttacaattaaatttttacagcaaaaaacttatagtaaaaatctataatcatcatcttaattaatagacttcacagttcattagacatagttatcatcaatttcaaaataaacaatcctaaaaaaataataaataaataaaataaaccattttaaggctggagttgttaaaaccaattaataataactttttactgtataatcattattcataagttgaaaattcttactaacttttgttacctagaatatccatccattgacaaaaaaaaaaaagtattacccaaatactgtatccaatttttaaaacatatcatatgcctagtcatacaaagtattggtggattgagaacgtctaaatgtgggtcgcattgggacccaaaaaggtgattaggataacgagagaggccattgagttgatcaagttggatcgactttgcaaaatacaaggcaagtgtccatttggcttagcacgactgacacgtgtatcctacgaggcattccctaatttaggtgtcttttattggtccatactattttggtaaaaatgtaatcccaacttcttttgtattccggttatgacttatgtgtgtgggaatctttggatcagttttagataaaagtacatattcttgttggctgtttgcttctgccgtttagaaaaaaaaagaaaaaaaggagaaggatcactttttttttcttttgagaaggatcaattttataaatttaggatatggtaaaaaatatgaataagaagaaggtgacttttgacaattaaaactacactgatataacagaagataacgaacattggtgatgatgataaggtatatacgtagttctataactaatattttaatgcacaaaatgaacattattaaaataaatattggaatctagcaagaaagcattactaatgtaaaatatgaatttatgatacattatatttaaggcattttgtatcgtatgagaaacattcaacggttccactatgacccggtgcattgccaaggattaagcccatactatttttttgttttttttgtgggtagtcccatccaaccaatatatttctttttttgttatgaattagttacagattatttacgtaacaagttgagggaaattgtcactactgtgttgaattgagtagtaaatttgttgtaagacttcacaaattttagtataataaaagtaatgttgaaaatttcataataaactttggagaatgatgcataactgacaagtatttttgtgggttttcttattaagaaggttcgttagggaacagcccacctcgaacattgcccattactagttgggtcatgagatttctgaagagtggttgtagagaaatttctcttgtatgaggactaagtcatatgactataaatgggcttacaaaaaactgcgttagcccaaatttgactatttatagttcgtagcataccagattaaaattctacaaattaagcttataccatgcaagatttttgatgttcccatcccaatcacttgtttacatttttttttatcaaccaaaaatttattaaaattaactccgtaattgattgtataatcgaaatggaaagcgtttacaaaagtaacttaaaaacaaaaatctagaggatctagttcagtaatccgccttagaatttcatagttgacgaatatatgttaaaattggctaacaattatatagttcatgtttgttattaattttgttttgtaagtttgggttgataaatataggcgatcacagttgtggttgaaaaagaccacatataaatagttggggttgattttgggcgttttcccgtaacttagattatctctaatttaatttttataaatacaattttgacaaaaaaacaaaaattacaaatgcaatatgaatgatctataatgcttttacgttccctatttatagaggcgttggaacataaagcaaaaccctagtcctaatcgttaaaggaaataataaaccgtcaatgcaacctaaaacacctaatcgaagctgtaacttaatgggcaagtaaacaccaaaacatggcccattaaggatcgatgctacgctgcatcaatttgtagtgtgtttgatggtttttatttttattagaaacttacaccaaaactgaaaaagtcatatgtataacacaaaagatgaacaaaatagtcatattcattttattttacttttaaaggaaagaaaaaagaaagaattggccctttttctaaattgtcacgttatggtgtagggcctaacttcctaagaaattaaatgtagaaaatcctgaaaaatgattacgtttattgggtagaagagacagagagacgtggacgtagttggtcggagaatgacgagagaacgtgaacgtaccgaccaaacttaaatatgtgatctctatgaattataattttgaactcttacttgctccaaaccgaccaagccataacaacctttcaattttcaaaaagactaaatatggccctttaaatatgatcatatatatatatatgaggaaatgagagagacattatcttataatctgtagcaaactagcaatgaaaaattacactgtaacaaatattgaagtgttttactaagaaaaaaaaaaaaaatatatatatatatatatataagagtgtatttgtaactatgtggtatacatgcatggcatggagaaaaatccgttcttctatggcaagattaaatatagcaacataatttgatatcgtatgtaatcatattccgtatgttcagggattcgaatctcgtaattatcgttggtgattaatatctcacatatctttgtatttaattgatgagatacatctccttgtatataaaagttgtgtaatcgcgctctatgatgatatatataaagaaatatttcttcatctttcctgtcttcttcctttgttcctttacaacatgatgtttatttcatacgtgataagtgatttaagtaaaactattctgtgtttgaatctagtccagttgggaggattttttcttgatttttattttttttttgtcaacagcttgaattaaattagcttaaaaaggtattaactaaagctgttgacaaaaaaaaaaataaagtcctccaaactggactagattgtgaccactacaataatttgtcataattttgatgttcgctaattgcaaattaacagttacttttaaaggtttcaaaatcatttgcattcatcctaccaaaaagaacaaagtcgtttgaattcaagactgtatagtagataaagatctcaaaattagtttgaattttagtgtggactatatgtgtaaacaggggtaggtccaatccaacatatcaccagagttcagtatttgagacttgtaatttcattgtctgaaacaaatatgaagtaataagacaaaacataattggctggtatgcatgcacccaaataaatatcagccatgtgccactgatgaacttcttatatttcagaatagctctcagtcaataagtgtaagtgtactccatagttttttaccgaaccaaatgttttattttactatcatttttttaccttataatgcaaatgttttgtccactaatatcaagaaaaccaaaattagaagaatttaagtataaggttagagataactgatttcaaggtttcttatagatgttaggtttgcatgtgttggtttttgtgtttatctaagaatttatcgacatcaatctctctctttttcttttaatgccgtcaatgggaagacatatggattagtgtgtggcaggatatggaaaagatttatatagaaagaacaaaaaggaaggtaggaacaattaagtaatggtgcggtgtacgaatggtccaacgttgcacatggtaattgcatagatcgtatatatgaactgcattattgtctttgattctttgttcgtggtttggtaagcctagagttagctagttttgttagttctaatctatcttagcaaactttacgtccaaactatcaaaaatcaagctggtttattagaagaacaaaaaaatgatcaatgtattagaccaccatccacaattccacatgcatgcgtcgcttttaatccaactttttagttttaaacattcaatcgcttgtattgttttgggttggttttttggtattttttatgtttacccgaacgattaaaaattttggatctacgatttacgataactgatactttggttctggcatagtccctaataaattaggctcatatgtgtttggaagagtttcttaattttttttgtttttagcagaactattgattttttgtttttagcagaactcttgatcatgaatcatgttatactgttatggcctgtggggttggttatagaggtagatggttcgtatactgtccagacgtttcacgaactttattatccattaaccccacaaagattttagcgaatctattcccatccatctattgctattcacgttttgaaaccaaacaaaatgaaatccgaatgacgaaaatctccctacagattcccgccgaaatgttggaagaagactcacaaagaaggaaataataatgctgtgattggaacgatatagaaatgaaacgcatacattgcaacccaaagtaatttgaaccttagctcatgagtcatgacttgtgtttgtaaagttatttgcgaattgctagtattatttttacacatggaagtcgaacccctcctaagtgtaacactcgatgatttttcaacgcttaatatacaattttagcctggacataaatcatgtgtaaatatgtactactgtagtgtgttgatataaaatataaaaaacggaaatgaaaaccaaaaatatcaatcacaatgtttattattcattaaaatttccatgtctcgtaaattatgatctaaattagttagggctctttaagtaaaataaacaataacaaaaaaattcattttcataattcacattccctggttttctcaattatagttattaaaccgtacaatacaattgcacaaaagccttccagagatattacaactccaacaacaaacccaaagacacataaatgatcaatcaatagacaaagattcatctaaaaatgatccaacggccagaaacccattacgatgcaaattaaaaaagcaaatcacgaaaaattcatcagattaacaacgttgaatttgacgtcttcagtaatcggtggtaggcaattgctcgtgggcattttcatcgatgaagacaaagtcgtagataattccggcgagtccaccaccaataagaggaccagcccagtaaacccagtggttggtccacgtccagcttacgacggctggtccgaaagcaacggctgggttcatggaagctccgctgaaagctccaccggcgaggatgttagctccaacgatgaaacctatggcgattggtgcgattgttccgagactaccgttcttggggtcaacggctgtggcgtagacggtgtagacgagcccgaaggtcatcacgatctcgaagacgagagcgtttaatgatccgactccggcagagagaccgaacgctggaattggctgaaaaaacaatcatttgcaaaaaggtttatttacttgccggagaagttaggtcaaacgggttattttagttggaatattcaattgaatttagttttaaaccaaaccacaaaatagagaaacagagaatcgaaaatactactaaaatctaattaggtgtaagtgacgttacctcgccaccggtggcaaagctaaggaggaaacaagcggcgacggagccaagaagctgagcaatccagtagagaataccacggaggagagtgatgttaccaccgagtaagacaccgaaggtaacggcagggttaacgtggccaccggaaatgttagcgccaacagagacagcgacaaagagaccgaaagcatgagctaaggcagcggcgacgaggccggaaggagtggttgctccattgtcagtgatcttgttgaaagcaattccggagcctgagccggcgaagacgaagatcaaagtcgagataaactcagcgagcgccgccctaagtgcgttggggtgatagacctcttcttggactccaccaatggcgatgtttctggtcggcatgatcggagaaagatttaacggctgaggttaaaagctttttgattagagagagtgaagtgattggtttgtttttcttatgtgttgtacgtatatatatagccgagtgttttcttcttcttgatagttatagataaaatccatttctttgtcacataaacaaattattttgcatttttttaagggttaatttactgaatgaccaaatttgacatccttattaagagaatgaccttctcccagaaaagttgggtatataacgtttttttaccatgcgaaatatccgatatagcctctacggatgggcggcaaaaccatattcccgacagcagacttgtagatgtaggggagctagagattgtagggcaatgattacaacgtatcaaaaaaaaaaagcatgcattacttatgcagttactactaaataaagcatgaactatttatgagtgtagatctcaatttagagctttcattactacaactttctaagtttgtactgaacgtttcataaaatacatgcaatttacaactgcagcagcatgtactatgaaaggatttatttcattttttttttaaaaaaataatcattaaaaaacaaaaaaattagtattgaaatggagtatataccacgatattgggctggtaactttttcgggtgagtattgtactggattgattattcaacaaggtgaatgggcttttaccttgaatctatgaccagcagaagtactacgatttggtaaacagcacaagtactacggaaacaacatgtgatgttttaaaatcacaataatcatatcggagcaacttggaaagaaaacataagagaaaattattagaaaaattcccggatgtgacaataaaaagcgcgagcaaagagagatggagatacgtatcagacgcatttaatgcggcgtcagaggatatacagcttccaacgtaatatattgttgtatgtgtaaacccttttctttagtgtagcactttttaacacaaggtttgtgtgcttatgctatacgctacaaaatggcaggtcgataagttgacacgttggtcaatgacgtcaagattacgaataggcaagtgggggcagaagatatactgaatctatacctcggttcacggaaatgtgtaaagcaaagactaagtaaatcacatggttattttgacgataacatgcaatacaaataaagaacacttaacacttcgatttgacattggttaattgtgtaaagcaaggtttgtgtgcttatgctatacgctacagaatggcaggtcgttaagttgacacgttggtcaatgacgtcaagattacgaataggcaagtgggggcagaagatatactacctcggttcacgaaaatgtgtaaagcaaagactaagtaaatcacctggttattttgacgataacatgcaatacaaataaagaacacttaacacttcgatttgacattggttaattgtgtaaagcaaggtttgtgtgcttatgctatacgctacagaatggcaggtcgttaagttgacacgttggtcaatgacgtcaagattacgaataggcaagtgggggcagaagatatactacctcggttcacgaaaatgtgtaaagcaaagactaagtaaatcacctggttattttgacgataacatgcaatacaaataaagaacgcttaccacttcgatttgacattcgtgaattgtcgcttcacgcctccctcgggtgttgggagggaaatcataccgttttgaaattcgcgtggctgcaaatggttaagcaactgttactagaaatatctttagttactgtagccctaaaaaacaaagttaaccttttctataaaagaagaaagatggcaagatatcatctctcacacctctacttcttcctataaagcacacactacgtatccaacaacatcgaagaactcgatcatttctgttttggtatgcaattaatgaatgttcttttggtcgggtttgttgctatttttaaaaaactcatggttgatttatctctatttaatgcaactctattaatgtgtaggtaccgatggtggttataaccgaaataaccgacgatcgttatgtcaggacggtgagtggctcctgggcaatcggagctgatggaacatggttattcatatccaatcacaataatgcagtgaggaggttgagcattggggaaggggagaagttagcatctgtgcgccagcttgttagagaagcgtacggacaggaatacgttgaaggcccactacacctgacttaccaatggcctgattggatggacatggaaactacctttggtgggcgcacgaagccagtaagcataacttcagaggagacaatgggagtgtttctagctatgcgttttgagttggaggacttgagtttgtttgtctccaagcaaacggtggatgatggttccgaagatggtggaacaagtcagacttcaagttacggatttgcagataaaggcaaatcacctttatacgtcaacgctgaacgatcacctaactacgagtccgttgtgtggaaaaggcttatggatgacgaggcggtcctccgctggatgcgttcaacggaaacagaaggtcaaaacgttggagactcttctaccaacgtacaacaacaccctgtgagaccagctgttgaggcagcttccccgatgttaacgactgaaagtatggacacagcgactgaagatggagatcaggtaaaatattctgcgtttattaaattcagccactcgaatataccattacagtactaagacatctatttacgcaggaagaagactcaactgttgttgaggcagatttacttaaaaatctggggttaccgtcaattaatttagccactgaatcttacgactctctcagtgaaggggaagcgtacaacgacgaaaacgactatcccgggggcgagacaattaaggagtgcaatttttttgggccttccgcaactaacttggtggaacctctaggtgtacacttggatctcgcggtacctctgcatgaggctcttgaagacatgtgccttaacttcgcatctttcaacagggatgcagcgccaaccctagacgaacaaggggaagaaggtaccaattacatagcatgttgtttttaagaacaacacatattgcaagagtgttctaataataaccgtcatatagagtaacatgttattcgtataaataccatgcaataaaaatttaatttcgctgaattcctgattagtcgtacgaatacaatcttaatatccacatcatatttgtttagtttaaataacaaattgtatttaatatcatgtaatataatgatatgcttacaaaccaacacatggtttcaatttacgttgatatccctgagatatccctaatcaaaatatagagtaacatgctttaatattgaacatcatgggatatagatattatgttggtcaaagtgttactatttagtcatacaaatacatgctttctacattcacaacatgtgtacagtgtaaataacacacgaactttattgttgtgtaggccgcgtcggaatggaattagcaattcgggatgtggtctacgaaggtgatgaactgtttgttggccgggtattcaaaaataaacaggattgcaatgtcaaattagcagttcacgcacttaatagacggttccatttccgtcgtgatcgttcctgcaagaaactaatgactttaacctgcatttctgaaacatgcccttggcgtgtatacatcgtcaagctggaggattctgacaattaccaaattcgaagtgctaatctcgagcacacttgcactgtagaagaaaggagtaattaccacagagcagcaacaacgcgggtcataggcagcataattcagtctaaatatgcgggcaacagtcgggggccaagggctattgaccttcaacgcatcctattgaccgattactcagttagaatttcctattggaaggcatggaaatcaagagaaattgcgatggatagtgcacaaggatcagctgcgaatagtttcactctgttgccagcctacctacatgtgctgcgcgaggctaatccaggttcaattgttgatctaaagacagaggttgatggaaagggtaatcaccggtttaagtacatgttcttagcattcgccgcatcgattcaaggtttctcttgcatgaaacgagtcattgttattgacggtgcccacctgaaaggcaaatacggtggatgcctcctaaccgccagcggccaagacgctaatttccaggtttttcccatagcgtttggcgtggtcgatagcgaaaacgatgacgcatgggaatggtttttccgtgttttgagcaccgctataccggatggagataacctgaccttcgtctcagacagacattcctccatttataccggtcttcgaagggtaatccttaaaattgataattttaaatgttacatgttatatacagcatatggctcttatttattttagaacacatgctatctaccaatatgccctgctatatacgtataacacatgttaacatgcaggtctacccaaaggctaagcacggggcatgtattgttcatctgcaacgaaacatagcgacctcatataagaagaaacacttgctgttccacgtgtcaagagctgcgagggctttccggatctgtgaatttcatacatatttcaatgaggtgataagactagatccggcttgcgcacgatacttggaatctgttggtttttgccattggacacgcgcttatttccttggggaaagatacaacgtcatgactagcaatgtggcggagtctttgaacgcagtcttgaaagaagcccgtgaactaccaatcatttccttgttagagttcattcggaccacattaatttcctggtttgctatgaggcgtgaggcagctagaaccgaagcatcgcctctaccaccaaagatgagagaagttgttcatcgtaactttgaaaaatcagtccgatttgcggttcatcgccttgacaggtacgattacgagataagggaggaaggcgcaagtgtctaccacgtgaagcttatggaacgcacatgctcctgtagagcatttgatttgcttcacttgccttgcccccacgcaatagcggctgcagtggctgaaggcgttccaatacaaggactgatggcgccggaatattctgttgaaagctggagaatgtcttacctaggtaccataaaacctgtacccgaggttggtgacgttttcgctttacctgaaccaatagcctctctccgcctcttcccgccagccacgcgccgtccatcgggacggccgaaaaagaaaagaattacttcaaggggggaattcacggtaaacgttatacatttggaatttactgtaacacccttagtgttttaaattcctaacaattgctcaatcttcatctcagtgtccccagcgacaagtaacacgttgttctcgttgcacaggcgccggccataatcgcgccacgtgcaaaatgcccatataaaggtacaatgttattttataccgtatcatgctatagatagaaacaacgttcatacaatttttataatatcatctgcagggggtgttgtgtctcgcgtcttcttcatgagttatatgttgtgttatataagcaaggggaagtccatcacatatggatattatgtaaaaggaagggtcacttggtataatgtacatattagcaattagatgtggcaattagggtggcaactaaaagctacgttgagaatgcaatcaagggaccccaattccagtaagtgccgtatagaagaccaccttctacggacaaaggataatgttctgttttttggcttttgtgtagaaaaaaactttatgttcccccttttgtaaacagactcatgatattaagtaaagacgcgagtgtttaattattaatacgtggtgtaatgtaaaattcagatccacagacaaggggttaaatgaggaaatatatgaaacaaatataacgaatagatatagcaccattactggcaaattaaagtccataaaaatgttcagccatcatgaactgacattttatgtcaaggattccaacaagatgaaatcattccaaccataaatcaaaataagatgctattcgagaaaaccacatgtgatgtttagcaattgcgtgaggtaaaaccgggcaccgagagttgaacagttccacataggattccttatgccacttcgactattttctcagaacccaataagtgcttctgcaccacacatttcaccccccaactacgccacataaatgagtgaatatatacactaacaatattggactatatatacatattggctatcaacatctccgtcaataataaaacgtccttcggcctacttacacatgcttgcaagggtagaaatgagacagtatcgtcagaatccagtactcatgcgggtgggtgggctgttcagaaaacaatttgacgacgcattggaggcaaataacccggaagcacattatcttgaagggctaaggtatgcttgttgggagaaagatttagtcatggcaaaaaaacacatttttaaagctgtaaacaaggtagatgaggcgctgtttgttatggctatgttgtctatttgtggtggtgagaaggagctaggtgaatttttcactgaacaactgtttgccctaccttgggccgaagtattagctatgggtgattctttattttcagctcttgaacgaatggctgtgcgccatggtacagcttacaagcttacatggaatggggcccatcctccatgtgtatcaatccacaacatatataatagatgcgaagagtgctacattttcttttgttcaaaagaattctgtcggcgatgttagatggtacaagctgcacccaacgtggaaatctcgtaaccagaagggaagcatcctttaaaataatatgctgttattttatattaacccgcgtagcatctataaatcacattctgtttgtaaaaagtacatgttttatgtctaatgtgttagtcgttatgataatggtgtcaaataacgatattacattaaaatggcgtgatatgtacctatattacatgttttatattgactttttgatcatgttaatctgtctaaggtgtataatccaaaatatttttaaacgggtcattattattgcaaagtttacaaccgggtaagtcctaaatatcaactaagccacagttagaatgcatctatatttaaacgaatcatgaggtaaatataaaacgcacggtacatattagaattgcagtgacatatgtttactacacaaaacaggtgcatagaaagaacattaggtactcaactgttaggtgtctaatatattacagagtcaggtaatagaaggtaaacacactagaacatttgggtcagacaatcccattagctaattcaaaaccggcaatgaaatatttgttagcagcagtcaccacatcagcatgcttcacttctttgcaagcctgaatcccaccattggcatgggcttcaattaaacgagctgccatgactccagaatattttacagaatctgcctgtggaatatcattttctctgtgaaccgcaagagatttcaaacgaagtttcttttccccagccattttaatagcaaatcgaaatagatatggtaacatttcagcaaggggcaaaagcactttcttcaattttgtttcacgccataatcctgtatagcagtcgaggacgctaatgatccttgcactcatatcaacacaaagccctacccaatgctgtaaatcaatgagaaatggaatgtagaccacagcagaacctgtaggggtacattcaagtaggtcgtgatcaaacccatacattcccttatcagcagacttgacgaattttgggtaatgcttggataattcaaccacaaatgttgaatcaatgaatgaaacggcttggtgcttttcaatgatattatttgcacaccagttaatccttatgctattaatgaagatgtccataacctgtaaatagagtagaacgcatattaggtgtttaaggcaaaccctatgtttatagagcactatgtaatcttttttacccacatgatatttatcataccattttgggtacaacggtcttgaactcaacaatctcacgcaactcaatggcggaaagtgttcgacaagccccaaaatcaatgtccctaataacagccatatgcataagttttaagtaatatgagtcaaacaaaataaaatagcataaggttggaattaatacccagacatgccatataagcgatttatcttgttcttacggctaacatcatgcccaaaagtaacagacctaccgcttgtggaagaggctattacggattcatgttggagctgtgagcaacgtaaacgtgattagaaaatcagatgttatcttaataatcaggaaattagagtttgcataatcctaaacattctgtgttaaacttaatggcatgtaatttgttctaaaaccttgatgtttgtacgggcaaaacacttacaatatgacaaaactttttaaatatttttttgttatattaggtaaaaccctgaaccatgctgaaaatacatgatgtatcgcaaaatataaccgtgtgcatattaaaccagtgttttgtttttaaaaaccatgaataagtaaacttgacctaccacaaaactacgaaatccatatttaacaatatcttaaccattcatgcacccaaactagacctaacacaaaactatgaaatccatatttaacactagctaaacgcatttatgcaaccttgccatcagggtccacaatatcatttgttggggctggcagggacggttcagatatcatcggcatttggcttaaattggcctaaaataagaaacagttgcatgtaattagtttgttagtggtaacgagagtaaaaaataatgaattatatgatctaacattatcggctgtagcaggtgggtcagcaagtccttctccatctttatctgaagcaccgtcatcaaccattggcccgggggttgacttacattgggcagtcaaatcagactctatctgcaaggcaaacaacagacgttagagccaatacacggaaaaaaaaaaacataaaaactatatgagaaggtttgaactcactatgcatgggatggtgtactgcaactctggctgacctacattgtatgcaacaccatccatgtcaacaagcaccacatatggatcagggaggctgggctcagattcaaagaactcattgacgtctgtgggaggaggaagcaaacactgagtatgactcgctgcagctggaataggtttatcagggctagtttggatatcatcaaggccctctccacctatcccatcaccgggggcatcaaccaagatattatcttgatgggatacagttttatcaccagaaacagacttttccgcaaacatatcgtctaattctttagccggcagagtggaagagccaatgtcatgaatcccatctctagctgactcatcctcagtggtatcagtcaccacccctccaactttgttgatattgacagcttcaggggatacatgtttatcagcagaaacagacttttcagctgaactgttgtctactgctggcgtcaggatggtggctgctgttgggccattgttgcctctcttccgtttctgtttgttatgaaaacaatacttgaattaggaagaactctcataaaatacagaatatttacaaaactgttaaacgtataccagagaactacgcaatccaggcctagtcggtggggataagcgacctatgggggttgtagtctgtgtaggttctgcgtcgttaatatcatgcatcacttcacctaagacttgatcaataaatccagaaccactgttctccttcgactgggctaccctgccattatccaaaacaacaagggaggatcccttcttcccacctaatccctcacccacatctcttgacttaggaccactgtgacgcttattcttcctgccatggctttccctcaacaagctgctcaatctagcctctgaatcagctatagccttcaacatacgcgactccatacgcttgtctttcatgtcaatgtaatttttaatcgaatctggtatgtgaacctgccctttagttttacggggtttagaagagccaggcaaggaagcatcaggttgtatggtatcctcatcaacacaatcataagtgctacatacatcactgttgtcattcctttcatcgggtagcgaatcagggacaacaccacctgaaaacatggaccccttgaatatgtgctcctcttttattagttgcaacatgtagtcaacagatagatcttcttcgtcctcgacccaacctgacttgaaagcgtcaccagtcggtgttccactccaaatagaaacgactttaatctgaaaaacaaagagttagactttagccacatgatattatgttttattacatgtactaaaagtatttatactgttactaacagtgaaatatagattatgtacccatgtgctccttaaaaacaacatgttatttcatcatataaccagatgttgtaatgcataccgccatacgtgacttactaaggtaacagggtatggttattaaaaagaactgtgatcatatttaaaaccatgcagtttttgcataaatcatgatataaataataaatagtaaatcagcacatattaaaaaaaaacttaaccacatgctacacatttacagccatgttatgattattctaaagaaactgtgatcagatttaaaaccatacaatttatacagaaatcatgatataaataacaaatagtaaatcaacacatattaaaaacctaagccacatgctacacgtttacacagaatgatatgaatctataattgtatgtttttgataggaaaagaagaggttttcatgataaaaacgagcatatgaaaattaatttacgagagcagagatgcattgctcacctgagactgccggtcgactttccaaacaagatccaacttcaaactccataagcgctcaatttccgtatctgtttcctccatttctgagtcactatcttcaacggcttcagggaattgcaattctctgattcgaggaacactttgcagtagcaaaagttggagtgcgtgtgggaaaccttgaacggtgatagatttccgcataagtttatcagctccccttgcagtaacactcttcaacgtcattaggaatgacatagtcccccaaggaaaatttagaaacatgtctaaattttctgccatgtccgcatggaccggagagattttacttctacccgaggttgggcataaaacgccatcaatcaaggccagcacagcgtaacgtaaacgaattccttgatcttgaaccactcgcttcttcagcctgccaacaacccactcaacagatacatcactgcggtcaaataggctgtaccaatacttgccaggcgccaattttcgtttccctttcctctctttcatacgaggcggtttgtcgcagttcaaaccggtaacattttgaaactcagaaatggaaaaccgaacaggggatccagagaaaattacccaaatttcttgtttcttcctaacaacaagctgcctcgttagcaaaaagtgaataagcttcccagaatacgcggcgctttcggagaaatcaaataatttcccaaactgagattcccggagaattttcatgtcctccgcatctaacgcgttagcgatgtcatctatcaaagacagttcactgtaggactgcactctctcaccgttgggctcggatccagacctaaacaatcgacggggtaaagagttgttcatcatctacaagtcgaacccttttctgcacaaaatagaagtttataaatcagaaacagtatgtacctaagatttcagttaatcggaatatagattggagaaataaagaagttgatggcgatcgagaacgttgaatagcttaaaccgcatatatttgtgaaattacctgtagcccgatggaattgattgcctaactgcgagattgaatctaaagaaacgatatgtatgagaaacaatatagatttgaaatagatattcggagagtttgcagaatctatgggtagagaacggaagacgtttcctctcggaaaaccagcaaatgaagcggcgctaggtttttttttggagctcctgatatttcaaaaaattcgataataaatcgatttctcgaaattaaaatctatatcgtttgcgtccacatacagcattgctcttaccaaggttttcaaaattcaaatttctgcaatcatacgcctatacacctatatgtcccctaaccaagaacacagttatagggggttgcgggtaatttcagatacgtctccgacagacactatagactcatagttagtttctatattattattgatttcatggtcatctagtgcatataccctttttttaatcggctttattaaggtcctgaatgaatgctcattttttatttagtttttgaatttagattttagtttatagattttagattttagttttagatttttgttattatatttttgtttaaaaaactccaaaattttggtttttgatttttgagaaaaataatgttgattgagtaaaaactagattttttaaattttaggagaactaaaaaactaaaatcatgaaaagaaaattacaacaaaatagtttttataaattgtagggaaaccaaaattttaaaatcttgattagtatgaaaacaagtttttgaaaaacaaaaaccaaaaactcttacaaaatctacaaaacattcaaggcctaaattgttttttatttggagaacaccaatattacattcgttgcaatttgaattgtaacaaaaaaagattttggactttacagatatttgaaagtaatttttgggaaatgttaacatactaaatatatatgttgaattgtttatcatagttacatgtttaccagttgtagtagattgccaattctaaaatggtcggatatatcttttgtatagtatacagtaccaattatgtaatagatgaaagggattgtatttttgttccttataccagttttattctctttgatactgataagaaaactaaataatgttgctatctattacatcattgatcatatcctatgaacttgtccaaaaaaaaagaaaaaaagaaagatcatatcctatgaaccaaatgatcattttaaattaattttaattagatttctattaataaaaaataaaaagaaaaaaaaaatatggatatgactttagaaatagtcatttatgttcccagttttcacaataatggatccgattggtaaaacatgactgtacaaactttttagttgttagttgaaactatgagttttttcgaaatactgtaaagctgtaaaaaaatgaagtgtacgagaatactgtacaataaaatggagagtaaaattttttgtaatgattttaataaagtttttgtaaatgataactttcaaaactgtaaactgtataaattgtaacggtttgataatgggttaccattcaaagccaataatttaaaatggattagtggtccattaattgcataatttaaatcaaagatgcaaaatgttagttttttaattcgtaatctttaacggtaatatatgtactatctcaatggttactatttctaaaaacaatagtttgaaaaaacaagaataatggaaaaggaattcaaaataaataaataactacatgtcacaattcagaccattataacatcgaaccagaccaatatacaaaccggtttggttcaaaccgcgacgattagggacagttaatgaaggagatgccacatgatgtaggatccactttgatcacgtgtcggtcgagataaggtcagtgaatggattacagctggatttgtcactgaccaatcacaagtgccagcctgtccttaccccttccacttttatgaccttaacctttccttaatttcccccatgtttttttttctggtctatttttgttttctatctaatttttgtagatttgttttttcttaattaagagattcctaagtttaaaatttatactgattcctaaaaatccataaaatatttttactattattattagtgatcaaccattattggcattgcagtagaatacctcgatttttggtgtttcataaaaaaaaaactatatatgtctttcttttgtttctctcaatcttcttatatataaaataatgtttttgaataagtataagttttaagaaatatagtttggtttaattagtcatggtagattataaattcgattgtgattataagttatgtgtcatctactcatcttggtatcactctttgataatgataaccttatttgtcaccaaatggttttttttttcggctatcatctaaccagtaattattattttttttaattattttttaaaaaacaaggaagtttggcattagataaatattgttttgaaaccaaaacattattattgaacattgtcaaatcaaactaattattaaacaagaacgcaataatgtggacgggcctgtggagctttttctccattatcgccggcctgacaccatggccggtggggattttggacctctcaagttctcagacattgacattgatataatttatcaaatcaaatatagtgaaattcgaatatagcctttaaagttgtttacaccatgcataaaatatggtgatcgttttcttttattataaaaaatatggtgatcttagaactgacattaacgttgcggaaaatatggtttgtgttgaacgaactgtttgtgtgaaagcgaacgagattaaaatgttgtagataatactatcaaatattaaaatttttgataatttttttgatatttaagtacgttcctttattgaatgttttcgagctaagaaagctatcgctttgtaccccatcatagttgttgtgtaataaaaacaaactacagtacatatttttctcttgatgatttgaaaaatatcttccaataatggtatagtatatgtgttttttttttaaatgtgaattttgatgtagtaaacactattcacttttctgaatctcaacgatactgtaatgtggatcctaaaatggaacatcaattattttaatttaccaaaaatatatattgtcatatttctatatgctttattagttacaaggctccataaattattgtcatgttgcaacgactacatcattttaatatatgaactggactaataattgtgtcagcagcttaagttcggtttatatattagctaaggcattgttagaaagaaataaacataggtacacagagacaaacaaaaaacttgactgaatgatcagaaaaagaattttgattaatttagaccgcttaacgccaaaaataatgctgaccacttcgttacaaaattgagatgaagaatatgcttttaggatatgaggctaacaaaacttatgctttcattatgcatcataactaacatattagttccaaatataaaaaataatgagagcatttaatcattttatgaacttctaatacgttcttaagctaataaacaagaaaacaaaaggtcacggtcacgtatacgtgcaccacgtgtaagtgtacatttttggctctttaaagtttagatagggcttagaaaaactagagttgtttattttatgggtatgttggcaaagtagtcacttttctgaacttaattatgaaatagggcaggttactatttataattagggaaacaggtaactcacttttcctatctaatagaagagcgtgtaatagcttgtgtggtagggtagtgtgggagttttgaaaattaccaaaggatccttttggttgaggagagaaagaaagagaaagagatatagcgtgtgagaaagagatgtgggtcaggtttttctttttaattttctttttctttctttattatatttctttccctcaaagtttagtaattcaaatgctcatttgtaaattttatttttctaaaatgatttatataaataaaaatctatgtttctttctctatcatttgatatgcattttgtttaatgatttttaaattttatattactgagcactatacgaataatatctacacagatatagactgctgtacagatataaactgctgtacagatataaatcactgtacagaagaatatttattcggaaacttatacttcttaaaaaaattttagatataaattactgtatatatagagactaatgtatatatatgattactgtactcatatagaccactatacagatataaaccactgtacagattgatgcatctgttaaacgaaatcataatttactattaaacaaacaagtatcttctgtacagatgcatcatttgtacagtggtctatatctgtacaatggtttatatttgtacactagtttatatctgtacaatagtctatatttttgtacagtgccctataatataaaatttaaaaatattaaacaaaatgcatatcaaatgatagagaataaaacataaattttatttatatgattaattttagaaaaataaaatttattaaaaagaattttaattattaaactttgtgggaatatggaataaagaaagaaaaagatatttttttaaaaatcataactcactaaggccccacacatttctctcccacccaaaactaccgaagaatatggatccaaacacagtggcatgttggtaaatataattgtttctatagagtataatagatgttttgattagtggggtaagaggagagtgactaattcaccaattatgaatagtgaactgcctattttgtcaattatgttttaaaaagtgactagttcacaacttattccttattttatttatatagaagacacgagaaatgctgtagaagtggtcttgtcttatgggttattaacttattaaaaatatcactcactttttttgtccaacacaaaagtttatatatgtgatttccttatcaatcattgattcgagaaatttcaacaaatctctataatacagtacatgttgagtctactttataagatgttaaattatttctaatgaatataataatgtagaagacggtttttgttttggaaccaaagttacttttcttcatatgaattaaatgtttaaattattttatgattgtttcttgtagtttgatgggtgtgtgttttcaccgtaattgtttggtttagaaatcttaaaatatgtcagtattatgcaattacatctaaaacatattgaaacgatcgatatacacatgtggaggtgcaaatgattgttagtgaaatatttgttctatactattattaaggttatataatgttatgttctaacgatactagaaatttatattttacattttatcacaactcaaatttaaattttatttaacgtatattgttgacgaagaataatattccctatttttttcttttatcatttatattttagaacatattgaaacaatatcatatatatcatgctatatatatgattattggtgataaaaaaaatacttactatcattcagattgttatgttccaacagtactagaaatttatattaaaactgctatatattttattacgagttggatttaaatttgattaaatatattttgctgacgtaaaatactaatttgtttcctttttttatcaaatatattttagatgaaattaaaggaaggcgaaaaaaataatagtaatcaccaaacagataacgttttatacttctatgtatacgtggtggacagcaaatgatattagaatactaagaatgacttggtatatggatccataatagtaggatcgacaataataggtacaataaacagcattagtccaaaagaaatggttagtatgtaattgtcacttaatattaatgtcacgataacggcgatgactagtctatattattattctttcatttttaatatgcatatttgttattttatataatgatcaatcaaattgtaatagcggatgattagataaattaaacagaacaaatatagtttatgggtaacgaacagatcaaataaaacaaacgatccagaacaaccatctccaaccatatatcacattctttttttcatttttgtgtagtgacgggtaaatatcatcttattatgactaccgtgtgagaacaaagatagtattgataaatgaaaattggaatgatccaaaagtataactttagatatatttataataaaaataggtgagcttaaaatcattcatatgaatttgagtaaatatattttgatattgatatcattcatgaatagcggcatctaaaacaaaaccaatcaaagagaattgttttttttttttttttttggtttctagaactagaacgagcatgcatgtaagtggaactaaatacaactaaaatatgaatatcctcgagaatagatttttcgaaagaaaaaaaaacttcgaaattgtccagttttgcaagtttaccatccaggaccaaaaactacaaaataatcatataatacgcaatatatgattattaaaataatacgcaatatagtcttttatatatatattttaaagtttttacgatcacatacatatatttttaaaaattctgaagatataatggaactcctcgtttcaagagctttaatttatcaaaaaatttaaatttgacaataacgaaaaagagttatattgtgaattgttttaaactttataagattgttttgcagtttttggacacggaaaataaaattccaaaaatgaatgagtttttttttttgcataaaaccctcaaaaatacgattgaaagtactaatttatacaataaagaaaagaaaaaaaaacatttgtattgatgaaaatattctaacaacataaaaccttatattaaaaaataaataaaaagaaaagaataaaaatcaactcttgtaattcattctgaggtacaatggagttttttttttgttttttttttctttcacatggagttaaaagtcgaattaatcaaaaccatcaacgttaaatagttttgattaaaatcacctaatttgtatatttggatactttattgaaaaggtttctgcattggcttaatggcttatatagaaataaaatgtcactttaacacttgtataggacatcagattattggtcttctgattcgttttgatgaagatacatcatcgtctcagggcttgcttgtaatacatcagacctctttaattgtcaaagactgaaaatacaaacagagattacagaaagaagtgatgatatatctgataaactggtcacagaaatgcgaaaacttgagatcaaacttcatttatacatgcaatgcatgagagtgaataactctaccttgtggacttcattttaatggaagctgaatcattcaaagcttgtagctgttttcttcacggaacggcaaaagaacttggtttgacatttctactaactgatcacagaatttcgagaaacagagacaacttatacctcaacagctacactgattccaatttaggaatacaacttgacaatgatatgaaacacagtggaaacagcttaatacttcacctaaaatctgtaatttcattccaaactaaggtagtgcagttttgagtctaactaatcaaaaccatatcaacgttcaatatgttttagacaaaaatcaaacaagtttttacatttggatactgaatcgaaaatgttttttttaacaaaagtaggacatctttttcgtctcaggacttgcttgtatacatctgacctctttgaatgtcaaagactgaaaatacaaacagatattacacaaagtaatggtgataaattggcaacagaaatgcgaaaacttgagatcaaacttcattaaaacacttgaaagcataccatatccgacccttcaaactttcaatgcgaaagactcgcgctcggttttggcgaaccacgacgctggtactttttcggggtaaagctagatccgtttaccagatatattactaccatattcaaccaagacccattaactttagatcgagacacaaacagttcatctctgttacactttgatcaggaatatcaatgtccatggaggccacgatataagacctgcactcaaccatgaatattgaataccattactcaatagaacaagaacagcatgaaacacaaagagcactcgtatcgctaaatgaaacatttaaagaacattatgtaaccacatatactactaattcaacacggcattgaaatgccacaattaaaccattgatatagcttagaaggctaatagctcacagcttgattcattgtccctatattaaatcatagtcacacaatgatgaatttgttaagttttagttgtaaacttcttagagtagaacaaccaaatcgtgatcagttatcagatatgtcccagctccaagctacaatgcatagcctctatatacatgagagtgaataactttaccttatggactccattttgatggaagctatatcgtaagcttggagcttggacatatctgataactgaatcacgaaaacaaaaaatgtgatcaatgtatacaaagtcaaatagacagaactgcaattgtaaaagaagagttaagaatttgtgattaccttccgaagaaaataaaatgatttggagagtcaggagatacaaatgatgtctctctattttattcacgtcctgtttcaaccgcttcattcccgttgctcttcctggtcttcgaaagacaacggattttgtctgcaatccttctaaatgcataagctccgatatgactgcaggagacaatttctttgttttaagtcattcatggtggctgaaggtaatgatcattcataagccgtttagcagcccatgctcctaactttgaccagcggtatctttggcaagcatcatttatccttgtcaacatttgcataggtggatcaaaaggcatcaagaggagaaattcttcaagctgatgcaagcatccatacttgcagtagagttcaatcatacaatcataatgctcaacctgtggtgatatatgatatttggtgctcatagaactgaaatactgaaaaccgagttcgacatgaccttcacgtatgcaagcttgtaagattcccaaaaaggtgacatggtcaggcttaactccttcattttccaaaagcatgaacaactcaaagacctccttgcttcttccattacgacaacatccacggataatagagttccatagaatcaagtcccgtgtagctgcctctttgaatacttcgatagcatagtcgaaacatcggcatttggaatacatgtcaaccattgcaccccgtataacaacatcaattttatagccatctctgatcaggaatccgtggattgctttgcctaaatttaaagcaggaatgttcgcacaacctgctaagagcgttgccagtgtgtatttgcttggtttggcctccacttgcatcccttcaaagaaagataaggcttgttcactcctgccaactcgagctacaccagtcaataaagcattccatgaaacctcatcccttagttcactcatttggcggaaccaaatattggcactctgcaaggtcccgcattttccatacatatcaagaagtgcattggctacaattacattcgtatcatatccatgtcggtagataaaaccatgagcttgcttccccatttgaacatctgatataccagagcagacatttaggatccacacaagagtgacattatcaatattttcaatctcctggcgcatcaaagtgagaaaatccagtgcctcatcccattcatgggcatgtacatatccgcccaacattgcgttccatgagactatattccgttcaggcatcaaatcaaagagctcccttgcctctctagttaaaccactcattgcatatcccgacatcgccgaagtccaagatttcaaatctttagatctagtttggtcaaatactctgcgagcactctccaatctgtcacattttacatacatatcaaatacagaagtagaaacaactgtatctgccacaacactaagtttcacagcaatggcatggattacctttcccacctcaagggccaaggatctcgaacaagctaacattacactagaaaccgtgtgattcaaaggtcgaacattcaactccagcatcttgaaaaacatcaccactgcctcatcattaaaccccatctcaagataccgccgcacaatcacattccaagatacatcactagggtttacaatctcatcaaacactcttctcgcatcactcatcacccgacacttcccataaacatcaacaatcgaagtctccaaatctacattccccgaatacccatacttcaccacagcacaatgcagctgcctcaataatctcaagtccaagattaaaccacatgactttaaaacaccagcaaaagaagtctccgtagctcgtacgccatctctattcattctacgaaacatacgaaacacctcatcagagacaccgttttgcgcacaagcagtaatcacagcgttccaagacccaccatctcgttcaggcatttcctcgaacagctctcgtgcatcatcaacacacccacatttaccataagcctcaatggctctgttcaagaggaaaatcggaggcaacggagagaaagttactaagtgagattggactttacgggcttgcacaacaagagctttcgaggaacaagaacggaaaagacgctcgtatagccaataactaactggctctggagaagcaaagagaacagagacggctttcgagacattaccgccttcgagatgctcaagaatctgacgggtcactgtaagtttggttccggtgccgataacacgcttgtgggttttatcttgtttgaaaagacggccaaaagcagaagaaactccggtcactgccatggttcatgacctcaaaggttgagactttaacagatcagaaactaaacccatcaacatttcttctactatgggtttagggtttaaaacgaataggctcttcaatttctgtttaaaatcaatatgggcttttagtgtcggcccattaagtatgtgtttttttaaaacgaatagactcttcaattgctgttttactaagaccgatcatatgcttaaccaaatttcaagttatcgtatttgtttcttgtaaaactatatattaaaatagattacagaaaatgaaaaaaacaaaaacaaagttacatctcataatgaaaattacgacagtaacaaaagtgaaatatcaatatacttcacattaactccaattctacgatagaggaaaaaggattacttgttggatgctcaaacactgtgtcgccatatccaatacactcccaagaacaaaagattgtgttgtagcctttgaaaactattgggaatagacaacggcgcatacatccggtgcatattggtcgggagagcgaactgttgagaaagactcgaacatctgtccattgcgtaccttcaattcctagtgagtgcttagaaatgtaatcttttacactattaccaggtttcatgtacatgtctctcccaagtaaacattcaacatgaagagtcgtgcaacagtcattgcatttataaaatcgcatttctcgtcttttgtcccacggagactctctttcttttacttcttctattttgccttcgcaaacctcacaccagtctggttcatcacttgcctttttcccatcgcgaattctaagaaaatgactgtcgtgcttgtaccttaccttgtatgggaaggtagcgcaacgaaaacatataatataatcgcattccatgcaatttaatttcgaatagcttttccctttgcatatttgacatcgtacctttttctctagctccgaagctatgcataagggatgtttgtggcattgatattcaaatggttcacgaatcgaggcacatctcaagtctagccggaatcttctttcgcctatatgatgttcatagaagaagccagtaccatcacgaccacaaacattacaatggtatacgccttcgttattaccaagctcctttgtggcaacatttagagtaagtggatgtggatgtaagggatgtcgtttcatgcgtggagcatttgcacaactttcatggaggatgaagtcacattccatgcatgaatagaactggccttcgtagattgggaaagaacaccctcgacaatacttattttcatcataaactttgctgatctcaagtcgtagatggtgactgtgatatggatggagtattactccatcagatatcctctcaaatggctcaccatcatctattatatcatcttcttctgatacaccttcgagttcttttccatcccacacatttctatgaaatgcacattttgaatgaacaaaataagcatcacatttaccacaagaatatgctccataattgttgtcaacacgttgatgacaaaccccacaagacaaatttccatatggtagagaagaggcaaaagagatccggtgttggtgacgagatattctaatgacatgtgggtaacccatacaatctttatggatgacgaagacacattggatacaaatgtatgtgggatcaagcatcttaacaaggccacaaatattgcaagccaaagtagcttgtgtagggaaaaaggtaatagggtggggatggcttttaggatggtctacaacaaagggtattggttccatagcacaaatcgggtccatactcaaatcgcatgtcacacaatgataaaacatgttagacacaagtcttccacaacaaatgcacaccatatgtgttggatgactataaagtcgaagagaatgaaaagggtgtgaagggtgtttgatctcaagtggagactctacacattgcttgtgaaacttgtttccacattcaagacaagcataatagcttctgctagtctttgactcttcacatccaccacactcgaattcattactatcaggggttttattgttgcaccaaaacagagggactacagggaacttacagatgttatggtgatcataatcaagtaaagattcgccttgttgataactggttcttgttcttggaaagtgagggtaagaattgaatggatgaaagttgaaaaagttaacaccatcatagttcttctctactttgaacttatgagatctgatacgtgcatagggacaagaaaaaagaggttggagaggaaggtcatcaccactagactccacggcggaagaggttgggtgttttgtttgtgttaatgtgtatactaaatatgacttctcatccatttccaccttatcaaatacacccacagaactcatggttgcaacaatggggatttggatttttgtaatactctttttctccttctcttcttttgcatatatattacataagcaataattagttgatcttgaatataaaacttgggaatacagctaagattggtctttttatattatatcttatggaagagttggtaaataattgacttcgagtgacaggcaaatgaaaagaataatctgtttttttggatgagttcgaatcgcggtacagtcttcaatgtcccattgatgggtaattattaaccaatcttaggttagtttattaacgaagtggtaacttagacgtggccgtatcttccggatcttgtccctaaagtttagttttatatactattagtaagcaaacttaggttcatataattgaggtcttttcttttcttttatgcaatagtagtctagtaggtaaaagaagagtaaaccacaataccttttgttcattaaaaccttcggttgggagcctaaagtaattgttttgatcagctatagggaatatgatgcaaatgaaaattttgtgtatccaagttctacggctctttggatagataggaggggccgtaacttccagcattagaggggattttactttcttagctgtagatcttccttaagtttaattctcctggagatgaaggatccaaccaaaaccggcgtcgtgcaactgagtgtcgaatccaagatctgctttttcaggtgatccaagcgacatcggtccgatgaattagtgttctgggctagaaaccaggccgataaaggattcattacaattcaactgctctagtaccatatccaataactagtcacagaaatgccaaaactcacatatgagtgaataaacatatacctaaatgtcctagatagatttataatcaatttggagtagcactaggaaagatgaattttcatacatgtcaagaaaaacgatgatgcagctgtaatctatggctcatccatcacttctgttagcttttagctttcaatacataaaaacaggagtacatttgaagacggcaaaaccaacataaggaagaagaatagatttaccgaaaggaaaagtctctcaagcacgccttttgctgagacgccatgagttaggctcgtggtaacggtcatacaacggctcaatccgttcttggcgcttacgcttgctcatttttgttgggtcagacactttgaagaaccttggagctaactcaacaagccactttgggtcaatcacagtcacttccctcatgtactctttcgtagtcatcacaagatcatgatatataacccagtctggttgtctctggaacagcgcgctgctcgggtgtatatacaccggttgattctccaccagcgtcctgtaaccttcctgtggatcttttcttgctccatggaagaagaatcctgccgtgattgctttccttatcttcgtgaaattctttccagcagttacgacgtctagtttatacctgtaaaatcaaatcacacgttaataaacagaacttggattgtcacacatcattacaagctataaaactcaatactagtttagctacttacttgtccataatgctgagaagttgtttcctcacatcttgagcacgtcgtaacgatcttgactgtatgaagttttcgaaacaccatggacctgagaagtttttagccttccaagcttcatacacagctagcaatgtcaagtgatcaccttcgggctggaaaaactttgcccgtttttggtctgcctgtgcttgcttctcccttggtctataaaatatgttacccgtctggatcatagcaatcatcgttaaaatctcatcgctgcacccgagatccacactagctagcaacattttagagagcggcggttcaagaggaaactcagccatttttctacctagctttgtcaacaatccttcctcatccaaagctcccaggctgtacaactgttccattgcagaaatcaatgcttgaggttggggtggatccatgaagtcaaacgataacaggtcattgatgcccattgctttcatggtcaaggttgtcattccaaggttgattctttggatttcagggattgatgtaggaggcatttcattacgatatgcgctctctgtgtagagacgataacatttccctggcccagtacgaccagcacgtccagccctttgcttcgctgatgcctgtgaaattggagtaatgactagcgattccagcccttgctttggattgtacacgttctgcttagcaaacccaggatcaacaacatagtatatcccatctattgttaaagaagcttctgcaatatttgtagctacaaccactttccgtttaccaggagggggaggatcaaaaattctagactgcatttcactaggaagcgcactgtaaactggaagtatgatgagttcgggaacatttttacctagacctttcatcctctcgtacagagactggcaggcagaatcgatttcttcctgtcccgtcaaaaagaccagaatatcaccctcaggttcagtcaagtgaatctgaaggactgtgatcagagcggcatccaagtaatctgtttctggctgtttggtatatagtatctcaacaggaaatgttcttccaggaatggtaaaaatgttgcagttaaagaagtacccagagaacttctctgcatccaatgtggcagacgtgactatcagacgaaggtcgagtctacgtttcatcagcttctttagaagaccaaacagcacatcagtgtggattgtccgctcgtgagcttcatcaagcatgattacagagtactgagagaggttttcatctatcagaatttccctgagaagcataccatcagtcatgtacttgatcactgtatccggtccagtacaatcttcaaaccgaatcgcataccctacctcctctcctaaacgacaaccaaactcctcagctactctcttggcaacagacattgcagcaaccctacgaggctgggtacacccaatctttccttttgttgtataacctgcttctgcaaggtactgagtcacctgtgttgtctttccagatccagtctcaccaataaccaccaaaacttgattatcgtgcacagcctgtatcagctcctttttcaacttgtatatcggaaggctctccctttgctcttgaatagaaagctttgatctctgtccaaaagtgggagttttaccaaaggcatccttcttccactcaggcatgtcataagctgataacccaacacccctaagctcttgagcaagatgcctttcaccagtttcaggcatagggtcttcccatggccgattcagatccttggggattgagtcaagcattgttctctgctgttgttccctcatttctctcctctccttagtgagagcggactgaagtgcagctgcacgactcaaagaaccttctggatttttgaagatcttaaccggagacatgtcaacagagtacctagtctgcccttgtaagaaagcaggttcgtcttcattcatctcaatctcaagttcttcttcagcaccttcctcttgataaagcatcccatctccatcctcatcatacattggaaactcatctactctcaaaacaccagaggcaatcaactgcttggcttcccatctctcaggagagctcatcttcttcaacggtctacgtgaaggcgcaacatcattctcctccacaatcctgatccctgaaatcccagtcttagtcacttgcccatccttagttctatacgacggattactcctggatgaatcatcttcatctgaaggcttcctcaaaggaatcaaatctctacctgtattctgatcaacatccctcatagaaagactatacttatcactcgaaatcgatataactttcacataaacctccatatctctcttcacaaactccttagccttatcaacccttctagtagccatctgagaaacatgaactaaaccttcttttcctctaaacttatcaaactgaacaaaacaacctgcatccataaccctagtaactctccctttatatacctgatacaactccggctcattcgcaccgcctttatcttcctccacatactcatccttcgcacgcctatctctacgcctatcttccccttcaccaccatcaccacgtcctctttctctatgcctcctatcacttcttctatcttcaccttcttcatctccacgattcctctctctatccctatgtcgatcccttctatcatcacgatcacgatttctatctctgtctctatccctaccggattctctccgatctctatctctatttcgatcctcttctctccgtcgctcctcagcttctctctcaatctctttctcgagctccttaactttatccttagtatccttaatcgctaagcctttgaatttctgatcatcaccttcctctttcttcttctccgacttaggcttcggaggataaataccgtggattgtagttaacaacgaccggacgaagtaatccggcatctctgcacctgcttccttaagattcttatcgaattcatcgactgtctcagagtgacgacctagatcgataatgaactcagccaaaactttttctgcagatcctagatgcgtttccaattcgttgcagacattggagacgagagagagatgattcaatttgttgagctcttctttttccattgaagaaaccaaaggaagtaacaacaaaaagagaagaagacactgtttctggataatcgacttctttctagggttttttcttatagacgctcgcagagttctgattttgctaatcctatttttttctgaaatagctgactcttaaaacgctgcgttttaatttttaaacatatgtaactttttctttaggatttatatttgggccgatgcaaaacaacttaaagttaatgggctttcgcagttaccttttttgtttttttcctcaatatagctaaccttcaatttgtataattgaaaaacatcagaacggccacgtcgtcgtctctcatcctcctcaaaaactctctcaagagagacaactttctcaataatacatgattttgatttatttttaatcatctttttccagaaaaacagctgagagaacccaatttagtcaccattgaagatgctcttacattgtttagaaaaacagggagataaacaatttatcttttctgaaagaataaacaaattgttgaatttttaatttaaaagaaaagtttaaaaggtttttcaatctaaaaataacgcaacatcatcttaaaaaaagaaatgagtacataatatggtagtgaactccgcatttttagttttctaatgctagtaacatgaaagagtactcagagtagaggtgcgtttatcatttataactctaaaactcaaaacaacttgaatatcttatagagaaataaacagattgttatccccaatacatacacattaatcacaaggtttcttgatcaactaaagatcatatctaactatatccaaatagtattgcaacataaaaataaaatcgttgaaaatcgcaaataagtataccacttattcaaataatactttgttactcttcttaccaatatttttcctaaatatacggaagaagctatcatatgtattggactacttggtaggaaatctttatcaacgttgaatttttattattttgtttatagaataaagatttataaagaagaaaagaactaaaattgtataaaaagttgataataccaataagaaattttcttcagtcatatccacacacaaaaaaaaatcattgaattttaaaaaaggagaaaaattaatcatcatgatgaatgtctttcggttgatatttgatcgtgtacataattcgtcccaacattaacactatgtcaaacgaaaaaataagttttttattgttttattgttggctacaaataggatgctaaattatcaaaactaattgaatcgaaggtgaaatctatgaaaaccaagttaataaatgacatatagttaactaaacactatgccctcaaactaacacttgaattactataatttataattgatgtgaatgagtatgtttattttctcgagcgtatatgcagttatatttgtgtattaggggtcttccaaaaaaaaatttaccacaaaattatatattaaaatatccatgatgggaaatgattgaattaaaatgatctcctctcttactcaagaaaattatgggccgaaaactcaaaatatcttggtaaaaccgaaagaaaatccacctctggttttattttgtgtagttatatcatgatgattttcaaaatacaagttctaaataagtctttttttttttttttctgaaatacaaatttaaactgaagttgttgatcaatatatgatctcccaggtaaataaaaaactatatacatatatgtctatatgatcggatcatcccaatcttccacaatcgatcttatcatgatgcatatcgaccaaattggtccaaagatcatatcttagaaatgttttgaactatttttaatgcatgtcgaccaaacattttttaatcgaaacacacaaattttatactaaccaaactgaatgaaactaaacatattcgaatatttgaaaaccaagctggataaatctattaaatgtttgatggaaaatgtattaaagtttttttgacataaaaggaaaacaaaagccataatggtaagagaagatggtgtccatcacctaactaaccagcctcacctacctcataaaccacatgatgaaatcgagttaccccacgaacacactcagctccatgtttttttaagaactaaaatgtttgatttgatttgtaatatttagtattactgttgacaatttgtatatgtaataaaaattgaagattgatttactttaacataagagataatgccattttgttaaatcattattaaaattgaagaaaaatttaaacagtgcatctaattctcttctttgactacatccaaacaaagaacaaaattcccaaatcatttttattcttcttttttacaagtgggcatttgtgaggttgtgaggcccaaccaaaagagcctctcactacattccacaagaaccacacaaattcaaaagtctcactcctaacacaaagaagcatccaaacgcaatcctctcacctccacctcacattcccctgtgccaccatcacttaccctttctcgcctctcctgaaatcaaaatcccattatgcaaatccattttcatcatcatcaatatcatcaccaacttcattctcatcatccatggcccatttctcatctatgtagattctcatctctctacctcctcctcattttctcctcttgattcactaattcttcttcttcttcttcttttcagacatgactcttccttatcgtttctcttccgttagaaaccactcacttctacttaagacttctcatctctgcacacccagatcagctcttggttgttgtttctctcccaaggaatcccctttcttcaggaagaacactgcccaattcctttctcctcagaaacacacttctcttcctctgaaacttgtctgccctttagctagtttctcttcttatgcggattctgagggagaagagcaacaccatgctgatcaaccgatacagaaccctcacgaatcttctaccgtttcaaacgaatcagatgggaaaggtaatgcagaagctactggagacttttctggaatggctcaagcctttcacatttcttccacaacagcaagggcaatctctatagtcatcgccttctctgctctcacccttccaatcttcatgaagtccctgggacaaggactggctctcaagaccaagcttctctcttacgcaacactactctttggtttctacatggcctggaacatcggagctaatgatgtcgcaaatgccatggggacttctgttggatctggagccttgacaatccggcaagctgtgatgacagctgcagttctcgaattctcaggtgctcttttgatgggaactcacgtgactagcacgatgcagaaaggaattctcatggctaatgtgttccaagggaaagatatgttgctctttgctggtctcctctcttccttagctgcagctggaacttggttacaggttccatcttatcttttgcttcttcatcactaggttcaagacaggatttagtaaagttaataccttttaaagatggcattcacaaatgatacaagtagagaacgtaattgtgaacttgtgaatataacaggtagcttcttactatggatggccagtatcaacaactcactgtatcgtcggatcaatggttgggtttgggcttgtatatggaggagctggtgccgttttctggagttccctagctaaagtagcttcatcttgggtcatctctcctatactgggagctcttgtctccttcctagtctacaaatgcatcaggagagtaagtaaaacaaaccaagaaactaactttctaattctgaaagatcactaaagtcatactcaagcttctgctacattttcacactcttctttcgttctgtgcagtttgtttacagtgcaccaaacccaggacaagcagcggctgctgccgctcccgtcgctgtatttgtaggtgtggccagtatctcctcagccgcattgcctctaagtaagatctttccaatagctctatcacaagccttagcctgtggagtagcaggagccatagtattcgacagaatcatccgcaaacagctcggtcacctcctagctaaaacaaaatcaccagaaacatctcaaaaccaacccaaaaccattggtttcctctccgatatcgcaggaccaacaggtacacaactcgaaatagtctacggaatctttggctatatgcaagtcctctccgcttgcttcatgtcattcgctcacggaggcaacgacgtctccaacgcaatcggaccattagccgccgcattaagcattctccaaaacggagcagctgcaggaggagccgagatcgttatcccaatggatgttctcgcttggggaggattcggaatcgttgctggtctcacaatgtggggatacagagtcatcgcaacgatagggaagaagatcactgagctaacaccaacaagaggattcgctgcggaattcgccgccgcgtcggttgttttgtttgcttcgaaattagggcttccgatttctgcgactcatacacttgttggtgctgtgatgggtgttggtttcgctagagggcttaatagtgtgagagctgagactgtgagagagatcgttgcttcgtggcttgtcaccattcccgttggtgctacactcgccgttatctacacttggattttcaccaagatcttatcttttgtattgtgagtttctgtttcttttggttttgttatacgaagaacatgaaattgatcttcttcttctatgttcgtttgaatgattcgagtttgaaaaaaccctaaagttatcatctttcgattttttcacccatcggtgaagtatgatcaaagcttgtacctttcttgttcagtgtttcgtctcgtcgtccagtaaaatcgaattagagtgggtgacgtttggttacttctaaaacgtcttgttgtttgtttcctaatcgtaaaaacgtcataactttttaaacgacatcgtttttttttcgagtaaacgtgagacgcgcgtatctcttgcttttcgtacacgcgtctcgaacaaagactgacatgattatcttggctaaagacggaaatagccttacacgtttccccatttcagcgataaaattgagggtatttgagtcaaataaagaaatagaaatatctctcttcttctatcttttgattctctggttctacttgttcctctgttttggattgtggtggctctctaatggcggcggttattggaaacgtggcgttgttacttgacgttaactctcaccgtacggtggtaactgatcggagaattcgtttaacggtggtcgacgtcgttttgaatttacaaaagagagattcgcacagtcacgtttctcattacgctgctctctcttccaataagcctcttgaatctgacggcgaagctcgggttcgccggtttttaactcgcggaaaagcgaattccagagctaacgccgtcgatttcgacgacgcgggatccagcgacgaagaaagtagtgacggaggcggtggtggtggtgacgaggaggaggaggaggaatatttcgatgtggagaaggagaggaagaggagagctaaggaatttcatgatacgaaggagcttgagaggaaagcagaggagttacagtataagattgatgaagaaggagacgattcagaggagaagaagaggatgagagtgaagagagaactccaaaaggtgagtttttgagggctctttctctagttaggttttttttttggccttagcaatctctatttgtgtgtaaagaacactcttagattactttagcttagcttggtgaacactcttaggttgtctacgaaagtgtaagttattggtgaggttataagagtttgatgtgcttatgaaagagattggtgagagcaggtagctcaggagcaagcagagaggagaaaaactgcagaattgatgtttgaactaggtcaaaaggcttatggtaaaggaatgtatggacgagcgatagagtttcttgaaggagctcttacgattatcccaaggccaacactctttggtggtgaggttggttgataacaccagagtttaggtactgtttttttggttttggaattggtatgattgctaatgttctgtgggggaattgatttggccagatacaaatttggttagctatggcatatgaggccaataatcgccacgctgattgcattgatctttatcagcaattagagaagaaacatcccagtcctggtattcgtcgtcaagcttctgagcttcggtatatcttgcaagctcctaagcttaagatatctcaggaggaaatggttactattcccatgatcggttcaagttacgacaggtataacaaaaggtttccaaatcatggctaatgcatatgtcgacatcacttgaaatggactctttgtggtgtgtgcgcagctatgcagtgacatggagtgataaggaaagggataaggagcggcgaatgaatgcatcgactacgaatcagctcaactcgagtgatgattttctaggaaagctcttggtttggcgaccggtggtcggtatggagaagaaccgagtcttttggcttgctttgacactgtggtttggtttggttggagcagcactcatcttacaaagataagtagaagacatgcaaaatatttttccatcgctttaaattatggtttggtactactgtttcttctacttgtcttgaaattatatttgatttcatgtataaatgtgtaagcaaatgaattcgtcgttgtatataaagtatttgatggaaatatatataactttgtttatttgattatgtgtaatctttttatagttgaatttatctttttttattgcgtataactcctcaaagtgacaaactaattccatcatagtgacaatatagcaacctttttggtcgttttatcatcgttgaacagagtcatacttgaaaacaacaggtaaatctcaatctacctaattaggaaactttcatgttcgatcccctcagaagttcaaaacctgtcctctatgactgaccagtgaccacaccatgaaatatattaaggcgccaaagtgatggaaacaatcttaagctaagcttaaaaaaaaaaaatgtgtaaatggcattggccagacactggttggtttcttcatatatctaataccaaaaaaaaaatgtagaaagaattatcaaaggataacacaatttctagattaacaagtgctaactagattaattgatgaatacaattaacaaatccagtgagctgataagttttttttttttcaatctgttaaatttattcaaaaaaaaagaaaaaaattacatatgaatgcaaacttttttgaaaaaactacattgagattcgattaataatgttgtctcgatgcaaacaaaacttgtagaccctctaagaatgtttcagctcctcttattgtggttagcccttttcgaagatttttatctaataaacttaacgagcttctctgttgtagatggttcgtctccatgtcttctcccatttctcgccaaatggagtgaatcatgttctgaaatacttacatgagaatgagctgaattgagagggatcacaaaccattcacaacaatagaacatgtttgaacttgtttttgtcgtcacagttaatgagaaaataaatacccgtatgtgttagatagaaaatagaggtgtacctaattcaggctcaataaaacgaagatcagtacgacaacgatttgtttttttcagctgctttcatgtctctatcgagtactcattgaataactaataaattgtttacaaaatattttgatgatgaaaaatagttttgatatgtttattgaaactagcaaacaaaataaagctttactagtagtatgtttttgatataatagttttggctttaaatttattgaaactacgtaatgtttttgaactactgcagataatttgtctgcaaaaggtataatctttgataaaatttaaatctacaaaattcctctttttttttatttaattaaaattgcatcaaaatgtttgttttcttgagccgaattattctattaagcgcattaaaaaagaaaaaaaaaaaagaaataggagctaatgtaatttagagaaactctatcaaagacttataataaccaaaacgaagacctattgtgaccaaatacaaagggtggggcagatcgtttctttgaatactatgatgtcttttagtttatgagttgctttatttctgatacttctcctccccattctcttatcctatcctcagccattgaagcctacacgacaacacatttcagctaattatattaaaacatggaatgctcaagtttagacaaaatattcattgatttttaatatatatttttttctcacctctgtgtcccaatttgttttgcagatcatccatgttaaaactattgtctgaaccacggtccccgtcaacattccacaccagattccctagcacatgaaagattttcgaattatcggtcttttagttaatggttcttttatattttcaaagatttcaaatgatgaagatttgagattcattaccattacaccatagttaagcttgtaccccaataatagaccaaatgggattccaaacacgtaatagcaggcgatgttaacgtaggccaccactgcttgccatccagctcccacagccacacctaatattccagtttattaccatagccaacgtcttaatattgaagttttagtaacaaaattatatttagttaaaccctaccaaatcaaaccaaaagactaattcacatagaagtaggtataaaaccgaaataaatcaaactgactataatctaagactaatcaaaacgagttgaaatagatttggttattgagataaatagattgattacctgataagacaggttggacattgttgatgacaatggaaagtgcaagtattggtgtgagttctttaacaagaatgatgactttttcgtctttcacaaaaagtgatggatattgatctctaaagatgagtagaatcattgatacaatgaatccgattagcgtcgatgttatcactgccacaagtagtgagaatttcgcggttcttggatggttagctcctaattcattagacactctcacactgcaccattttgagattatgttataatataacactaaagagaggttttggacaaaaaaagagtattgacttttgcacgtgtttaccttacggctgtgttcatcccaatagcaatcatagcagtccatcccaaaatattcatgcttcatgttccatattgtttacaagaccccaaaaaaaagattagagttagtggtggatccaaaaattcataatatcaaatttttaattaaaaagtagctactatgataatatgtgttgaatctaaagtgtagtggggtcaaaataaggacaaactatcaacaactacaacatttttatacattacaaaatttattacggtcgaaccgctgtcaaatttgtactcccaaaaggaccaatataaagttagtatcaactgtcaattgtgtccttcttgtttcatcataattatttcatgggagtatacatatatatatatatatatatatatatatatatttacctttcttatattacaactaaagaaaacaaacaatgatgaacaaaaaaacacatttgacagtcgatttttagcattattttgtttcttttgggtgtataggtttgtataactacaagtctaaaattaaaatgtagcagaaaaaaggaataaaacaaaaagaatcagcactaatacatcaaattatttaacttaatcagtagccactagctatgggtttcactgcccaagaaacaaacgaataatttagttgacaatgatgaacgattaagtctactacgcacgacgaattagtgctaattcctagagattcttgatgataacttttaaaataaagaaactgaaccaatcaaataacgaatcttagaaaccttaaatgactacaataaaatgaatatgaacatgtaaaaaaatactttaaaacataaatttaccagatggagagggcagctacagagatttcagcattcttcaaatatccagcaaataatatgattgccataaaataccaaacctccaaactgatccatagtaagaaattaatcaaaatagcaaaaatattattaatactatataaaaaaaacaaaatcatcaagtcaggtttggtttggttatataaactcaccagagcataacagcagaagccaaagataatctaacgaaactccacaaattatgaaaagcctcccacgagaaaccagaccaagcctcaccacacgtaccactaaatatgtacacaagctgagccatgtcaatgaagcaccacgacgcgttaagcactacggctagacctggcataccccactggagcttcacaatgacaaaccacgtgagaggcacgtgtataacaagtgcaacagccgatatcacggccatgaccattatcttgctttgcgattgcaaaaatttagcggttggaaaattgatggcgtaggcaaagatttgagggatcatgtagatggaaaatattccggccgcgctagagattgccgccgtttgaccaatggacgcgaggataggggcggcgaaaatgtaaaggagagagaggataagagcagtcacgtttagtatcacccatgatcgttgcaagtaaacgccaagcattgacaattttcctgctccaaacgcttgtccacatagcgtttctaacgcacttcccattccaagctagttgcggacgttcataatcacattcattacaatgatcaaaacaaaacttcttaaatcttacaaaaaaaaataaagtgaaacttttacaaaaggcaaaaaatatattaatttttaaacttgagaaaatggtccatttgataaataaattgtactttgactagtgactacaaattgataatcatgaattcatttcttcaatttttttgggcgtttgaatttacatttttaatgtatatatgttaaattattttttttaatttaatggtcttttgatataaattaaaatatagaaaattgtttatagaaatgtagacaaaaacattttgaatgatttggacatctcccaacttttggatctttgtgtgttttaagttaataatgaaacttagtcaaagaaagaaaaaaaacgcattttggataataaatgcaaaccacaaaataaaaggcgtggatataatttaccatgatgccgaatgagaagccggcaacgacggagttttcgacggagacagcggcaagagcgatggtgctgatgtgaccggcgaagacctgagtaatagcgccgagagaatattggttcacggatgtgaaaatggcgggaccggccaagtaccatagctttttggtttccacgttgaattccctaacgaagccaccgacggtggtgatcggaggaatatcgtcgacggataagaaaggaagatcagaacgttcttccgccgcagtgagaagcgtctccgttatatctttgtcttttgccatcttaagagaaagagatggagagattaaaggaggtcgaagactaaggaccaacgagtgaggatcttgggtttaatcattcatgaattatataggaaaaaaaatgttaatacgtgcgaccaaaaaaattgtttttatgatattaaggaaaaaatagctaatatagcaactagcatttaataaaatggctaaatgtagacaaaatcattgttgtattaatcaaattatggtatatattatggatggattcacatgtgttttgttttggtagtattattaaatgatatgtgtcagtattgaattttggttaaaactctagtcaaattataatataggattctattactagcaatcaattttctaatatttttttgggtattgatttgatttttttttgttaaaaacttttaaaaaaagtttttgttttgggtgaataaaatcttaaccattttgaaaaagaaaatctgatgctgtttttatagatgagaagaaaataaattaatgaaatttgaagacatacacttgtatttgaattgacatggtgatggttaatctattatatcaaaatacactaactttttagaggctgctatgtgttaattatttaatttagagactttgaggtaaaaaaaaccctacaagtgttaagagaaagccaatcaacgactttttccttttaaccaactgcaaaattaactaagctttttcatgtgtaaaacgaagaaaacttatgtttcatcattcaaaaaaaactataatatattaatccatcaatcaatgtctttcactctcaacttaacttgttctgttacaagactctcccttatataaaaagggttacatgtggtttagacttaaccataagattagtaggacaacaagttgttaccagtaaaattatttaatttgcagcaccttttgagatatttagtaggaaatcaatctgtgggttgaaaattgaaggtttagagatttttatgtcaatggttgacgataagtttttaaattgaaatccttatatatgtagtttttcttttccattcgaatctatagaattttatatataaccaaaacaccacatcgtagagtaatacaacaatactagattttaacccgcggtatatcgcgagacgatttattttttaaaggtaatagatattaaaacttgcaaattttatttttataaaatagttatattttacagtgtataattgttattaagtaacagtataccacgaatccatgagacaattgttaaaaaactgaagttttaacccttattaaaacaacatattaataatattttaaaattttataaatattgattcaaatacatccaccatataacccaattccaaaataaaactcgttcggtaatttctttacccgtcccgtgattttttttaagtagtaatttttaaaatttaagaattatttattatatataaaagttttgcaaattgtatcattctctaatacatttatattttatagtttaattttatatatagtaacattatacataccacataacatttttggttttatataacattttctaaattaagatgatttgatatgtttaatattagtggtcttaaaaaaaaattcaagatgtaacccgtattgaaacggtggattaattttattttacttttttattaatgttgattcaaaaacccgtccctccaaatccgtcttgcgaaaaagccatttattttattaatattaattttacttatgatatgactctgaattataatctaaacattttatctaataacataggagtgcaccatatttatttaataggggaatgtaccatatgactcgaatgcacttttacccaaatccaccaaaacagtcttgcaaaaatgctatagagataagaaacgatagtcggttttgataaatataagattaacaaatatattagttaaagaatgcaaattgaaaaggtatattacactttattcgaatatagtatcaaaacttatataacacagaaatttgataattttttaattgttgaatattttttttgtgctaatttttatgtgattaagatttaattgatttcgtataaaaaatattaaattattttacgaacttatttgtttataatttggtaacagatagatatttgaatattcggtatattttgcttcagtttaggaaatctttaatgatccgtctttagatccactaagccctataattaagaaatgaatattgtcgttaaataattttggtaaccttaacgtcattaaaggatttgttttttattaaatttttttaatggcattgtcatgtaattaattacaaaaattaaggttacatttaaaatgtaattcccaaataatatagtaggatctataatcgaattatgatggagaaagccgcaaaaaatagttttgtttttctgcatcctcttattattaaaaaggaagtacaaattaaaattttgtctaatttggccttaattttgatttcaattttggattttgttctttgctattcaaaatcattaaggataatttagtcttaacaatctcctaaactttatatgatccgattcaatttaaaccgttcaataaaattaattttcttaaatctaaaccgttcaacaaaaataagtaaataacaaccaaacaaaaatttaaacacattttaacacattcctcttatcactaaataacaacccaaaaaaaatctcaattattatttagttatgtttgattaaaaaatttatatttataagtttaggatatcaaatttattcaaatatttagtataagaatcaaataaactgattaacctgcgataaaccgcaggttaaatcatagttatattcaaaaaggatataagagtatggggataaactaaaatgcctactacaagcaaaactaacccgggaagatagatttttgtttccttaaggattaagcccacgaaatgtattgaaattcctacatgtgtaaagcctattcgaaaatctaggatcaaattatgggaaataaaagatagtcacaagcaataccacacgcaacttgatatcaatgatataacatacacacgttattccccattgtttttgcattgtatgcaacataaaattatttgacaaaaaaacacacacataaaattacctcaataacatatatttcctgaatatgataagaatgtaacttcttctttttgggtcaaaaatgataagaatgtttgttacatctcggacttaagaccctaattaactaagggatgaagtttcatgaattgttttaatggctggtgtagctcgtgattgcgggagtaacaaggcttctcattctttgaagggatgcaagtggacgccaatcctagcaaatacaccaaatatttatattactgcatgttgaggattatgattgtatggtaactctactgcgtgtcgatgcatgcatcagcttgaagaatttctcttcttgataccttttgatccaagtatgcaaacgatgaaaaggatatgacgcttgccaaaattacggctggtcaaaattaggagcatgggctaacgactttatgaacgatcataatatgggctgaataaatgcccactactagcaaaactaagcccacaaaataggttttttgtttccttaaggactaagcccactaaatgcatactgaaattccactgtgtaggactattcgaaaatctaggaatcaaaagtcatgtcaactaaaaaacactcacaagcaaatgccacacgcaacttgatagcaatgatatatatatatatatatattttttttccgactgaatgattccattatattaggcgaaagtggaatgcatttttgaaatacaacaacgataagagtcgaaactctgtcagaaattaagtcggagaaagacaacaatatcttctgaaacctaagcccaaaagagagaaacaaactgtaagcaaaaagttacaaaaaagtaagcataaaaataacctaaaagctaaatctgaaactcaaaacatcataacctgcaatcaatcccatagtaacgattagcgtcgagctgaaaccaagaaacatgagccccaagaagaaccaactcagcggacaaactccaaaagaaaggaaatcccgaaaaagaacgaatataaaggctcaacaagcaacaacccaatagaacagataacaatgatatataacacgatattctagatttctagattttttttgcattagtgcgcaacataatattaaacctaatcaacaaaaatatgccaaattcctaaaaatgataagaatgtctcttaaatctcgaagttaagaccctaattaacttcattaacgcttcttaatctataaatatatagttcttcaaaaatctttcaacgcattaattattcaaaaagtaaacacatggaagccgtgtagttcacgcgccggtcaaatcgaaaccgtagaaaaaagcaaagaaaagaagacaaaaacggacttgacttatagagaaagacttaaacaatggcgaagacgaagacgatgagcaacaacaacaacaacacactagtaacaacagtagcatcagcttgaaagagagaactaaaacctagaaatcgagagagattggtggaagatttttcaccagatttcatgggagaagaagagagtcgaattggagacgagctttcgattttggttctcacggcggagcgactccgtgtagctgtggatgaagctgaatcattcaaaacagagtgtggcgaggttggtaaacaagtagatcggcttgctcaaatgcttagaacacttgttcgattcgtctctagttcttctcaacaagtttatgatcggccgattcgtagagttatcgtcgatgttaagaagaatctcgagcgtggttttgctcttgttcgtaagtgtaggagacacaatataatccgacgagtttgtactatcatcaacgctgctgattttcgtaaggtgattaatcttctggaatcttctaatggtgatgtgaaatggattctgagtgtgtttgattccgacggagatggaagttttggtggtggaatcgtgatttcgcttcctccgattgctacgaatgatccgattttgccttgggtttggtctttggttgcgtcgatacagatggggaaattggttgataagattgatgcggcgaatcagcttggttctcttgccggagataatgatcggaataagaagattattgttgatgaaggtggtgtttctccgttgttaaggcttttaaaggagagttcatcggcggaggggcaaatcgcggcggctactgcgttagggttgttggcttgtgatgaagataaggttaggtctattgttaatgaacttggtgttccgattattgttcaggttcttggtgattcttctgttagagttcagattaaggtagctacattggttgctagaatggctgaacatgatcctgttgctcaagatgagtttgctaggcagagtgtgattaagccattagttacgttgctttcgcttgatgtgtttgttgatgatattcatttgagtaagcataatagtattcactctcttgttcagatgaacaaagaggttgagaaagatccgtcttcgaagctttataggccgcttaagagttctaagtcgaatgtgtatcgtgacattggtggtagtggaagtagaactgggaatttcaagaaggagagggataatgagaatcctgaggtgaaacatgagcttaaggtcaattgtgcggaagctttgtggatgcttgctcgaggaaatgtagcgaatagtaggaggattacggaaacgaaagggttgctttctttggcgaagattgtggaaaaggaagttggtgaattgcaatataattgtttgatgactctgatggagataaccgctgctgcggagtcgagtgctgaccttagacgggcagcattcaagactaattctcctgctgctaaagctgttattgatcagatgttatggataatcaaagatgtcgatagcccgattttaaaaatcccagcgattcaatctatcgggtcattggcacggacattcccggcaagagaaacgagaatgatcaagccattggttgagaaactcggtagtagcaaccaagaagtggctataacagctgtaatttcattgcagaaattcgtatgtcccgagaacttcctctgcgcagagcactcgaagaacataatcgaatacggagcaatcccgttattgatgaaactaataaggaacgtcgagcagcaaatgcagttacagtgtctagctttactctgctacctttccgtgaatgccagtaaccaccaacagttggaacaggccaaggttttgacggtgctcgaaggtgcagaacgtttggcgggtctgcagaatatggagttgagagaactcgtgtcgaaagctatatatcagctaagtctatacaatgcaggaagtcacagtcaaatgctatcgtatgttggtccttaaagcaagatacagtttatagtgtgttggattcatatcgtacagacaggaatcttcattgttagatttacagagaaagagcaaaaagcagaatctctcattttgtgatcgctgattgatcaaatccttcattgtatatggaacgacacaaagataattaggtggaagggtaataaaactagctttgctctctgtgattcgctaggctatgaagtatgaatgatgattccaaaattcctggttcatgatataaattttgtaacatggtttttgatgcaaatgtgggccttattatatcttaattgagttgtgttgtgtggcccagtggaattttagtgtttaggttcattacaaaatataaaaaacagatgcgtcttgttttagccgtcacaaaatttagcaaaataaaaacttgatttatgtcattagatgattatgtcatctagaataatatataatatttttaagtataattacattatatatcaggaaactaagttaggttttagtattttcatcggtgtaaatcttgaaactcctaaaatagtttgaaattttaatatttcttttgatccgtcaaaacatgtaatgaccataaccccatctttcgtaaatacaatgtattctttgttttgatgataaattcgtatatattatatatatctttgtaactagtacacatagaaattcgtggaactacaaatgtttgtttaaacaatcattcaaagacgttcaatataataaccaccaaactcttagttttcctctaaatgttcatccaagtaatagattttgatatttagaatttgaatgttgaatttcattgtaggttgttgagtaaagagtatgtaagtttacaaactcattccaatacagtgacatgtgtcatcgaatacatctgcattatcaaatagcaagtcatctacttctaatagatgtttaggcatgacgttgataaattcttgaattgagagatatcgatcaagataaaaaatccgtactatatttttgaatttagatttataaattcttgataaattagacttttaccaatttaaagagataattttaaaactttattattgtaaaggatttcacaatgaaaatttagaaaataaaagttaaatcagtgtcacgtaataatattttggatactatcaatcttgtaatctcggtttagaaaaaaaacaaagattaaaaaaagataaacggattgaactcaattgtacaaaatgtgttctagtgaacttacccgacactaaacttatattttatgtaagtgtgagcgattaaatgctacctgagagattatgaagattctagtgatagggttattcttaaaatggtggaggatatgaccgagaaaatgacaagtattggaagagcctgaattagatatggtttcttttagaagtatggatattgttgcatattggaaaaacaatacatcccgttttaaagaattatcatcaatggcgtgtgatattcttagcatttcgttcactatcgttgcatcggaatcagcttttagtatcggaagtcgtgttcttaacaagtatagaagatgcttgttaccaacaaatgtacaagctctcatatgcgcaagaaactgatttcatggatttcaagaagttggtatatattctaataagaattttgtttacataattgatttatagttggccttgcttgattaatagttttgttggaaacttaaatggctttgggattgcatcttttagattaatagctcgattataacagtttaacccacatctgaactcgtttgcatgtggttggatcatttgttttagccttagttattacaatgtctttaaagaagtgtttgaattgcagtgatactagtattcttcctctcatgatcagtatgatatgtataagagctcacaatgattcttttagctaactacatggtttttattattgtaggtgatgaggtctaaattcatgaggagaaagggaacacacattgtgataaagtttcagtttgagtggctcttgggaattgctgctttcatatacaagtaagtaacaatttctttggttggtgtttcatgattgtattatgcgaagttaagctgtgtggtgtcagctcattagaacaacaagacacatgaattaggtataggattgacaccatttacgttcatcataatgtaggtctgtgtgaatattgtgaagaaaatattgacttcttagaccatggataatgggcgaattcttagaccattatccattaaggaccaaccattggaacccataaaaaatagtggtctaaatagacatacccattagaatttggaatgaccaattaacacttctacttatactatccaaatacgtgaaaataatactctagcgactagaaaacttgattagtattacatttattaattttatatttttttggataatataaattacatttttattagattcaagttcataggctcaaacaaattgactaggattcaaactcgatcataatgaactgaatcattttacagtaaatactcataatttataatcactatactaatagttttttctaatccccgagttgaggtattttaataattaatacaattcgataagatacattttaaaaaaaaacattatgtaagtatatggtcatatatatatatatatatatatatatatatcagaaactaaatatatgaatatatataaaaaagtttgatcttaataaagaatgctttaggaatttcttcacgatataattatgatccatgtgtcccacataaacatccatgttgtggcactcaatgtcaattagacagatacataagtagatgcttgatggataaattctattattaatttcctttaaaatctgaagagtattcttttgctaagttcatggatacggtaagtttccacattttcatcatgtgtttagtttggatacgccaattttgttctgtagtgatgatcttcacaaccaaggtttgaaagcgttgctgacaaacaacgtctagctgaaatttgaactatctacaaaatatgtaagattcttataatggacatctgtgttcagaggcagatctatgttgaagcattacatagacaggtgccttacactattactgaaagttttatgtttatagccacaattattagattaaatcatgacaaaattggtcgaattctcatgaggaccttaggtaaaatagattttaactcacttcctatcttctttcttcttattcctttgttttactttttataattaatatttttttactttgtagtttctgaattttttctcctgtatatttctaagtaaaaatagttaaatattcttatcattttataaacaaacttcaaattcaatacaaaattactaaaaattaatatttttcctcaatgctatattagattttatttatacaccgtttataaatattaattaatggtgccccacgtagaaaaatttcgagatctgccattgtatgttgatctaaatttctggggtgtatatgactatatgtaaaggaacaaacttttgttttagtaaagagtacatttcattctctgcatcttgtgtcaacttttgcatgacttcatttgctaagcttgttttggaattagagtatgcaatattagagtaggctaataatattatctaaacctaaaatttagtggtgtattgtcaacttaagtttgtcctaaactcatcactttataaattcaccaaacacccaactttgggttttgtcttcttttggcaaaattaatactatattaaacttttggattgagatataaaaggggacaattattctttgtgtactagataattaattgttactttctattagttcctgtttgtctctccatatataaatagttaactattatttcggaaagtttttgttattttattcataattctttgtatacctaatatactaataccacataaatcatcgactgatccgcagtaacacgaaaccaatggtactggaaactggaaactggagactggaaacagttagattttacatattttcttgacttaaccgtaataacagagtatacatttattttcctatacctacaaggtataaattttcttaaaatgtattgttgtattaaaatttagatttaatacaatgtttccttgactaattaagctaattaagcacatttgaatgagttgaactagcgaagtacattaaagagatttaaataatatttgggaccaatagtactattattaatttttggataaggtctttttacttttataatgtactactagagtgtataacggttgcttatgattgagtaaacattgtaattgctacagatcattccccattaactaatttttattattattactcaacaattcaccaccttttctattattattatccataacataatttatgtcatattattaattatcagctcttggttttctttttactactaatatgtagccaccttttttatataaagaattatcaattaacaatggactgaaagaatgtatttgaattttgaagcctatgaaaaggcgttgaggaaagaatcaagtttctcattggttttgcagctagttttgtatgtaaatgtagagaaacagaatttacactaagatgtgttacattgtacctaagtgtatgtttttttaaaaacaccttcctgtaaatttttaataacaatttgccatggaaacacattatttgcaagatttatgacccgagatcaaggtgtttgacacggagagaggagcttttgttcttcactagtttttttttttttttttggttcttcatactagttaatccacacttttaaagatatgtgcaaatttttctttgtggaggaaagaaattttgttgaccttttcgtagataaatgagtgccatgttatgaggcgtatggtgcggtattagaagtaggagtgcaacaaaataaaactttggttgttgtgagtttgtaattcatatatgtttatggtacacgtaggaaaattatatgagagaatagatgtgaaaactctctagtttataaatggggtttaagcacttaacaagtggttaggacttacttaacataaactatttgttaacttttggagttttgaagggtatttctgaaaataacacaagagaataggtcatttagtaaaactattgctatataataccttgcatgtagccatttcctttcaccatacaccaacaaaaagaaaccccaaaaagaatcaaaaacataacacaaagttataagaaaatatgaagacagtaaagagtttacctattttagctatgctactcggtgtcataattgtagccgccgccatctccaccgtctccgttgagggccgtaaacatcacgtaaagaagattaaacccaaacaccgtcgtcattccaaaaacactcctaccggctctccggcacccgcaccttacccgtccaccaacgagggcgttttcaacattttctcctatggtgccaagggtgatggagtctctgacgactcaaaggtacgtccatatatttttaacatcaacttgatgcttcaaagaaaaagaaatattaatcttttatcaaaaaatatctaaattagtgtctcaattcttaatttacgtttgcgtttgatttttcgtttatatttagagtcaatgtttttttccaagtaaactcattacataaataatcatattaaccaaaactgttttggtaattgtacacgtaattaatcgccaaacacaagtggaagaaaacattcgtatgcatttgccgaatacattctgtccaaataattgatagtttatgaatttgagcttctcatgaaaataaaaacacaatttgtttttgaggcatttgtaattgagtgcgcaggcattggtcggagcgtggaaggcagcttgtaaagtggtcggagggaaagtggagattccggcagggacacagtttttggtgaaggcagtgacactgcaagggccgtgtaaggaggagacggtggttcaaatagaaggaatcttagtggctccagagaagatagggtcatggcctaattcaagcttgtttcaatggcttaacttcaaatgggtcagtcatttgaccatccaaggctcagggactcttaacggtcgtggctataactggtggaacttagacacttatcaaactcaggtacggacttaattcaaaatataatactaaaaatcactatactgaaagtttaagatctttgttataattataattgcaatcaagattttttgtgttatgtactttgaaagattaatgttttgttatatgttcgtttgatattttttcgaaattgtattatgagattttaaaatatttattggtttttctttctttttttcagacgagaaataagtatatcccaccaatgaaaccaacggtaagtctattgttactaatttttttttttttaactacagattcgtaaaatgtttattgattggcttatgtgaattataagtataggcacttcggttttattcaagtaataacgtcacggtccgtgatataagcatcgtgaacagtccattatgtcatttgaagttcgatgattcggatggagtcaaagtcaacaacattacgatctcttcgccggagaatagccctaacaccgacggcatccacctccagaacacacgtaacgtcgagattcaacactccaacatcgcttgtggtaattcatattttcttacaataaattttcatttattttctttattaattaactatatagttccgatccatagatcattaacatttaacactaaaacgcttttcttaggaaaaaagaaagattttaaccagaaattataacaaagaaagaagaatatattattattacatatatacagttacaaaatgaattttgaccgttccattgttctaattatgcgcgactctatcattctgcaatttgaaatacataaattgataactataaattacatgtatataattgaacatagtggttgtcacgttgtagacgccaaagtgaaataaaatgttaggacgaaagataatgtatttttttctttcgtaaaagtagtattatagaataaaggcattaaacaagaaaagacatcattggtttaataaaaaacaccatttaataacggtataactgtcaccaaactaactttttatacagacaataggcaagcatgcagaatgaaaaggctctcttttcttttatttattgttaatcaattaagaaaagttacatggaccagagattctaaatgtttaaatactaaacaaaaatcatattataaacttcaataatcagtaatatgttataaactattcatctattttgggcaggacttaattctaaaatttctatttcaatctttctttaataagcaactttttacgtatatatatatatatatatatatatatatatataggagatgactgtgtatccattcaaaccggctcctccaatgtacatattcaccacatcaattgtggccctggccatggcattaggtatatgtatacataataataaattttcaattaattttcaatctattactttttcaattttttactgattttttttgtttgtttggtgtatatttgctttggtttgtgatcacagcataggtggactagggaaagataagagtgtggcatgtgtttctgatatcattgtagaggatatctctatacaaaacactcttgctggtgttcgaatcaagacttggcaggtacatatatagataccacatcataccttatataaataaatgattttgtgacttctgacccacgtaaatatagagaccacattatatgatattattgaaatatataaaactaaaactaaaagatagaaatgagaccttatatgaatagttgtaatttctgagaaaacttaacacgcaagtctttctacgtataggggcctaatctggctttatgttcaatttttttttgttataatataaactaatcacgtttgtgtatggtttagttcggatttatttttcgatgtccattgtaatttttcttgtgaatcacgtgtatatatgtatccgcagggaggattaggggtcgtcaagaacctaacgttttcgaacattcaagtaaaggacgtgaaggtaccaatagtaatcgaccaatattactgcgacaagtccaagtgtaagaatcagacgcgtgcagtgtcgatttccggcgttaaatacaacaacattgtcggtagtttcacggtgcaaccggtacgtattgcatgcagcaacaacgtgccatgcatggacgtggatcttatggatataaggctacgaccttctggaggaatcagagggttacaaactcatcagcaacaacaagctttgtgttggaactcatatggcaaaacacaagggcctttggttccttctagcattggctattgcttgaggaagagtaatattggtggttattattcacaaaaagtttctcggtcctatgacaagatttgcccttcataaaaccttaaataaaaaactaatatcagtaatgctaccgattctaggtatctatgtttactatatttgctatttaatttgtgtttattttgggatgtcatgatgtatccttttgcttcccctctgcaactttttgtggatgtgagaaggtggtggcttttgtatcagctttttattttgttccatagtgttatgatgtatcaccccaatctcagaagtttaagattactttcacatattgcttgtaacatttatttaatattaatgttattttttagcttcgtttctaattcaccatctaaatttagtccagtggagtttggtatataaattgaagggaactgatttaatgtccaattcttttttaggatttgtaacatgcatcttggttaagcttttttaatcgtttattaatatgctagttgatatctaaaaagaattaacaagactgtaaattgattagtgtgcaagcttttctttttataatagcaagttgatcatttatgaacgaagaaaagaaaactagaaaatgcttcaacaaaaatatgaacgtatgaacttttaatttccttaaaagctacaaacaaaagagagtcttataaataatttcttagtggagttcaaaccaacagctgatactactttgcctttggtggaaaggccacattctctatatgataatgctactaactacgaaacctaacttttaacagtataacaataattatccatcaatcacaatatggattgcgtattagaaaacttataaaatacatacttatgtgtgagcaaattctctccgtgagcaaattcttagtgtcgactattaacaaataaataaataaatagttatatacaaatttaatttgaatgatatttttaatattccgatcgctacaagaaaagagtcatattgcaacataacttcgcgaagttaaaattagacagaatattaaactaagaaaatttatgactatgaatgtaaagctcataactcgactcgaataatggggagataaatatttgagcatttgaaggtggattaaatctacatatttatgattacgaaagtcatgagtattgagtaatgtgagagacatagagtgtcttcaccgtccatttaggctctctctctttaatcaaaatctatgtcgcacgcgtatgtcatatgtatatcttttttttttttttttcttttaaatccaggaagttttgtgccgaagcccgtaatcccctaggtccgaaaccacaatatgcaatattagtttcgttccaaacgtcacgcgaaccggcgatctctaagtttcgcctagggtctttaccaattgagctaacgacacttggtcatatgtatatcttttatcaaaatcaatatctcttttccctattttcctttttcttccctatatattccaaacattattatacatatatacttttctactattaattagttaaagacttgggtacatatagtttataatttaggagttcacttttgaaacgcaacttcttataacatggaggaacatatatgattatttcttctattcataatgaagaacttttttttactttcaacacgtattattgcaaggaaataaaacatgaaagattcttagagcatctccaatagtggctaaattggattctctcaagtggttctctgaaaaaaaatggttcaaaaataaatcaaaataatgtattatcaagagagacagctctcttgagagattttttgagaaggaagagaggcgataacgtggcgcattctgattgatcgagttttagaagaaaaaaaagagagaaaaaaacttgtgaaaaaagtccaaacagttcttctttctccgactcattctctctctctttgccacaacaggcgatggcgatggagatcgattttctccgacgacgattgaggttacaattgagaatcttcttctctgatcgtttagattgattttgaattttgtaacttgttatgtaatttagtttctctttagattttcttcggatcattttttataaagagattcatgaaattagccttgatgccgtttttgttaatctgtctgatcaatgtcttgaattggagtctgattttgcggttgattgactctaatttttgttttcgtttatttccactgaatttgtggttagtgattgactcttagttgtaccttcttatcttttggttttttcttgtatgttaatatagaaagacttgaactttgatcatttgcttgattacaggttgagatcagataatttaattggaagattttaagttatggataacagaggtcagaaacgatggaggttgtggaagagttacatgatgataagagagcttgtaactctcaggatttcaggctaaagacttttgattattgagtacttggacgtttgctgagcaggtacgttatactttccaccaaatgaccttattctttacacctaaagaacgcaagttttgatttcatactaactattgaattttctagtgtttgcaaacacttgagaaaatatcctgacatgagccggtagcctgcttgaatgctggagcaattatggcagtgctttcgtttattgatttcttctcaacaagcatacaagttactcatcccaaataaatagccttgctaagacagatggttttaacatcgcatttgcttcagagagtcgcaatttctactgtggtcaatatatgtaagcagcttttttctgagtctctctcgcctttcatggatgttgttccaatattatgcactcttcttcaatatgaggatagttaggtaaaatgatgctcaactcttttgctgctttttctcactgaactaattttcttcagtaaattattgatagcatatatgtttccatttgcagctggttgagaatgtggctatttgcttgacaaaaatagcagaccaagttagtgagtgaccggcaatgttggatcaattaaggagaatagtagtgttttgaacttggagatattgaatgatttgattgccttgtttgggaaacttggttaatccaataatttttctaaaaaccgcattagagagaacctagcattggactggaaaaaaaacttacaagctttcatttcacaattttacaaaatttatattaaacaattggtgagagcccccatggagttctcaccattggagatgctcttaaaggtccaaacatactctggtttctggtctaaagaaatgatttacagttctaaagtttctggtaatcgaaaaagttatatatacacactataaaagattttgtttttttgtcaaagataaaatatttattttattatttcatcaaatatcaaaaaagttatatatacacactttgataaaatatcaaagataatttatttttttaaatatatatttttgaaacacttagtttgagtctttccaacctatttatctatacttgcttttttttttaaggagtttttcacgtggaatctaagcccatattgtataatgggtttttcacgttgaatctaagtccaaacaatttttttttttttttttttttttgctaagcttgtaaatatcattagaaatgaaagtgaaggaattacagaagcaacacctaaagaagagtaatcttggaaaaaaaaagagtaaaaaacaagattacaataaggctaaagtgagatacaattatctaatccaaaggagcaagagcggacgccaacgcttcttatgacgtcttccggaaatgatgttgcggacttgacgatcaacgagcttgaaggttccagaggcagtgatccaaaggttgttgtgaaggtagttattacgctgatgccaaatatgataagatacggcttgagaaaccaccttgcgaagcagagagggggcggaagaggttgaatggcgagtccaagaaagcagctcggcccaagttagcagctgccgatgagatggcgaaagtcttcgaaaaacctgagtccaaattgacgcagcaaactcgcaagtcaaaagaagatggtcccgtgattccggtagagtagagcaaagacaacaactagcatcagaaataactccccatgaaagcaggcgttgcctagtcgggaggcgattaagagtagtaagccacatgttgaaagcatgttttgggactgcacccttaaaccaaacagagcttgcccaccgtttaatctcctccctaggcctcagcgattcccaagtcttggaagaggaaagatccaaacactcagaatcgtcaacaacccaagcatagttatccttctcaagggttgagcttggaaggttaatagtgatcagatgagagtggaagattagagcattgtctgatcttggaggcgggataatccaacctatatcaccacaagcatcactaacctttgaagcagctgggatacacaaagaggaaggccccgcttttcctaagaacttgattaattgaacacaaggggtccagttgtcgtaccaaaaggaaatcatttgaccattttcaactcttgcctttaggaacctttcaccaagaggtcttaaccgaagcagcgtcctccaggtccaagggtcccgggggctctcctctagttcccaaaacgacttatttttaatatggtgaaatttatgtcaattcgcccaaagcacgtcattatctgcaaataagggccaaataaagcgaagataaaaagttttgttccatggcgtgaacctgcgtaagccaacaccaccttcattctttggtaaacagacacctgaccatgcaatctttgctcccttactagcatcaatgctgccagaccacaaaaatctagaacaaagagactcaatctttttcacgcagccaagaagaagaacaaaagtcgacatccagaagttgacaagacccgtaatgacagaggtgatcagctgaacccgaccagcaaaagaaaggctcttaaccgcccaggatctaaaccttttaacaagctcatactctgaaattttaagtttcctactcatcagcgggagcccaagataacgaattggcaaagtgctgattgggaagccgtagtgcgaaatggcaagagcctcaacctcatcagttccagccagatacaaatttgtcttatctttgttcacatgcagccccgaccaagaggcgaagtcatcaagagcttcactgatcccatgtagagaggagcttcccccatcgaaaaaaaccataacatcatctgcaaacattaggtgagagattgagagatcagcggttttaggatggtagtggatataacccgcatcaaacctagctttcagcaagctagagaacacctccatcgcaagaacaaataagtacggcgataaaggatcaccttgtctcaaccctttgttacttttaaaaaacccactgctagaaccattaaccatgactgaaaaatagggcgttgaaatgcactgattgatccagcaaacaaacttttcagggactgcgagagcacggaaggctgagatgatgaaatcccatctgacgctatcaaacgctttccgaagatccactttaagcataccccgagagctgatatttttagtgttgtaaccatgcacaatttcagtagctaacaagacgttttccgaaagtaaacgaccaggaaggaacgcagactgagacggagaaatcacctcatttaaaagcttctttagcctagaagtcagcagcttagctatcactttatacaaagtgtttaagcaagagattggcctaaagtcagtcatctttgaagagtttgtgatttttggaataaggaccaaagttgttgcgttccactgcttcaataactgacctgaacgaaaaaattcttggactgcttcagtcacctctggacccacaacaaaccaaacacctttaaagaactcagaggaatagccgtcagggccgctagctttgttcctgggcaaagagaagaaagcctcttgaatatcaagatccgagaaactcctttccaagtcattaatctgatccacagaacatctgaaagaaagaagcagattcatatcactctgtgccaaagagttctcgccctctacaccacataggagggattcaaaaaaattacagctatgctcctttatgccctcctttatgccctgctgggtctcaatcctttcaccaaaatcatcaatcaagaaatttattgtattaatcgatttacgcatgtcagccatcttatgaaagtaagcagtattattatcaccctcatataaccaagagatacttgacttctggcagaaaaaactctcctcagccttagcaagaatttgccattttctggtggcctccaactcaagtgtagcatgaacaacagaagggttggtaagagtaatcctttgacggtggagcacaatagcatgggcctcagagacccttttctcaatatcagagtagttctctctactaaaacaacaaatagggagcttaaggtgcttaagctttttggagaccctgtacatcgcagaaccagagacattgcaagagtaccaattctcacgaatcagctgcaagaaatccgggttatgtaagaaatagttgaagaaccgaaaaggtcgctttgctttcaagaccgctggatctaacaccacctcacaagagctgtggtcagagaaatctggctcaccgaagttcgcgtaagcggatgggaagagagtgttccaatgatcattgaccaaaattctatctatcttttttgccaaaggtctagagctgcacttattccaccaagtgtaagaactacctttgtagacgaggtcatacaaatcagaatcaagcaagcaacttctgaacgcacgaatcttcctgccaatatttgcattgatagcactttccggatttaagatttgattaaagtcgccaagaacaatccacgacctgccaacaacaaccggagataaggcaagctgaaccaactcattccaaagctcttttctggtaccctcctcatttgaagcgtaaacaatagacaccacaaaccaagaaggagaatcaggaagaagaagctcacatgtgatcatttgcagggacctaccaataacaactaccttcacacttggatcccacaaaacccatatttttcccaaaacagagaattcataattctcaacaaaagaccagccaggcaaaaggttagagatgaacttcttctccttaggctgctttacatgtgtctcaatgagacctccaaaaagtggtttattcaaaagaaaccatttcttaaaaccgcggcggtgactggaaatattaaatccgcgaacattccaacaaaagagcttagtacacatacttaagctttggttttgaggcccttgcctcgtagattcctcttctgacgcttagacaaaaccttgatgaaagcctcttcttcagtgtcagtagataacacgtcagaggaatcatcctcaactgcacaaactgtgcctgaacaaatgccaacctcctcattttcagttgcattatcaatgattacagcaaactgtccaacacttgaatctcctttctggaccttatccaaaccgagagagatcccattggtctgaactgaaatagacccaaaaacactatcttcaaccttaagagacttggacttagccacattcttcacagaccaaactaagccaccatcttcctttcctttgacagggagccgagtttgagtctcttgacccagagaagcttcacagaccaaactaagtccaaataataaaatcagtaatttatcaaattgaactttttttctccatcttatacttattatttattgtaaattatgagaattattaaacagacgtatgggcttaggttccttcggacagacgatatttctttctcgacacttccttcttcttctccatgtttttgatgaacacctttaatgatcttttttgcgtagaatcctggcgaacggctataattgtataatcgttggagatctcctaataaatcacagtatctgagattcgaattccaaatccctaggtgtattaatgaacatttggtcaaccaaaccaatgtaccaccaaaggggcttacacgaactttacttttctttaggaagaaaaataaaagtcagttcaaaaaaatacattgtccgtttataatgggcttttaacgttaaagccaagcccataatgatacatgacagcccattcattttagtactctaatttggggtgaataatccgtcccgcgttaaaaaacacagaatcaaaattacttcatatcttcttcacgtgagagtcacgtgttcggtaaaagtggttgaaagttgaaacccattggggaacaaaaacctaaaggagtctcatttctgctgggtcgagaaatcgctgatagagagtagagagacacacgcaggtacgtgaatcttcgcgacttcgatctctttgtgtatcaaatcaatccgttcttgttaaagttttcatttttaatcttccaatttcaatctgggtctacttaaatcaatcgaaatctcaatttcaagctgattcttataaagtttcgatttttcttgctgttttagattttgagctgcgtgctctgttttaagcttgaaggaggaaaaacatggcagaccaagaatcagataagaacattgagatttggaagattaagaagctaatcaaaggacttgaaaccgcaagaggtaatggaacaagtatgatctctcttataatgcctcctagagatcaagtagctcgtgtcactaagatgcttgctgatgaatacggaaccgcctcaaacatcaagagtcgagtgaatcgtcaatctgttttatctgccattacttctgctcaacaaagattgaagctttacaacaaagttcctccgaatggtcttgttctctatactggaaccattgttactgatgatggtaaagagaagaaagtgacgattgatttcgagccttttaaaccgattaatgcttcgttgtatttgtgtgacaataagttccacaccgagcctttgaatgagcttttggagtctgatgataagtttggtttcattgttatggatggaaatggaactttgtttggtactttgagtgggaatacaagagaggttcttcataagttcactgtcgatcttccgaaaaagcacggaagaggaggacaatctgcgttgcgatttgctcgtcttaggatggagaagagacataactatgtgaggaaaaccgcggagcttgccactcagttttacattaatccagctacgagtcagcctaatgtctctggtcttatacttgctggttcagcggattttaagaccgagctaagtcaatcagaactgtttgatcctcgtcttcaagctaagatattgaatgtggttgatgtttcttacggaggagagaatggtttcaaccaagcaattgagctgtctgctgagattctatctaatgtgaagttcatacaagaaaagaaattgattgggaagtactttgaggagattagtcaagacactgggaaatatgttttcggtgttgaagatactttaaaggctctggaaatgggtgctgttgagactcttatagtgtgggagaatctagatattaataggtatgagttaaagaacaacacgaccggagaaatcgtgattaagcatttgggaaaggatcaagagaacaaccaaagcaatttccatgatgcagagactaatgcagagttagaagttcaggagaagatgcctctgcttgaatggtttgctaacgaatataaacgttttggttgtacacttgagtttgtgactaacaagtcccaagaaggatc

SEQ ID NO: 1051 - DNA, 86139 bp, Arabidopsis thaliana
gatccacaccatatgcaccaaacaagatatcaattcttcattttgttttcatgttctaaacacaaatcctgaaattgctagattagtttttttggtctcttcaaatttgtgcttaattatcaggttcaaaatatttcggatacgctgaagcaatttaaattatcaggaggctacacgccaggtgttgaatctaaatatagcttatgcatagaattatatgaaaattctttcgaccgccgtgataaaaccctcgaatatttggctgccaaagactataacagcgtaaacactgtagtcggtgaaacgtcgacaaatatgtttacgtgtattgatgatttgtcatccatgaagccaataccacaatattttctgacggaaactaatgatattaaaaatttgtctaccattatcttagtgattctcgaatgtttcataagtaagagaaaagaattctgtaattctcgcaatctatattaataataatattagtatgattgttgtcattatccaatcttaatatataaaagatattaaaaatataaaacttttcttgactccctatgcttacgaatctctcattgctacattacaaattcttttctaaatcgttttatttgattcgctggctcgtgagttgactcgtgagctgtttctataattgcttataattttttttaccggaggtcgttggagtccggcagtggtgttgatttcacgagatgagaaagagatgacgttggttgtcggagatgtcgatgtcgtcgaggaagtgtgttgttgtcaaaaggtggcgattgttattgggtttgaccaaaacacacaacattgggctcttattgggccagacgaaattgacataaagaaaagaagaacaaaagtggcccatcacatctatatatctctacgtgggatatgatagttgaggtaggtgtgagacaagacacaaagggagttctagagagaaagagaagaaacgagagtttattcttcaagaagctttttccttctttgttctttgtctttgatctttgttcttcttgagattgtacctgaaaccaaagacaacatcacaagtcaaatggtgtttgtaatctctttgatatagcgaagctttggaagcaagagatctcccccgagacatagcggttaagccgtgaactcggtatcaatttttgtgtttgtttctctgacaagcaaccgttcagtttcgttttctctacagaaccaaacggctaaggctaagaagctaaggtgatgactcaaggagaagccaaatagactacggttagagaaagccgagtgatgatggttcgagtcaaacagaagctaaagctaaggtgatggttccaagaatcaaagtaaagaaggaggtgttcaaaggtggacaccaagaagaggagaagagaagcttacatgagagagaggaagctgaagaaggctgcatcgacaaccggaagagacgtgagggaggctcacagagaagatgcggagaagacatggagactgcttgagggaaagagaaatcccaagagctccaatatctgaaaatcagaaacaattgacaagacaggtcaattgtagaaaagagaagaaggagtagttgaattgaagtgataaagattaaagagtcaagagttgcctttgtgtgataagaagaaaatcaccaagaggaagacaagagaccgagacttcactccagatcacctagaaaagaagaaagtagaggatgagttcgattaaggaaaatcgaagcagagggagatgaagaacttcacgcacaaatacgtcgagaagaagaaactcgatgcaaggatattcaaagcaagagggagatgaagaaggcaagcttaccagtgagctgtgccaaagatcgtgaaagggattcacacaagagaagaggcgaatcaccaagagaagaagaagcaatgggattgaattccctaaaattgaattggggatttaatctacggattcttgggggagtgttggaattgtgaatcctagattaaatcctgcaacaaggaaagctttacgaaagtaagagaaggagcaaggaagaagaagatgtcatgacaagaaggtcaacgacacatgaagaggaaggaacaaagtcaacagaagagatgttgggctttgtgttttgttgtaatgggctgcagatgaattaggcccaagtatgtatagttaatgagtgttgtgttatagagtcaaagatgttatgtaaaagtgaattaaggagttgggagttccaacatagtagagtggctgatgtaagtcttaagacaatgatgtggtctagggtctaagtatgtgtaatgtagaaagtggagcaaagccactatatgtatgtgtgtcttgcgtaagattatccaagtttattatcaatgtagacatgcaagtgtttaaacgtgttcttgtaatttctgttttaacaagaacaaaaccgaggttgtgagaaaagcagagaacttctggtgagaattacaataaatgcacaatcatcataagttttaaaaaactaaacaactacacgaagataacgcagaaaagccgggtactttttgttttcaattataaacgtcatgtttctcccctctatagcgttagaaacatcagaatctcctccaaatctttcttctgatttctctatttccttctcaagaccctatcgaaagcacaaatcatgccaaacaataagtaacaaaaaaacacacaaaatcaattagtacccgcaattcacgcaacaaatttgtatgcatcttgattcaatatattatcatattttctcatatttagaatttgttttcatagaaaactcgtaaattttaaaaatatcattcaatgagttagtttttttattaaatggctattgtaattaaagatgaagtactaataaatttagagagactaataatatattatttattttcgtttataaatttaataaaatacaaatttacattttgataagttttatattatttgattacaaaatatttagaaaactttccatattttcaaaaaaaaaattattttcttattttgggtttttccattttacaaaaatcaaataagaaataaaaaataagaataattttataaatattaattagctagatggcttataaagattggtcgttttaaaacttaggtggacggctttagaagcaaatagcttcaacttttatataatattgattagttgtttgtgatttatttaattttccctaaacttttaacccattaaaagagatgcccttacatcttagtcaaatagtaacaacatgtatttcaaatctaaggaagaaaaattatcttatgggttatcatattactgttaaatcaaaatcaaatatttttcttacctaaataaagagtcaaattatcaaaaaaaaaacattgaattgtttgacaaattgctaataaattaaatcattgtattatggtacataatctaaaagcatttaattttgaaaaacttttcagcctatataaatctcacgtaaattccaaaacacacaaaacaagaaaaatggtggcatacgtcgataaaaacttttcattggcttgttttttggttttacttctttttgttgactcatcgtatgcaaggtttaatacgttggttacaaaagatcagatccacaccatatgcaccaaacaagagatcaattcttcattttgttttcaagttctaaatacaaatcctgaaattgctaaattagattttcctagtctcttcaaatttgtgcttaattatcaggctcaaaatatttcggatacgctgaagcaatttaagttatcaggaggctacatgccggatgttgaatctcaatatagcttatgcatagaattatatggatatgctttcgataatcgtgatattaccctcagatatttagctgccaaagactataacagcgtaaacactagggtcagtggaacgttggaagatatatttacgtgtactgatgatttgtcaacaatgaagccaataccacaattttttatgacggaaagtaatttgattaaagaattgtctaagattctcttagtgattctcgaatgtttcataagtaagagaaaagaattctgtaattgagatctataataaaataatattagtatgattgttgtcattatctttttttaatatagaaaaataagaaaaatcgaaaacatttctccactccctctacctacgaaactctcgtttaaagctacattcttttctttttttgtcatccaatctaaattcttttcttaattgttttaatcgacgagttgactcgtgagttgactcgtaggctgtttctctaattgcttatataagttttatacgatgatggaagaaactagaggaaattgtcaaaagataagaatccatttcttctacgcatattggtggttttttggtagaatttgttctctatgttctgttaaggttataaattctcatcttgtttttgcttaggatttgagattaatagtagaaatagatgattcatcgcatcacttttggatttggaatcgagtccttgcaatttattgtattcatataaaggtatgatatcagaaaaggatttttgtttcatttgtgtgatggaccttaaaatgactatatataacaaaaacacaattttatttatatgatgatttatatatccatcattctgtgaacggattagattttctttgcctcgtagatcaatggtttgtctagtatagtatagacaagttcaaatttgtttggttttgcttaacgaatcattaatttgtattttaatttcatcttccttaatgcaatcgccgacgtaagacaatcaattcaagcaaagcttcaattttctctcttatccattatcataaatttccaaaagcctaatcctttacctgagaagcatcttttctcatttctggagcttacgaggctgatcggtctcgtccgattgaaattggtatccacgttcttgaaacaatcgagacagaaggttaagattgggatatatttcgcaacttggtgggcattgaacgatgtgtccaataactacaacaagaaggttttgaatgcttttccttacctgtggctaactttgatgctttctcttgcttgtggccctctgatgatgcttgtctcttgggtcagtagagttgcagatgctctttaaatcgatcttgatttcttgaaaactttgttcccgttaaaggatctaactttcattactgttgtttctttataaattgtcttgctttaggtgtgtttgatcttgaaagggacacatatttagattaagtgtgtaagtaatattgatggaactgtatgatgatgattttgattgttcaggtggctttggcgcatacaattggacatgttgaagcgatagtgagtatgtctaaagtagtagtgtccttcacacacacatcatcaaaagcagtgaggcaacctttagcgtctttgtggatgagtatgtctgagtaacgggtcataatttgaatatatatatatataatttcatacatattattttgaaatttataatcgtatatactacaataattaataacatattaaacttttttatgtgtatcatgtgatccaatttttaatacaagctggaaatcatagaattgacgggttttgatcgatattaatataagatggtatactataggtgaaactctaaaattaacaatcaaaatacaagtgtataatcttaaacactaaataatataaataatatcaacaaaacatatacaactcgcagtgtactatacattaaaaatcaaataaaataatatcatatatttataaatcatctttacaaaaaaaaatttaatttaactaaaatataagcctatccccggtttaccgcaggttaatatctagtagttgactaaaatgttcgtcttttacgatatgattttatttaaaaaaatcgttctaataattgtacgtcctagcatatcatcgtcctctctataatctatatgttccaaccacctaaatatatcaaaacctttttaaaaaagtctcttcccaatatctacatatacatttttgcagccattttgtaaaataaatcatgtagttgggacttatttacaatggctgccactggattttaatatttgtttttgataattagaaaaaaaatcttcgaattaaatatttgacatttaacaatcttccttaaatctctccacattaactacacgattagttattaaaataaaacttccaaaatatttaatatcatttaattaccacaaaattatcatttttgatattgcttttctccatgactattacaattcaattataatcttcaaaccgcaaagatatttgatagcatttaattactacaaatttacaaaatatttagacaataattcataaacatatcataaataagatcaacattaataaaataaatagtttttttatgggacgggttggcgggacgggtttggcaggacgttacgtaataacaattgtaaactataaaataaaaatattttatagatagatacaatttgcaaacttttatgtatactaactttaaaaaataaattgtttacgcggtgtaccgcgggttaagatctagtatcactacaaaaaagcagcagaaatttcatcctcaaaaatttgaagggattttgatcaagagggaccgatatagaactctttgcaaattcattgaattttcgaaagaatttctttctctcggaaattgacgatatttccgggcatttctgacaacatacgacttttgatataaccgaaccttattaccaccatcttgatcctttttttttaacaacataactaggggtgtcaaaatgggtcaaaattcatgggtcaactcaactcaactcaacccatgaaccctaatgagttgaaaattttgactcgaatgagttgatgggtcaaatgagttgatgagtcaattggtgtgatgagtaaaatgagttgggttgtaatggttaatagtttcaatgatttacccaattaacccatcaaattttgtaaaattgaattaaaccaactaaaatctctaaatcaataccaatttaagtttaaccaacacatctaaaccaatttaataaaaataatatttttccaaatttcttaaatatacaagcgatgaaattgagaaaaagtaaactcgtaatttttccaccaaaaaacataaacccatgatttttctgccaaaaacgtaaacccatgattttcccgccaaaaacataaacctgtgattttcccgccaaaaacgtaaacccgtgtttttcccgccaaaaacgtaaatccgtgattttccagccaaaaacgtaaacccaagattttcccgccaaaaacataaatccataattttcccgccaaaaacgtaaacccgtaatttcccgtcaaaaacgtaaacccgtaattttccttccaaaaacgtaaacccatgattttcccgtcaaaaacataaactcgtaattttcccgccaaaaatgtaaacccgtgatttttccgccaaaaacgtaaattcgtggtttttccgccaaaaacgtaaacccaaaattttcccgccaaaaacgtaaacccgtaattttcctcccaaaaacgtaaacccgtaattttcccgccaaaaatgtaaacctaatattttcccgccaaaaatgtaaacccgtgatttttccgccaaaaacataaacccgtgaaaagtggaatccgtaaatatcttaagtttgatgataatgaattaataatgataattatttattattgttttatgataataattaattaaattattacttaaatgggttaacccatttaaaacctcaacccatcaaattaaatgagttatgagttgatccaacccatttaacaacatgagttgggtcaacccataactcatttaattctaaactcatttgattatgaattgagttgagttgggttatccattttgataaccctaaacataacaacgataataacgaccttcccatatttcaaaaataggctgtttctgatctataaggtccaaacaaaataaattttagttgggtcttttgaaaattttaaaatactagtgagagcagcttgaaatttgtaaagattcagaaaatagagcctgttgttgcaataaaataatgttttggggcttgtttgtatatcagatggactcgatagggaccggctctgaaatagagaagagccatttgcgtttcattcctcaagagtaggcgttttagcctggccaagtaagtccttttgtgtccttctaattagtatttttaggtctaacaggaacaacaccagggcatttatcttttagcctttgcaaaaataacaacgttttttagtacgtatgaaatcaaaccgcatcaaaaccgattcactcaatggaaattgaactactttagtaatatattttacttttagtttttattttattttatttaaattagattacatttctagggtgttcacatttctatacatatatacgatttatatttagatgttcaaattttttgtgttgatttaaaaagtttggattattctttttgtatttttcattgtcggtgtttttcaacaaatcgacaatgttataagaaaagtgttctttcaattatcaagataaaaaacagtagtatggtaaatttctagctggaagactatgattttttccattctagggttagagactaattgtgatggtacatagatttatattgtcgcatataataatagttaatatctttcatagaagaaaaagagtttgcattttacaaaaaggaaacgcgaaaataatagagttacttaaagttaaatcagccaaaagcttaaaaaaaaacataaaactaaattcatatctcatgaatccaaacatataatcaagctgaaactcgtttagcttgtccactgttgccactaagttgtaactgagagttaaccttagaaagattctcctcatcttcttcatcttcatcatcttttggtgttgtcttgtaatagcaagcatagagtataagttgtactgctcctgataccgttccaagtccatttccaatctatgaaaaaaataactaagtgaaactactaatagaagaagaatagtatatagtaacatatatcatttaataaacttaccaaaatgaaaaggtcgaacttaataagtgcataaataacccaaacgacaccattgaggaaattggcaagtgagagagagaatggcatgtacttcacacttttggtcttgatcaccttactctgtttcaatcacaacaaaaatatcatgtttttaaattattgaaaatgagagaaaatactaaatatttaagaaagaaaagaagaggatatttataaataatattttaccatgatggtgagaggagcaatatacatgagactaacaaaaatgacacaaaagattccaacaaaagaagatctctggttatgtgtgtggaacaatagcaatgtgcatgtggctactattcctacaaacaccatctctcctattaaccatagccccactttcacctgcaccatgaaccaatttgattaaaataatttcagaaaaaaaaaaaaaaatctacaaacattttgttttgcctatcactatcctaaaacagaatcaatcatagtctaccacttcttattactataatgttttagctttcaatttaagccaaacctaatagcgattttaggtttagataatgattggaaaaaacatttaataaaattaagtgaaaagaattgagatatgaatggaaattactaaaccttgcgactagttggagaaaagaagaagaagatagcgagatacaccagctcaatggctaaaccggtaccatttatggtgatcacaaggagactatctggttgaaccattggtaagccataaaagacccatagtgcgcaatttagaaccgtggctaagtatgggtcagctttgtactcctccacctttttcttcttgtatatggttatgaacgtaggtctgcgtaaatatacatacttataaacattaatttaagagatctataagttgttataacttataagtttatagctagatagagagagattaattataatgattacatgggagataagaacaagaacaaggagatgacatttcctgcgacgataaacaaatagtttataaagtattagtaaacaaagattagagattcttcaaaatgttcttatacatacgaaactcatatttatacgtaccacaaatgccggcaatgtttctcgcaactgtagcgttaaccatttcacttcaaaagaaaaatccgaactagaacaaggagcaagaacaaagaagagagcgagcgagatatatatgtaattcggtatgttaaacttgtatggtttttgcatatatttatagatagaagatgagatgtttgtataaatatagatactcatgtataccactatgatataagtatgtgtatatgtattgatgacgaagcaaaactcaagaagtaaaggaattgaaatgaaaacgaccttgaatttttgtttttccgttttggggaaacaatcatgacatttatctgaatatctttcaacactttctcgttggcttattatttttggatccatgattataactattatgcctaccttacatagtatacgtgtgtatatgtatatatacatgtatatttcacatgcatgtgattgtatgcaagttcctttgtaatattcttattcacgaccatatttgaatatttaaaaataaaaactatcaaaaagttatccacgtgacgtgaatgtaagcgagcactctgatagagaaacaaatcacgtaagatatattttcctctccttttccatctttttggacgaattttaaatatgcgttgttatattataatatatatatatatatatatatatattatatggtaaaatatttgttaatttgcatggatttatagtatatattttctctgcttaggagacatctcatttgtttgcgatagttaaattaattcatattacagttacaaattaaacgaatgtttacaaaagtaatgatataaagagttcgagtttaagtctgtattgaaataactaatacacttatttagattatttctaatgataaataaagtttcgaagcgaaaggtaaatgactttacaggtgttgtgagaaggtagacaaacaaatgatttttgtaactttaatataaaataaagtaagcatgcgacaatgtccatttcgagtttttgatgccgatgtaaccatattgctaacgatcttttatgaaatctatggacgataaaaatcgcaataatatatttgcttcccggccggtgcactttacctaattatttttttgtcaaatagatttttatttttagctttgaatttgaatatagaataagtattttcgtagtgatatgagtaaggtataccaacaactagatcaattgtttattaagatacaaaattagttttactgagatattacatggtgaaaaggatgtttttttcttccaaaaacaagattgaaataagaaagttatactattaaaaatttaaaatactaatctattcacatagctagtctttcagttaaacatttatgttgttgatcaaaattattatgaaaaatcgtttcataatggttcgaatatttctaatgtgatttcaataattgttttctactatgcatatttcaaatagtaaaagtctgtttcacatactagacaaattatttttggtttcggtcaagaatcagtctgttgtaaaaaaatataataacaaaatattatatagttggattaccaaaacaaaatctatttacattcactttttactctatgggtgtttaaaaaatttaaaacaattaaattatttacaatttacgacaatggatcatattatcaaattctaaattttacttactaaaatatttcactatatatgtttgtatatgttgggggcagatcgtcatctccgtggaaccactaagttgagaacaaatatgcgaaagtcagcaaacgaacatcaaacaaaagcatttggtccaaaagtttatcgaatgaaaatttgtaaccaaaaaaaagtttatcaaaggaatacaaaaaaagttaaacgatttgctttttaaaaacatttttaaaagtttatgccaaaagtttattaatttattctaagaacatttttaaaagtttataccaaaagtttataaatttattctacgaatttttttttcttgtattgaatgtaaaatttatttaacaccaaaaaattgttttacaacggatttctttacccaattatttcatgcatgcacttattattcttcaaagtgatgtgctttggtttgtgcatcattaatgctctctcttcaccacatcacaacgtcattaatattcgtttggcaaattatgatttatactaacttatctattactatagtgatgaattttttaactctatattaattgtcttctagtacaaaaatttattcgaggcgtaaaaatactctcgaaatggaattggaaaccaaaaatctcgtgtataaagctttcttctctagggtgattgcttgacaaaatgtcacacacactataatggtcaaaccaacaagtccaaccacaatgattttttttttttacttttaaacaataaaatattataacccataaccaaaaacgactactgaacaatgttgttgatgtagtttaagatttgatgaatttgtaataaagtaaagttcaactgcataatatatagtagtaataatctatcgtattttgattactgaattcactatcttgatatttttttcaccagtaaagatgtatatagaagatatgaaaagttttgtaaaaaaaccaatgatctaagctgatttatctaagaagaaatgtgtcgacctaaatttcatatagtagatgtatatatatatatagtatgctaaagttgataataatcgaaagcttttcttgtatagatagatagattagatatgatagcttattaatgttctatatagatataactttaatttatacactatagatttcaattaattaattttaatacgttttacctaacaaaataagaaggtaattcatcatataggatggttacatcttttggaaatattattatattatataggatatctacatctagcttgactattagctaacctatttcaaagactaaattgtaatcagggtttcattctaagtgcttttttttgttaagaaggaaaaaaaccttgaaggcaaaatttattgtaaacaaagaatccaaaatgcgaaccaataagtggtttacacgtaaggcatttcacaacaatgaaataatcattctacgtgcgtagaacaaataattatttcttaaaatgctaacattgtttttttgagaagagctatatattgttgacataaaaataaagcagagctacttttcttttactacaaatgagagagttattaaacccacattttgattaattattaatatgacttgccaagcgaagtaccaaactgatttttgagatttaccaggcgattaatttgtttgtcatggtaatgctcatatttcaaatcagttttaatatcgttgttgtgtatattatatgggatttaaatttgatagtgagaccaaaatatttgggcacagtgaaactaatatcggagtaaaccaaacagtccaaatccacatgcatgaacgtttcaagttccaaatagtaatatgaaaagaccaaaacaagaaaacatcaatccacaatcggttgttatccattactgcaattgtaatgttttattctattattttggctcaaaaaaacatattactttataaattttgtaccgaacacgatagaattgaatcctaacaaggaacaattccaaaccgtccatataaaaaaattgtctaattaaagaaagcaaaagctttgcggtatctctcttacaaacaaaagtagacataaagtttgaataattgcatcatgtgatactatatactattcaaacaaagaaagtcccacccaggatgttgaattcgccacgttatatatccaaaatcttaacagtatttatttatatcttccaattgttatttttttctgatatccgaactaagtgttgataatctaacgtttaattaagacgttaatcaatcctcccgaattaatagagttgaactagtgatcttgcactcactttcaaaactactagacgtctagttattaccatttttaaagcattttagtcctcgctcctaatgaaataaaagagaattatgcaattgactactataaactactctatgtgtatgatgaaaagaaatgattgggaagcaagaaatataatcagattaagaaatgattgtaattcgaagaagtgtaatcttcaaattacttatcaataaagtattttttttagcatcggtcaagacattggtacgtaagcatatattacgtatcatggttaattttggtttctttgagcgtaaattctatttacaaaccaatcagaacatgatatatggatgtcgagtccacaaaaagcctcacaaagattacttttatgtatgaatcttttggagatgtcccgactaatataagtaggagaagctagtgtgtatccatcacctatggagaagttggaggattatatacattatatataggggtgtcaaaatgggtcaaaattcatgggtcaactcaactcaactcaacccatgaactttaatgagttaaaatttttgactcaaatgagttgatgggtcaaatgagttatttggtcaattggtttgatgagtcaaatgagttgggttgtaatggttaatggtttcaatggtttacccaattaacctatcaagttttgtaaaattgaatgaaaccaactaaaatctttaaaccaatgccaatttaagcttaaccaacacatctaaaccaatttaataaaataaatatttttccaaatttcttaaatatacaagtgatgaaattgagaaaaagtaaactcgtaatttttccaccaaaaaacataaacccgtgatttttccgccaaaaacgtaaattcgtaattttcccgccaaaaaccaaaacctgtgattttcccgccaaaaacgtaaacccgtgattttcctgccaaaaacgtaaactcgtaattttcccgccaaaaaccaaaacctgtgattttcccgccaaaaaccaaaacctgtgattttcccgccaaaaacataaacctgtgattttcctgccaaaaacgtaaactcgtaattttcccgccaaaaaccaaaacctgtgattttcccaccaaaaacgtaaacccatgattttcccgccaaaaacgtaaacccgtaatttttccgccaaaaacgttaacccgtgattttcctgcagaaacgtatacccgtaattttcccgccaaaaacttaaacctataaacctgtgattttcccgccaaaaacgtaaacccgtgattttcccgccaaaaacgtaaaccgtaattttcccgccaaaaacgtaaacccgtgattttcccgccaaaaacgtaaacccataatttttccgtcaaaaaaatgtaaacccgtgattttcccgcagaaacgtatacccataattttcccgccaaaaaacgtaaacctatgattttcccgccaaaaacgtaaacctgtaaacctgtgattttctcgccaaaaacgtaaacctgtgattttcccgccaaaaacgtaaatccgtaattttctcgccgaaaacgtaaatccataaaaagtggaatccgtaaatattctaagtttgatgataataaaataataattattaataatgataattatttattattgtttcataataataattaattaaattattacttaagtgagttaacccatttaacaactcaacccatcaaattaaatgagttataggttgaccaacccatttaacaaaatgggttagtcaacctataactcatttaaccctaaactcatttgattatgagttgagttgagttgggtttacctattttgacacccctaattatacatggtatagaagcaatcaatattgcgatcgcttaaacattcttgatttgataacatttttttggttttagtcgcgctaaacctatgaccacaccataatatgtggatttcgaatccacaaaaagcctcgcaaagattaattttatttatgaatcttttttgagatgccctcaactaacataagtaggagaagctagtgtatcttcatctatcgagaagttggatgaattatatatacattatacacatagtacggaagaaatcattgttgcgatcgcttgaacatccttgatttgataacattttctaggggtttttgtcgtgctaaacctttgatcccattgctcctattgacaaaagagacgtatgagaaatattttttttttcctttacatataggtattgaaaaagaaaaaaacgaagtcatagcttgaatgcaaatatattttgagaaatttttaattttgcggttgcagttgtaagagataatataagcatagcttatataacagcaaccactttgatctaatggttgatcaaaggtttaatgttttttacactattttgagatttcattccaagataatgtagttgtttttgtagattacgatgcaaagttttttgaaaattctagcatatttaacataaccaaaattcacatcaaaatatctaacggatagaagtatctaaagtatctttatgcttggctagatattggctttttcttttcttgtttgtcttgctttctgttgttcttacttttcttttttggtcggccatttttcattgtatttgccttcgtgttggtccgatcaatgagtaaacccgattactggaataggaatctcacacgtgttgacaacatacatgttgggctgacccgttttcgtttgtgcttatgacatcccaaactcacatgaccccaaaaaaatggaagaagaataagaaaacagtatatatgtataaaagaagacgtagaaaacatttaagaccaagcaaagaagaaaggattgcttcagtttgttctcgttcctgaccaaaaacaaatcataattttcagaatttctaggataccgaaaaaatcacacctctacgaaaatggtagtgtgtatatctaatgatgttataatatttgcaaatgagaggataatttggaaataacatttaagaaaacaaaacccggccttcttaaaaaaagactatggtatgggccaatattgagatttaagacgttttagcttattatagaccggacgttgaccctttgtaaccatcaagctctaaattaagcctgagagagagaaaactaagccgtacagctctagagaaagtgccattttctccctttttatcatattcagttttctttactactatcaaattatgcttatatttgaaaataggtgttactatcaaaaaatttcaaaaacttctcttaaaagtttcggacaattagaaccatctttttctaaatcatatatatgaaagaaggctaactctctcccacaacttgacacatcagcacatgagagcttgccacctagacttcataaaaagtaatacataattagtaattaattcaacataacaactaaaataggaggatataattaatcagaacttgaaccatcactctttctacatattttaattcaatatatcctctttttattttaagatccacttaagtggctaaagtgatcataaaatccaaacatggtacacatattccttgcctaaacattagacgattattatgaaagaaactaaatgaatatgcaaattaaatatatctaagcttttcgagatttatgctaagaaaacaagtaatttgaaagatgtttgaggagctattcttatacctaatacgtaagatataagattatgacaagaacttaactaaactttccaaaaacatcaagttgaatatgcttagattgaatatgcagaaacatggttaataaagacatgttatatttttagtgtaagaaataaattttctaaaatttcaccgtctcacaatctaaacatataaccaaaacaacaaggatatataaattttaaaaaaactgaaaatctaaaacaacaataaaaaacaactcaaacacattcggttttcagatgaactaatatagttggacttttcaaaaacaattagaaagcatatttatgtttcaaaatcgatgcattcaactttactttatatgaatagacattctataaaacaatttgtaaatagtaatacataaacccgcacgtagtgcggctactcatctagtactgaataattcttattaatcaaggaaactggagccatagtacaaagctagactacaaaggaagatacatgtcttcaaagagaaagattaaattattttcctaggaatataacaaaatattgaatagttcgacggttagaaaatcacttacaagaaaagaaaaagaaaaaagccaaaccaaagagaatatgacttaatgatccaaagtccaaacgaaattcaagaggttgaattcaaagtctgctaggcacatttccctctgccaaaacccttgccataatagattctcggacatcattcaactcttcgtagttagataccttcacaggcaagaaactaaaagcatctgtctttttcactaaagaagtgaatgcattcacaaatgcagaaggaacacagctgagaatcccttggttccacatatcatctagacgatgcaaggataaaatctccttgtatgatgaatggaaagttagttaccatctcggtgggaagaaacgcatagatactaggaggaaagctatctccaagggcaagacggtctccgagtagaaacaccaacgttgtcaacaattcctcaacttcgcctctccttcccacacggttctcatttttcaccgttaacttttgcctccacatgtagtaactaactgaatgtttttccacaagctgagagatgtatcatgtacgactcagcatcaatgctcttccttgacaccaaattagtctcgctaacaatcccgtgtgagttaacaatgctgaccttatcttggtagtggatctttgatagagaggcgcttgatctttgaaagaaacaacagaacctcaggatgaacattggagagttgttctttcactggctttactttgtcacttttcaaaggcatgattattgttgtggtcggaatagcagaaccaaaaccattaatcttttgaatatcgaccagagaaggacgtttctcaacccactcaggaacaatgtagccaaggttgcaattgcggtgctaagagcaaacatgattatgattggaaacacatatgaaaacgctggagtacatgaaaccaagcataacaagcataacattttccataattaagatcagcttgattccttgtttttgatatctactgactgtagaggatatatatggtctcgaatattagacttgcataaagaacatcagaaactcaactacacgtatatattcacatgcaaacatatctaaccaaacattatagaggaaaacacggactcacaaatagtatatgcacataaaaacaaagataaatgtgggttaaagagatatatacttacttggataagttccatgaggaagtgaacatccttggactagagctcagcggagagattcttcacagcctgatgaagatcctccgtcaaaggattataagctctgccaattgagaacttagtctcccggattagatcgatgtgttgctttgtcgattccgccattttttctacttccttcttttcttctctttgtgaatgttgtcatgttgaacaaaagagagagtgtgggaggaatttaaatagagacggagggaagataagacttagaaattaaggacttgaaggttaacttgattggctaaccaaaagacaaattaaatctcttgttatatagtataaagttactagaaaattaagttatgcaacttggtaaatcttaagttttaaagagaggaaaatgacttcgtaaatctagaatacgttgcttgttagaatgtgtgttcaacgtataaagtaagtagtgtgaaggatagttttttgcatgcatttttccaagtttttgttattaatagaatacgttgaacacacaattcaccataaacacatgatttcaatctatcaagccttcttccgtcaattgatcttttaagttccaattaattacaccagcatctatatgaccaatcacaacttacccaaaacatagcttctctaatcctcttagaacatccaatgaaactctacccatactccctcagtttttattatttgatatttgaaaagcaattttttgacaataaattaaaagattttttttttttcaatatctatatgatattttcaacttcagtgtaaaattactagtatttttattgattttgacgattattttattattggttgaccgtattctaaaaaataataaatgatattttagaggaaggagtattttatattatgcagattcgtaagcaaaaactttaaatatataacataaaaacaaagggagtatttttccactgttttctaaggaagaaaaaattatagcgcaacaaaatttttgaagacttctaaaataagttctaggcggcgaattgttatccactataccgtttttaaactgtaagtttaataattaaggtttgagttattttggtgtatgttttatatatattaaaagatgttaattaattttcatagtatatggacttggtgaatgctgatatggatctgaatgatcttggtctacatgtgttacagcggcgtgtggtatgctctcataaagtgatgatttcttttgtcttgtttactctgtaaatattcagagtcatacattttgcaaagtggttgagtgtgcattgtattacccactggctgctggatcttcctgttaaccttcatccaactaggttcttatctcgcattcattcagttgcttgctatcttcttcatccattgaacttgctcaacattcgaatcgctcacctcattagcctcgttttagacatcaacgaatcactttctcatgatgttccagcttacaaagattaccgaacggttagagagctcgagaacgagtgtatggcggtgcgccttacaagttcttagtggtcgaatttactgggtatatctctagagtgagatctaaagctctttgtttttaagaatatatttatttttaaatgaactttctacgctttgtttgaatttattgtcatagttcatagttgacattttgtttcttagaagattgtattaaaattttactttatagagttcatttgctcctttaaatcaattaaagaaacccaataactagaattttcatgggaagataatcaaccatgaatcacgtaaatacaaaatttagactatcaccttttatagccaaataatcattcaccaaaatctgaacatatgattaactaacaatgcaagtgtctcgcctaaataatatagatataatctacattattcatcccaaggtattgagtatctttctattaggaaatatccatattattaaatttggttaaggtaagtataagatattgtttttagtgtaagtaaatattttttttttatatctaatattgccgcatactaagtttttggacaaatataacactcaaaatttttttggacaaaaataacactcaaatgaaatatatttttttaaattaataattacaaaatataataaatatggtaatttagtgaatttggtttggcgggaaaattttgaaggacattttggtgaatttttttattttttattcagtatatccttcttgaatttggtgatttttgtttctttttaatatgattttttaatttatttaaatttaaatcagttttattatttattctgattttccaattaataaagaagtaaaataaaaaatcatcatcttcgactattcatcgtccgaccactaacattttagatttttattcagtactttgtatctattcaccattttttttattgcaattgttattataagatcccagttatccattggaaagagagataacactaccatagaaagaaatcttaattcgaacgaatcttgctaagattggaatttttgtttttgtttttgaaccacataaatattgcaatttctaaggcataatatttaagagatctttgctccaactctaaacaagaattagccgtaaaaaccatactcattcctttatgctctatataagagaaggtaaccatctcacataatcataactcaactaactttttattgttctcaaattgatgtttatatggatcaatccatactaatccaaaatccatggataaaaagagtggaacttttggatattggtagataggatttgatgagtttcatgaattagattgaaataggttgggttataatggattagtggattatccataaccaacccaatagagtgtaaaccatatataacataattaaatatctaaaccgatttagtaaagcgaaacaaaatattctaaatcaaatttgtacactcatatgacggttgatttgatgatggtgatggtaattaaacatgagaacagtccttgataacatgctaaatagaacatgcttaaatcgaacatgagaatatgcttattgaagattatgacactcggtttgatggttaattcgatgtgatggtgatgatgattatgatgatgatggttattaattaagtattaattatttaaattgtaataagaatatacaatccattaatttaaatgagttatggtcttacgaattaatccaaactatttgctaattgagttggttggtctccctaactccatatgagatatatgagttggtttgatttggtttaactaatttgacacctctactttcatatgatcttatatcacaattatcaatcattgctaatagttaggttatgagttccaccaaatcaataggtaaaaaagtatctcttatgattttgattaatactttgctgtaaatattgatcggtgtattaactaatttgtatttgcaaccgtatacattgcaagaaatgttggaacaatttgcgagaaaagtctaacagtttacacagcgcagaagtaataaagtcattacatggaagcaatattggtgaaatgcttaatgattatgaatagtgatgtatataaaaatcctcctttttttttataagtctttttctaagatttatcttttcatctcatcctaacaattttgtattaaaattctactatcatcagatactcgagaagatgtatttgggaagttattgctgctctatttcgaggtaaattcttggacttaataatacttctggttatactcgagacaattaccatactaattggtaatttaattttcatattattgatttcagtgtaataatatattttggttgacctttgtaatctaacatttcaatttaatattaattgtttgatttatttactctccacttggattatatgtgtatcttaagtcttaacgtaaaaattgtcatttcattgatcaattgtttttcttgctatgaaggagtgtttacatacaagtaaagtagttcaatcaattcgttaatttgaattttctctctaacttgaaattgatgggttttttttggggaatttttatatcagttttaagtgaaggtcactataatttcaaaaatcagaaaattcaacgccttcaatgtttaactttgtttataaactattttgtcaagaaaacaaaattttatttgttaacaaacatcttatttgtcaaacataagttagatatgttttatgtttttgggttggactaccaatgtttcttattttgttcttttatctactcatcaagttaatccaaattagtactattttaatttgatcaaaaagaaaaataaaatccatattttcaaaaagctccttaatatatcatatcgaaaatgagttagaatcaatatgaatatatattagataaatataaaacataattattctaacttaaaattgatgtaatattcatagttagatggaaaataaataaagaaaaattattttagttaaattataagaaaaagtgataattgtactaatgatatatatatatatatatatataaatgagaaggattgtataaactttatgtcacatatttaatattctatattctaatggtttatgttattttttattcattatgtatatatacacactctgtttaccaaaatcctataatgttaatgtagctaaatggttgagtgtctcttatgaatccaaaaagtcagatgtttgattccccttgatcacaaattttgcttcttattttctaatgtctagaatgacgtcattttgattttacggagattctaacggaaagataattccgtgattgacatatcctaaatggccaagtcaatgaaagtatgaaacttgattatttttttcaaaagtcaaactaaattttaggatttaaatgtcttcttgaaagttcatgttttttcatctcaaatttaaaagtttgggtttttttcgacattttccaacaaaaaataatattttctcttgtttctttatttgttttcagaaaaattggtatgtagctaatttgtctcttcaaaataacattttttaaaaaaggaaaacaaggccttagactttgggcctttcttaagaaaaagactttagaatgggccaatattgagacagtgtacttagctcataaaccgggcgttgttgactccttgtacatataaccgtcgtgttttaatatacgcctgagaacgagaaaacgacgtcgtataaattcaaaccgccgtcgatcgtcactacgtatataaagggcttttaattacacggcgaagtctctctgttctcaagaaattaagaaactgagaaaaaaaaaatgggagtacaaggtctttgggagcttcttgctcctgttggtcgccgtgtctccgtagaaaccctagccaacaaacgattagccatcggtaaacaaatctccggcgatcaacttcaattgtattgtattatttttccggcttcttcttcatcgttcgaatttgcagatgcgagtatatggatggtacaatttatcaaagcgatgcgtgacgagaagggagatatggttcagaatgcacacttgatcgggttttttcgaaggatttgtaagcttttgtttctaaggactaaaccgatcttcgtctttgatggagctactccggcattgaaacgtcgtactgttattgctcgccgtcgtcaacgtgagaacgctcagactaaaatccggaagactgctgagaaattgctgcttaatagggtttgtttagtctcgatttggtgtggttggttataattagcaagtttttgtgaggttttgagttggttttgggatttttgttgttgtagcttaaggatattaggcttaaggaacaagctaaagatattaagaatcagagattgaagcaggatgatagtgatagagtgaagaaacgtgtgtcttctgattctgtggaagataatttgcgagttcctgtggaggaagatgatgtaggggcgagtttttttcaggaggagaagctagatgaagtgtaagctgttaaatttttgttgttttttaaccgtgaatttcagttttgttggtggaatttgctttaatgagcttagttgttgtagatctcaagcatctttggtgggagagactggtgttgatgatgttgtcaaagagtccgtggtaagtgaatactaaaacattgaattgcaaagaaatacattagatggtgttgttggactgacttaggtgaattgtgttactaagtatccacttcattccttttttgttcattagttgggatttgttggcacagaccaactccaaataatttgatgctaattgtgcatgtctgtcatagttgatattctttttgttccattttatgccattagtcatgcatcttgcggtaatgaatcagaagctgggaaatctatttgacgctgtgttgttgtgatgtcttacctgttatttatttgctttcacatgcccttccttagtcatggtatttttatgttcaatccttaatatgtcaattcttttactgtcattctttcttcagtaatttgtaaatgattttttttgttgagatttatataacgactatgatttgtttgttggtgattcgcagaaggatgatcccaagggaaagggagttttgttggatggggatgacctagataatcttgtacaggattcctcagtacaggggaaggattatcaggaaaagttggatgagatgtaagaagagtaattgagatattgattgaggatgtttatttgattgaagagtaatttcgtgttttcctgtcttggtgtaatataggttggcggcatcccttgcagctgaagaagaacgaaactttactagcaaagcatcgacttcagctgcagcaatcccgtcagaggaggatgaggaagaagacagcgacggagatgaggaaattttattggtaatatgtggtcttcgtactacatctttctcttgttttatttattgttgcttaagttacagatattcaggggatataaattggttatgttgaagatactttagttaagcaatcaacaccacttgtcaacttgtctgctcctctttctgcaaagggaaaaattgcttattctggatgaaatcctcatttgcttagtaaagaatcatgataatgtctttggaattatgtgtcgttttttcgtctttattaaggagttatctgatactttaccatcctcatctgctaataagattttgtctacctttctagccagtaatggatgggaatatcgacccagctgttctggcttctctccctccatccatgcaacttgatctccttgctcaggtaattaactatatttacaccatatctttgcagcatgttaaatttcatggacgtttcagattatttaataatgtctttacttgtagatgagagaaaaattgatggcagaaaaccggcaaaagtaccaaaaggtcaagaaggtgagttacataaatcactggctcattcttggtccagttatgtatttgaatctctatgtataaggagacgcggaacactgactatggaagtaattatgtataggcccctgaaaagttttctgaattgcaaatagaagcatatcttaaaactgtagccttccgtcgcgaaataaatgaagttcagagatctgctggtggaagggctgttggtggagttcaaacttctaggatagcttcggaagcaaacagagagtttatattctcgtcttcttttgctggtgataaagagtgagtttcagtttgaagtcttattaaagaataaggttctttctaaagtgaaaataactgatatatttaatttgttctagagtactggcatctgccagagaaggaagaaatgatgaaaatcaaaagaaaacgtcacaacagtctttgccagtctccgtcaagaatgcttccccgctgaaaaaatcagatgctaccattgagttggatagagatgaacctaaaaatcctgatgaaaatattgaagtatatatagatgaaaggggacgttttagaataaggaacagacacatgggaatccaaatgacacgtgatatccagaggaacttacatttgatgaaagaaaaggagagaacagcttctggttctatggctaagaatgatgaaacattcagcgcctgggagaactttcctactgaggaccaatttcttgaaaaatcacctgttgagaaagatgttgtggacctggagatccagaatgatgattccatgctgcatcctccatcttccatagagatatcatttgaccatgatggtggtggaaaagatctcaatgatgaagatgatatgtttcttcaattggcagcgggaggaccagtgacaattagttctacagaaaatgatcctaaagaagacacttcaccgtgggcttctgacagtgattgggaagaagtgcctgttgaacagaatacttctgtctctaagcttgaagcgaatttaagcaatcagcatatccccaaggacattagtatcgctgagggtgtagcatgggaagaatatagttgtaaaaatgccaataactccgtggagaatgatacagtaacaaagatcacaaaaggatatctggaagaagaagctgatctgcaggaggctatcaagaaaagtcttcttgaattacacgataaggaatccggggatgtccttgaagaaaatcaatcagtaagggtaaatcttgttgttgacaagccaagcgaagatagtctttgttctagggaaacggttggtgaagctgaggaagagagatttctggacgaaataacaatcttgaaaaccagtggtgctataagtgagcagtccaacacttctgtagcgggcaatgcagatggtcagaaagggataaccaaacaatttggtacacacccttcttccggttctaataacgttagccatgctgtgagcaataaattgtcaaaggtaaaatcagttatctcacccgagaaagcattaaatgttgctagtcaaaaccgcatgctatccaccatggctaaacagcacaatgaagaaggttctgaaagttttggtggagaatctgttaaagtgtctgctatgcccatagctgatgaggaaataactggttttcttgatgaaaaagataatgctgatggtgaatcatctatcatgatggacgataagagagattatagtagacgtaaaatccagagtcttgtcactgaatcaagggacccttctcgtaatgtcgtcagatcgcgaatagggatactacatgacacagattcacaaaatgaaagaagggaggaaaataactctaacgagcacactttcaatattgacagttcaacagattttgaagagaaaggcgtgcctgttgaattttcagaggcaaatatagaggaggaaattcgagttctcgaccaagaattcgtaagtttaggtgatgaacagagaaaacttgagcggaatgctgaatctgtgagcagtgagatgtttgcagaatgccaggtttgccccttgtctttatacatatgagtcattgtcctctttatacagcccttttgcaaactttccgaagtttctgttcgtgtttgatttgacaacaaacttataatgctttgtcgatcttggttttccgtaggagctactccaaatttttggcataccgtacatcatagctcccatggaagcagaggcacagtgtgcatttatggaacaatcaaaccttgttgatggcattgtcactgacgattctgatgtattcttgtttggagcaaggagcgtgtacaaaaatatatttgatgatcgtaaatatgtggagacatactttatgaaggtgtgcatttcctttcttacactctgttttccaacatgtggatttaagtacctcatttctttttattttggctgtgatgatcacataagcttccatcatactatctatggtttgtcctctgttataacttcttagctcttctgtagtttcctctggattgtaacttttttggtagtaggttaaattttcctttatcaggaataagttgatacattgtttcggtagtaagttgatatatttgtatttatcgatctgtttgaagttacaatttaaccgcatgcattcactttttcaaatgtctggtgattacatctctaatctcttttgatttttcaggacattgagaaggagttaggcttgagcagagataaaataatccgcatggcaatgcttctaggaagtgattacacagaaggaatcaggttagctgaggttttaactgcataaggtcaaagttccgctctttatgtaattgatatcataattgttttgacatgcagtggtattggtattgtcaatgctattgaagttgtgactgcttttcccgaggaggatgggcttcagaaatttcgtgaatgggttgaatcacctgatccaaccattttaggaaagactgatgcaaaaacaggttcaaaggtaaagaagcgtgggtctgcctccgtagataataaaggaatcatctcaggtgcctcgactgatgacaccgaagaaatcaagcaaatcttcatggatcagcatgtatggctcttttaccataacttaatgttaaatttattatggtccaacttgttcaagattgacaaaacctttctcctaatttgattacgatttgaattttacagagaaaggtaagcaagaactggcatattccattgactttccctagtgaggctgttatatcagcctacttaaatccgcaagtggatctgtcgactgagaaattctcatggggcaaacctgatctttcagtacttagaaagtaagttgttcctttacttaacatttcatctaaacagtatggcatagcttgacctttttttttggagccacttacagcggcagaaaggtttcaatgaatctgaagtatatgaaaaatatatatatcatgacttgtccgatggacccggtttctgtaataatctacttatcaatttatgaaacaatgtcctgagttctgattctgtagtatcactttttgtgaaggctatgctgggaaaagtttaattggaacggcaagaaaacagatgaactactactaccagtcttgaaggagtatgaaaagcgcgaggtcttcatctaacatttgatctcttatcgttgatatgcttatgaataaataatatgaacagaatctgacaatttgttttctttccacgaagacgcaacttcggattgaagctttctattcctttaatgaaagatttgcaaagatccgtagtaaaagaatcaacaaagctgtcaaaggaattggtggaggtctgtcgtcagatgtggccgatcatactctccaggaaggtccaagaaaacgaaataagaaaaaagttgctcctcatgaaactgaagataacaacacttcagacaaagattcacctatagccaatgagaaagtgaaaaacaaaaggaagcgcttagaaaaaccatctagtagtagaggtagaggcagagcccagaaaagaggacgaggaagaggaagagtccaaaaagatctccttgagctatccgacggcagttctgatgatgatgatgacgatgacaaggtagtggaattggaggcaaaaccggccaatcttcaaaaagtgcgaaaggtaagctttcttaatggaaccaaattacttcttttaattgattatgtagtgggttcactttgttatctgtcattccccagtcaacacgatctcggaatcctgtgatgtacagtgcaaaagaagatgatgaattggacgagtcaagaagcaatgaaggatctccgagtgagaatttcgaagaggttgacgaaggcagaataggaaatgatgattctgtagatgcatcaatcaacgactgtccttccgaagactacattcaaacgggaggtgggttctgtgcagatgaagctgatgagattggagatgctcatttggaagataaagctaccgatgattacagagtgatcggtggcggattctgtgttgatgaagatgaaacagctgaggaaaacacaatggatgatgatgcagaaattttaaagatggagagtgaagaacaacgaaagaaaggtaaacgtcgaaacgaagaagatgcatcattggatgagaatgttgacattcattttgggaattcttcagctggaggattaagtgcgatgcctttcttgaagagaaagaagagaaaaaactgaaaaaacttcgtttagttttatattttagtaaatggtaaaagtaattaggggagtaaaaaatgtatgatatttgaaattttcttatgtttaactgttttgagagaatcaacaaatgattatgatgtgaatagaattagaatcttgaagttacaagttttaagtggttttgcggcaaacgataaaggtaaacagtaaacgttaaaaagaatgagaatcaaacagttttatgatccattgacgatggtctccttttaccaaaccctttgtttctcgagaaaaaaacattcttctacataaaatttctcaacaagttttgagtctaactacatttttcactgaaatatttgtttgccttcgagttgacccagggacccggatactcacgggctcggttgtaacatgaagcccactgttaatcaaatcatatgttatcagaaactgaattttgaaaaacctttctcttatttatatttttgagaacggtttccaaaaatgatattttccaaaattttcgaaaagaaatatatgattcaaaaataaactgagaaatgtgaagaagcactaacaagtgacaaccaaacattcattagtttaggctgttgaccccaaaaacaaatataaagtttaggcttcaaacctctattcacgttacatgattatattagggataaccataacaatctaatcgattaaatccttcatccaaattcaaattatatgattttgaagaaactgattgagttccttttgttacaagattgtctttggcagaaagaatattttgaaatgggtaaacaataaattattgaaaaacgaccaagatttgagaacgtgcaactttcccaaacatcagacaccagattcaatcttccatatggaccatatctcatcggcactggttgctattattgtgtaacgatagaatcgtgaaaaacaaatacaaaatagaataaatgatcttaatataccaaattgagaaagaaaaaaatacaaaataaatatgtgattgtatatatagacgttttatgaatatatgtctagagatgtatcacatcacatcactgaaacatatatttttgtagttttacttttactatgtttagattggttagagatgcaactgtaggttaattgttgtaaatgtagctttgttttttttttctctgtataaaatatcttatagtatctaaatatttaatataactgttttggaaaaagactcaaatatgaacaaacacaaaatatttcgagaggtattactggtaaagtcttattggtaaatcaaagtctggagacattaccaattcacatacatattttggtagagtaactattaagtttaaaattatattatcgaattacagttaaacctttataaattaatactcgataaattaataatctttacaaattaataaattcttccagtctcgagttgggaccagtgtaaaaagtgacacaaatcgataaattaataagataataacttttttgaaagtcctatgtaaatatatggtcccatcaatatcataaattaataattgtataaatgtatcaattatatatatacattatatgtaagaaatttttttgaaatataattctaataattttttgcttaaatttgtatttattcttatttaaaatttagatttagtattttactgtatcaaaaacttttagtgttgttttctaaacatgatattatgttttacttgtaattgatttttgaaagatattttctagaatgaaaaaaatcctttagaaatttttgaaaagttactaaattaggaaaatctctctataaattaataaatattaatttatcgataaattaaaacttctctaaattaataaaatattgcagtcccaacattattaatttatagaggttttactgtatatgtatttgttgtaactcacgggttcaatagtgataaaggttaatatttctatatcatgattgaatttgattcccattgaacattaactatgcagattaatggcgacaaactaacggtaatctttaacatcggtgttgataaatcatgacgaagtgcttatgtgaaaagtcgttcacaaaatcgtttaccatagaaaaatgaaaagatttaagatttgttaatcatgaatattaagacaattatttattacaaaattcaaaatttaaggtattttctaatgatagcgtaacaaattaaaaaaaatacttatttacacagaatattatttatactattttttttctaacatgattttagtcttaaccaaataagtttgtaagttcaaaaatgtgttggttatctattataaaaattacaaaatttgattgaaaaaataattataatgctgattgtaactattttcgtaaaaatgctaattgcaatataacttttctataagattatttttttatatagcttttatttatttataagtctaattaaaacaacatgtacccaaaataaacaaaacacaaatcatagtcaatggtgtttaaaaactaatgtctcaaaccaagaaacatatcaatctcctttagtaatataattataatcttaaagttatttgttcacaactttttaaagagcttaatttaagtttatgatttgaatctaaaattgagaggtgggcaggacaaagtgagatgtcgagacaaaaatacagataagctaatttgtgcggtggattttacacaaactttgtcagtcacgagactctttcttattctaatggcaccaaaccctagttttgttcttttcttctttacttttttatttatcataaatattttatttggattctcatactctcatatgtctctttccctattgaccatatctttttatctcatctcttccctttcttgtgatataactttttactctattattatgacaagtcggggctagatatggttgtagtccaatgatcttattatttgctagactatagatttatatgtattggacacacacacttgataagaccatattttattgattctattaactagtaagcactaaatatagtctcgatatttttagtcttttttttttttgtcatctgaaatttaattaataaaacttgttgtggaaacaaggagagatacatatgcccaaacaagggaaactaaagctggcggacaaaagaaaagtccccagaaactaaagccggcggaatacatgatttccccggaaactaagccctgtgaaagggaagttaaaaacaacagaattaccaaacagaaaattcgaatcgaaagaggacgatgctataaactaagaacagaggaaaaaggctaaaatcctaagggaagcgataaaccaaagaatttctcgatatttttagtctacaaatcataatttcttttacgattcaaaattatatattttcgacaaataatttctattattttatctaaaaaactcggataattagtcgggtacggattaggttatgaaaataccttcgtaaaaccttataatatgatattgttttccggatattcgagtgggtgttctgacctcaaatgaagataaatccctaaaaccttgtaagttgtaacatggttttagggaatcatgttaatttttttggcaggatagggaatcatgttaatggcattaactaatagtgtgtacctaattagtaaagacatgtctattaagagaaaattgactaaaccggacaattttggttagaccggataaagaccatgtggtccatttagccttagtgatcatatgtatactcgatctagttgtaagttgttgtcatgtagctaacttcagaatcttactcactaacacttcgagtttcttctcattggcacaaaacttaactccattctctttttctctctctcttctatctttcaccaaaatgccataactctctcttcccctatataccaaaaattaatctgtatctctctatccatcaagagagagcatcacaatgggcaaacagagaagaaccatgatctcatttactctgtttctcacattgacaatgatgtcatcactcatcaatggcgataccgactcaattcaactaaacgacgacgttttaggactcatcgtcttcaaatcagacctcaacgacccattttcacaccttgagtcatggaccgaagacgacaacactccttgttcatggagttacgtcaaatgcaaccccaaaacatctcgagtcatcgagctttctctcgacggtttagccttaaccggaaaaatcaaccgcggaatccaaaagcttcaacgtttaaaagtactctcactttccaacaacaacttcaccggaaacatcaacgctctctcaaacaacaaccatctccaaaagctagatcttagccacaacaatctctccggtcaaatcccttcttctctcggttcaataacctccttgcaacaccttgacttaaccggaaactccttctccggtacactctctgacgatttgttcaacaactgttcctctcttagatatctttctctctcccacaaccacctcgaaggtcaaatcccaagtactctgtttcgatgctctgttttaaacagtctcaatctttcaagaaaccgtttctccggtaaccctagcttcgtctcaggaatctggagacttgagaggttaagagctttagatctatcttctaactcactttctggttcaatacctttggggatactctctctacataacttgaaagagttgcaactacagaggaatcagttctctggagcattgccttcagatattggactctgtcctcatttaaacagagttgatctaagttccaatcatttctctggtgaacttccaagaactcttcagaagctgaaatctttaaatcacttcgatgtatcgaacaatttgctctccggtgatttcccgccatggatcggtgacatgaccggtttagtacacttggatttctccagcaatgagttaaccggaaagcttccttcttctattagtaacttgaggtctctaaaggatctaaacttgtctgagaacaaactctccggcgaggtacctgagtctttggaatcatgcaaagagcttatgattgttcagcttaaaggcaatgacttctccggtaacattcctgatggtttttttgatcttggtcttcaagaaatggatttttcgggtaacggtttaaccggttcgatcccaagaggctcaagcaggcttttcgagtcactcataaggctcgatctttcgcataacagtctcactggaagtatacctggtgaagtaggactcttcatccacatgagataccttaatttatcatggaaccatttcaacacaagagttcctcctgaaattgagtttctacagaacttaacggtattggatcttaggaacagtgcactgattggttcggttcctgctgatatatgtgagtctcagagtcttcagatacttcaactggatggtaactcactaaccggttctataccggaaggaatcggaaactgctcttctcttaaattgttgtaagtcactgtttcttgtatacatttttgcttcattgcaaatgttttcgtatattgattacaagttttcttgttgcaggagtttgtctcataacaatcttaccggtcctattcctaaatctctttcaaacttacaagagctcaagattttaaagctagaggctaataagcttagtggagaaataccgaaagagcttggggatttgcagaatctgttattggttaacgtttcgtttaaccgacttatcggaaggttaccattgggagatgtgttccaaagcttagaccagagtgctatacaaggaaacctaggtatttgttcaccgttgttgagaggtccttgtacactgaatgttccaaagcctcttgtcatcaatccaaactcctacgggaatgggaacaatatgcctggaaaccgagcaagcggtggttctggaacattccaccgcagaatgttcctgagtgtttcagtgattgtagcaatatcagctgcgattctcatcttctctggagtcataattataacgctgcttaacgcgtctgttagaagacggcttgcatttgtagacaatgcgttggaaagcattttctcggggtcttcgaaatcaggaagaagcttaatgatgggtaaacttgttctgttaaactcaagaacttcacgttcctcgtcttcgtctcaagagttcgaaagaaacccagagtcacttctcaacaaagcttcaagaatcggtgaaggggtttttggaacagtctacaaagcacctttaggagagcaagggagaaacttggctgttaagaaacttgtcccgtctccgattcttcaaaacctagaagattttgatcgcgaagttcggatattggcgaaagcgaagcaccctaatctagtatcgatcaaagggtatttctggacaccggacttgcatcttctggtatcagaatacatccccaatggaaacttgcagtccaagttacacgaacgagaaccctcaacaccgcctctttcttgggacgtaagatacaaaatcatcctcggtacagctaaaggactcgcttatctccatcacacattccgtccaacaaccatccacttcaacctgaaaccgacaaacatcctcctcgacgagaaaaacaacccgaaaatctctgatttcgggctatctcgtctcctaacaacacaagacgggaacacaatgaacaacaacaggtttcaaaacgctttaggctacgtagcgcctgaactagagtgtcagaacttaagggtcaacgagaaatgcgatgtttacgggttcggggttttgatactcgaactggtgactggtcggagaccggtggagtatggtgaagacagctttgtgatacttagtgaccatgttcgagttatgttagaacaagggaatgtgttggagtgtattgatcctgtgatggaggaacaatactctgaagatgaggttttgcctgtcttgaaacttgctctggtctgtacttctcagataccttcgaatcggccaacaatggccgagattgttcagatcttgcaggtcatcaattctcctgttccccaccgtatcatggatagtttctaaacatctttgtgttatagttaatttttcattagcttttctttttgcaaattttactttgtctgtgtcttttgttgtggtctttgtgtagagattgcttatttcacaatgctacgctttctgttccttcgttatcattatcgtaacaatcattgaccattgctatcgtgacattaatagtttttttcttttcttttatgagaattaattctacatgcatttagcaatagtacaattacaaatgtagaacaatttctcacattgaacaattaaaaacatattataaaaataattataaatttatcattctagatttaattttcttatatttttggttgctagtgtaaatcttttaaattgcaagaatactcgactttctaaaggtttcaaggtagtgacggattcaaactttttagtaagagcaaaatgttaaaaaccaatttttttttataaaactcactaaaagagtatatcataaatactaataacaccctaaaatgtttttttttggaattaatttttcattgctttcaaatttaatttaaataacagaaagtatattttgttttaggtaagatatatcataacaaacttgtacttgtggttaaattaagttgggtagattgcattcaacgtattctaatcatgtatttttcaaatagatatggttctgaaagacctatgaccaaatcttatcctttatctttctctgttgatgttaatagaattgtctgtctttttttttttgggaatagttcttgattttgtgtgtagaacaagaaaatgtgaaactgtcattttataagcagtaaaaaataatttgacttgctaaaaagataaagatagttatgaaaatgactaaagggtttattatgtcccatgtgaaaaatgaattttagccgtttggacgaataatttctcttgataatatattattttttacgtgacgtataattcatcaaatacattaacgcattcttttttgtaccatattattttttatataaaatttttgatctggaataagtttatatatccgtcatatatatgtgcagtttattgttttggggttctagtaattacttctatatgatcacttaatgcgttaaatattttgatatatccatttacgcaaatatcaattgattcttaatgttttgtaagttgtaaccatcttgtatggggttagcccaatgtgtttgtatccaccatatgatccctaaatactcaataaaaatgaaaaccattcgacaaaaaaattatcaattgattatatatttcgttttgcaaatactcttctggttttttctaacaagttttcctatgcggtttctaagtaagttatgtgctcttcttgttgcaacttaatccaaagacaaaaatgtagtcaataaataatcaaaatgagttggttcatgtattagctttctctgaaaacaatctttataaaaaaatacgtttggaacaatgtttgatatatgttatatttgatttaattattgttgtccgtccattttggttttctttataaagaaacacactaattcaaagcattcaattaatacaaggtggggtggcttaaatcgggtaagaaggacagaacaataatgtggtacatattattgtgaaaggttgttttcttattatctttttttttttgtattcgacgtcgttttctatcatctaataaaaaagtttctgattcttttatttacttgtaggacaaaatcttttgtcactaattgatttcttacaccgtagctttccatcaaattgaaatacacacacaaacacaagcgcatcacgtttcacggctacaataatgttcttttagattttgttattttcctaaatactgacgtaaaagtcatatccaatataattgttttgtcttttcaatttctttttatgggcagacccaaatattatgcataaacattatatattagaatatattttagttgttagtgagctaattaggttttattgtatggcgtgtggaaacggcatgcttccattatatgcgaatggtctaaaccatgtgttttggtattcaattattatatagacaattagttaggccttggcttttttttttgcgattatgatataatcttatgaacctgataaagagaagatctaatcttatgaacctgataaaaagaagatctaatcttggttcattaaaataaggtagtattaaatttgtacggaagttgataagttgtatacctaatttttttttttttggtaaaatgtaaagtatttagggtaaattagctaaataaccaattcctgaaaagaaattaaatatctagcaccataagttgccgaattcagagagtaacgcatgaggtgtgtgtaatgacaacacactctttcaccacacactccttcacccaaattctatacatatcatcatagaaaaatagaatagtatatatttgttcaaaccaaaactttgattccgatgaatccaaataatcaattatatattttttgatggaatgatactaaaccctaagataatatatagggaacctaagggttttaatctaaaacaatgattaaatcacttaacatccttaatcaaaacaaacaattcattttaaaacgtatatagtacaatgtatacgtaaatagtatattcacaaaatagaatagtatctctcaaaaatcttccaaaatcaaaatcgatttattggctatttccctttagaatttccaacatcgtaaaccctttatcgcttctagatctaagaaatccataacatgatcgtcaatttgttgttcataattctcaattttattttccatggatttacaaattaaaattctcatatgaactttgatgggaaagtgaagattaatttgacataattggcgaaaggatttcaccggatttttctagtattctctggctgacgaagaataaatatagtcagagtattattgcgctaatggtgttgttataaaatagagtaaatcagatttgagtgatcctatcgacatttaagattgatccatatataattttgacttttgtttagttgatggtgatgtatgtaaagattcgtaagaaaagggcgagatagatgaaaggagcacacttcataaaagagaagaagatttattcacaaggatgtcttttgaagaagaaagaagaaggagagcgagatgtacaaacacagtaagaaaagggagagagagatgaaaggagcacacttcataaaagagaagaagatttattcaataggatgtcttttgaaaaagaaagaagaaggagagcgtgatgtacaaacacatgatagtattgtcaatattatatatattatacataatatttttttctattgtttgaagtgttagtttaccaattaaagtatttttgttggttatatttgccaattccccaagtatttataccattttcgaagtttcgacataagttaaaaaggatataagaaccggaaaaataacgaaaatctacagaaagaacagacaatgacaaaacaacaaaggaggaaaacatatgtatagagcgaaaacaaaagaagaaacaccgattccaaaatgccaaactcggaaatttgcgtgatttcctccacaactccaagaagctggagtctcatcctaagttgtatacctaatttgtttacagaagttatctatggtgctaaaaaaaatggttttaacacttgaaaaaaaagcttttactaaagttatatatatatggtttagtggttttctttagtgtatgagtcgatatgagaggacagtaaaagataaatcattttttatataaaaaagctgttgaatattatttgttatttgtgataaacaatttgaatagtaaaacatgttacataatttctttagctagtgcttatagaaaattgattttaaaacaaaataaagataaaagttagtttctattcaaaaaattgaaaatgattgccacatcatttaaaactaaaagttaaaaattaaaggtaaaattggttttttttttttgaaatcgctttaattgtaagggtaaaagtggatatttgtttttactgaaatcatgagtatgaaaataacagcaattttttttggataataaacgcacattttaattattatgtgtattttttccaaccaaaaataattgagtattcaacgtctagataaaaaagagactgagatttttttcgactttttctccaaaaaaaacgaagttccaaaaataatgatgaaattagtagtggtaaatggtcaatttaaatccgttgctacaaatcaaaatttaaatctgtaaattaactaaatctattaaattattaatgaaaaccaatgtaaaaagaatctcaacttctcaagcatactttgtttcaaatattctactattcaaaatactcccttaaatcataacctgaaactcacataagctgatccaaaattgaatttcattccacaatttttctcttaaacttcatataaacatgtcagcatgttacacggccttttttgtctgcttcatatatctctcaagtgtgtgtactacacaataacatttcctgaaaatctaactttcacccactcaccatcttttcttctctctttccccatcaaaaaaaacaaaaacaaaacacaactctgtttctctcatcttaaaattcatgtaaaaaaaatctacaaatcaaagagagaaacagagtaaagagaaagagaagaagatggcgcggaaatactttcagagagaagttttgccggtaacggctttggtaataatggaatgtgcaaacgttggtttaaacactctgtttaaagcagcaactttgaaaggcatgagctttcatgtcttcatcgtttactcttatggtctcgctgctctgcttcttcttccttctctgttttgctctttcaggtctctctctcttcttgattcgatctcgatactaaatttttcatctaatcttgaaaattggctaatcggttcttgtttaatttcacagatcaagaactcttccaccgatgaatttctctattctctacaaaatcgtgctcttagggattattgggtaaaagtctcatctcttgaaattttctaccaaataaaaaattctcagttcttgaaatttttctttaatttcaagcaatacctgagtgttgctgaaataggttaatttgatctttaattacctgattagatcaaattttttgcatgagtgttactgaaattctcagtttttgtttaccaaaatttagagaataaaaagtatagaaagagacatttggcttaaagttggttccaaaagctgcaactttactgcaaaaatctaaaaacattattattattataaacaaaaataaattcaatttttgggggtttatttatatgatttaatcttagtaaaaaaatggaatatattatttggttttggttataaaatttttgattaataaaagtgtgtgttgacaatgtatatagatgctgttcatgatttattcttagtaaaaagtggaatatattattttgttttggttataattatttgattaataaaaatgtgtgttgataatgtatatagatgctgttcaaacataatgggatacacagggataaattatagttctccaacacttgcttctgcaatcagcaacctcactcctgctttcaccttcttgcttgcagtcgttttcaggtttgacaacaacatttctatatcctatttgacatattccttttacattatcaatttacaaaattaccctccgtccattaactgtatatgggccttattgtttagcccatgaggttatgatttgaaaacgtttggtgtaatgttgtaggatggagagtgtgtcttttaagagaacaagtagtgtggctaaaatgttaggaaccgttgtttctattggaggtgcatttatagtgactctttataatggtcctgttgtgattgctaaatcgccaccgtctgtttctttgcgatcgcaatcgactaaccctaattggatacttggtgcgggtttccttgcggtcgagtatttctgtgttccattgtggtacattgttcaggtctgaactctatatgcatatataacatatatgtcactatgtgagttttttggttttctgatagaatcatatgttctcaatattttttgtagactcaaatcatgagagagtatccggccgagtttaccgttgtttgcttttatagcataggcgttagcttttggaccgcgctagtcacattgttcactgaagggaatgacttgggtgcatggaagataaaaccgaatatagctttagtgtcgatcgtttgctcggtgagaatataattacactcatgtgtttttccctagagattatgagtgtgattagttttttgacaagcaaaatggttttattttggttgattctatttctatgtttagggattgtttggatcttgcataaacaatactatccacacgtgggcattgcggatcaaggggcctttatttgttgcaatgttcaagccattgtctattgcaattgctgttgcaatgggagttatcttcctgcgagattctctctacatcggcaggtacaaaaacaactcacacttttatttaaatagtaacgggtgagtccaagattagtttgggacttgcggttatgttagaaccatacctcaaaaaactgtggaaaatattaactagtcattctctaattctcagctcactttaactcttttggtttcctttctttgcttgaatgatgatcccagcttgatcggggcaacggtaataacaatcgggttttacacggtaatgtggggaaaagccaaggaagtggccttggtcgaagatgataacaaggctaaccacgaggaggccaatgaagctgaccttgattctccatcgggttcacagaaggctcctctcttggaaagttacaagaacgatgaacatgtatgagtatcatcaactagtgaagatcacgctatatatatatgtgtgaaaaaattcatatgtgaattgtctttgtaatttatttgatgagacaaatgtgatctttaattttaggatccaagtgttttctaatcacaatctaacaagtcctttttatatcctttttttcttagtctttcacatgatttacactagaatgattccaatatccttaagaataagactaattcttcacttaagatttaagaacatcttttagtgataactgataactacaggttttggcgaccaattttcatttgttttatagtccttgatagtggtgacgatatgtcctggatttaagacttactatgaactggaaaattaattgctcatcaagaaaagatatttaacctaaaaatctcaaaaattatcctaaaaatctttgtcctcataactataattaagttactaattaactaatggttagacattttttttttttaactatatagtaatagtgtaataataattgttgaaagtggtttttacttttactgcggtgggatgcaaaagtaagttgaagttgagattctaaagctcctaaattggtcaaaccgtcaaaccagagtttcagattcagacaatcaaaaacaaaacaaaaaaaatggctgggagattctgtcaaagagacggcgggatcatgacggcaatggtggcggtggagattctgacagagtgtagccaaagtagttggaacaatagtttgcattgtgggtgcacttgtggcaactctataccatggccccatcgtcttcgccgcatctaagccgtccttttatctccttcagcgtctttcggcacctccctcgcaaccgtccaattataattgggtcatcgggggaggtcttctgggttgaatacactctcattgccgtcgcttacattgttcaggtataaagaaaattaacattgtaatactttggtcatacaaggtatatctattgatttatttaatttcttcacatttttggtgggagtagacacatataatgagggaatatccgtcggaatttgccttggcactttcccacaatgtctgcgtttcaatctcttgtgcatttgttagtttattcgtggaggagaacaatcctagcgcatggattatgagatcgaaaattatgttgatatgcatcgtcgcaacggtatggaaatgtttctatatatagttttaatcaatgatcttattttgttaaatttgtgtaaatgatacattagggggtggtgaattcgacgagctatgttgttgaatcatggacagtgcgatataagggggctgtgttcctagcaatgttcaggccattatctatcgtaaccgctgtcgtactaggggcaatatttctaggcgattctctctatctcggaaggtgaaagaagaatgtttaatatatcaaaagatggatcaccaaattagtattaattactcatcttggattttcactttcagtttttactatctatatttggcagtgtgattggtggaacgttgatatcaatcggtttcagtgtccataattcattatttcatatagccaatggctttagcgctttagccaaatccagtgttctaaggcatattggcatgttagtatagaaaagttgtccttatctgaacaaatttttagtaatggaggcaacgacctttgtgcatgtgagctatgttatgtacaataaaaaacgtatctgaagtaggtcttcttcgaaaacgactcagaagattagattccaggcagtggcaaaacaagaattgtgactgactctgaaagcagctacacttacgagatcaaatgtttaaagggaatggttgattggatttcttttggctcgaagaggcatacatataaattttgtgatgatgccttagccaaactaagttttaagatatatttagagatatgactatatgagttttgtagattgagtattgtctaatctaatttgtgtgagaaatctagtgatgaaaattggccggtgaattttaaacgcgtgtatatatcaatctctattctctagtggtccttttctatagtacattggtccaaataatagggaatcttataataaattcaagagactgacaattatcttataaaaaattcaagaaattttatttcaatattttataaatgcataaaatttgtattacaatcaaatacaatatttaagttaaaaatattatactgatgaatacttatatattattatgaatattcatttattatatacttaactcttttcttttgtatttaaaattattttcatttattataaacagatttgaattgaatgatatttttaatacattttagttttaatcatttattgttttgctcatgtagacatcttagatggagagaggactaccaaattatatatatgattcatttattatatacttaactcttttcttatgtatttaaaattattttcatttattataaacagatttgaattgaatcatattcttaatacattttaattttaattttaatcatttattgttttgttgatgtgaacatcttagatggggagagaactccctaattgtatatatatgattggcccaaagaatatggaatcttataataaactcaagaaactaacaattattggacccataaattgacatttccttttacttgtaacataaagaaaagtaacaaagggataacaaattaaagactcacattccacaacaaatttttctaccaatgccaataatggccggaaccgcaagtccttggcggagagaggccgtgttcttgacggcaatgctggtggtcgaaaccagcgtcgtcggaataagtactttgtttaaatttgcaacttcaaagggactcaacatttatcctttcctcggctattcttatcttcttgcttctcttcttcttcttccttctcttttcttcactaacaggtttctaatatctttaatctttacaagaccatttttcttcttctttgtcaaaatctcttaaaaccatttataacaattcttttgtattgatttgtatgtttttgttttacaggtcaagttcacttcctccactaagtgtctcaatactttcaaaaattggacttcttggatttctagggtaatatccaaataacacattccttactccaatttcgaatatgtaactagcttccactaaatgttgctaatatatgatttttggctggaaaaaaaaagaacagatcaatgtatgtgatcacaggatacataggcatcgaatacagcagcccaaccttagcctccgccataaacaatatcactcctgctcttaccttcatcctcgccattatcttcaggtttttgttttctttgactaattattaagtttttgctgatttcaattttagtttttcggattattctagtcaacaagtcgaaattgtaaccattccatttccggctaatttaattttaataattataatagttttttatgttaaccgaaattaattaaactcaaaagaactaatcccgaaagatattgtttacatatgtgatgaagccgttcgctatgaatttttcgtgcattataataaagttctttagaataattacttcaaagttcccctataattttttcaattcgactatttttttttccataaatcatgttagttttcacttcactatattcaacactatagtttgctaaccaattctttaccactagccgccttacccctatcccacaactgtctcatactcttatcagtaactaggtaaataatctatatttatggtaaatgcgtttaatatgttcttctttctttctttcaatgcatacattaattcaggttttcggcatctatatttatggcaattgatatgaagatttaagttactatcgcactattgctcaatcttgtggtccaaatcatacaaggctgtttgcatgaatgaaataaatgcgtattaattgtgtttgatcattgattatttcttagccttcttttggaataaacacttaacacactaaatttcattttgtgaataaagaatggaaaaagtatctttcaaagagaggagtagtctagccaaattgatggggacgatattgtcactgataggtgcacttgtggtgattttctaccacggtccacgtgtcttcctcgcatcttctccgccctatgtaaacttccgtcagttttctccaccgttgtcatcttcaaactccgattggctcatcggtggagctcttctaaccatgcaaggcatattcgtttctgtttctttcattcttcaggtaccaattttttttccttatatatagtagaaataattttaaatttatggttaagtcaaaaattagtcattaaaaaaggtggaaacatacgaacacatggtttagagtagacctaggcgttcagatatttggttcggttctagttcggttccaattctttcggctctcgagtttaggattcatataggaactaaaacagttttggtttggtttgggttcgggttcggttttttcggttctgaagtttaattaggacccattcggatatttatttcagatattttttagtattttcggatattttcgagtatttttggatattttggtatttttatatatttttcaactatattttcggtatttttgaatgttcaatctaaaaataactaatatttttggatatataatcatatttagatattctcggatacccgaaatatttcagttcggttcgggttcggttccaattattttggttctagaatttaggattcatttgagtattttaccattttggtttggcttcggattcggttctttttgctttggttccagttcgtttttttttggttcgggtattatgcccatgcatagaggggtgaactttggtttttggttggagatgatgttataatacatgtgggaaaacacatatcttcatttagtaaacatcatttcattctaatatttattctatataatgatttttggacaggcacatataatgagtgtatatccagcagcattcagagtctcctttctttacactgtatgtgtttcaatcgtgacctcgacgattggactagtagttgaaaagaacaacccaagcgtttggatcattcatttcgatattactttgattacaattgttaccatggtatgttatatatatatatatattttaaagatatcaaaatatctactttttgatcttaacacttttttaaaaataaaatatttcaggcaatagtaacttcagtatactatgtgattcattcatggacagtacgacataaaggacctctgtacttagccatatttaaacctttgtccattttaatagcagtggttatgggggccatttttctcaatgattctctctatctcggatggtattaatgaatcaatagtcttcataaacatatctataaacaaaaacatctactcaccttcgattttgtccttcgttttgcagtttgatcggaggaattttgataacattaggcttttacgctgtgatgtggggcaaagcaaacgaagagaaggatcagttatcattttcagaaaaagagaaaacgcctcttctattaaaccgcaaaaacgaccaagtttaaaaagaaaaagaatatagacaataaaactactaatagttaacaaatactgttattaataccatatttataaaattgtcttatgtctctatgaacctaggagttggaaaaaaatgtgtgtatttagatttttttttcaaaatactccaacatttataaatacgagttaacatttttccttgactcctttggaacatatgaaaagcttaaattgatattctttgaagcaatgataggtaactgcaccaagtatatatcccggtatagtcacacatcccaagtttagtgaactacacgaattatgtgtattgtatgctaatgtataccaattagtaacatatgatcaacaccatcatattccttttacaccgtttgtcaaatccatttttaaaaccacttttggtgaattacgccgtagaaaaacaagtctaacacattgtaacattttgaagtggtaataaaatttctgattcaaggtttcaatatctataattattgaagtggtttcaatatccattattggatgatcatattttggcacaactgttttcaagtctgcgcaaagaatagggaatcttataataaattcaagaaacaacaattattggacccacaatacaccacttcccctctaactagtactatcataaatgaaaagcaaacaaattaagcgataacaaatcaaagactcacatttcaacaccaaacctttctaccatttccaatggccggagcagtaagcctttggcggagagaggccgtgttcttgacggcgatgctggcaggcgaaaccagcatcgtcggactaagtactctgtttaaggtagcaacttcaaagggactcaacatttaccctttcctcagctattcttatcttcttgcttctcttctccttcttccttctctgttcttcaccaacaggttcaaataactttaatctttctatgaccattcttttgtatagatttttatttaatttgtatgttttaatacaggtcaagatcacttcctccactaagtgcctcaatactctctaagattggacttcttggctttctagggtaatatccaaatacaacattccttcttccaatattttttatgaaattatcatccactaaactgttgctaatatatgatctttggctgaaaaaaattcaaaacaaaaaaagaacagatcaatgtatgttattacaggaggcataggcatcgaatacagcaacccaaccttagcctccgccataggcaatattgttcctgctcttaccttcatcctcgctgttatcttcaggttttattttaattcattttcctaaaagttttgcagattaatgtctaaccatcgagtcgacattctaacaaagtttctggcataattaggttattaggcaacttaaattggaagtagtttctttaaatcagtcacttcaaattaacttgtccgatggttttaattcagttcaacgcattatgttgctaaccaatgcttttttgctatcagccgtcttacttaatatagaacttatgttgctaaccaatactttttgctatcagccgtcttacttaatatagaacttgaacttttttttctaccagatgtacattttcaaatatatttatttggaccatttaagatatactaataatatatctatgcgagcaaaacgaacactgttaattttatccgggaaattaaagacaatagattcaagaaagcggaatttcttagtggtcaagataagctcaaagatcacttctaactagcttgagtagcaagttcgggtttgttgtagagtaaacttaagcctagggttcttgagtagagaattgtggaccctttggttggcctagctccctatttataccttcagggtgtcggttcttcgatatggcatgtttccatcatcttcggaggagaatatttccattgtccgatttgttactttttgtgtagattcgagtttacctttcaagattttcctctctagctagtacctaggtcggtctccgaggtaatcgaggtcgagctagtcaggcttaggcctccaaatcagattcgctattggaccaagtagttcaaaatactgaatggtttattcttgtttaaaatcaggttaagtactggatagagctaattaaatcactctcctacaatatccaatgcgctatatagtaatgtataagatcatagtttatatatataacaataacatataggtgatatcacgtactttataaacattttacctaacatgaataaatctgcacgaaactttatttgattcattagatgttttcgtaaaaaatagttatttaggaaaagtttcgtgaccccaaaactaaacgaaatcattcatgttcaaatgatatgaagttagcttgttactacatcactatagcacaatcttgtggtccaaatctaacaaggacgtttgcggtttgcatgaatataataaattcatataaactggtatttctgtaatcatttctattggaataaaacgtaacacaatcaatgtcaaatttttaacaaaggatggagaaagtatcattcaaagaaaggagcagtgtagccaaagtgatggggacgatactgtcactaataggcgcatttgtggtgattttctaccacggtccacgtgtctttgtcgcatcttctccaccatatctaaacttccgtcagctttctccaccgttgtcatcgtcaaagtctgattggctcatcggaggagctattcttaccatacaaggcatcttcgtttctgtttcttttattctccaggtacaccactttttataataaaaatatagtagaaactctataaattaatactcgataaattaataaacacgatcaattaataaattatatcggttctaagtcgggtcaatagaaaaattaaccaaaatcgataagataataagataataaattttttgaaatctctatgtaaaaatatgatcttaataatatcataaattaataatcataatatcttaagcatactttttaaaataatctactataatatgaatttagtgttgcttgtctttttttaaagtttgaatcttgttgaacttcatctctaattttctttttattgcatcaaaaactcctagtgttgtattttcgatatgcatctaaaagttgtgaagagttctaaacgcaataattgttttcttacgtgtcactatttctaaaagtttcacattatcgtcttcaacttcttcatcaacattatagacagaaatcacaatttcttctaaatattctaaattttttagtgtgctttattttcaccggaatagtcgagtaagcaattgacatttattctatccaaaaaatatagtgttatattttgcttaaatatttctttaaattaataaatattaatttatcttataaaataatatctattaaataaattaataaaattttatagtcccaacattattaatttatagagtttatactctagtttctaaacatgtatgaatgcatagcaaactagactgcttggagaaagctacacaaattgacgtggtttatatcttcatttattaaacatcatttaatttaattttaatgtttattggatagacacatataatgagagaatatcctgaagcattcacagtctccattctctacattctatgtatttcaatcgtgacctcaatgattggactagtagtcgaaaagaacaacccaagcatttggatcattcatttcgatattacattgtttacaattgttactacggtatgttatatatatgttaaagaaaattatcaaaatattttctttttgatcttaacattaattttattttatatgtgtaaactatttcagggaataataacttcagtatactatgtgattcattcatgggcaatacgtcacaaaagacctctatacttagcgatatttaagcctctgtctattttgatagcagtggttatggggaccatttttctcaacgattctctctatctcggatggtatactaatcaatagtcttcatacacatatctataaagaaaaaaaccattatgttcatttttgattttgtccttcattttgcagtttgattggaggaattttgataacattaggcttttatgttgtgatgtggggcaaagcaaacgaagagaagaacaagttgttatcattttcaggaaaagagaaaacccctcttctattgagcggcaaaaacgaccaaatttaaatgaaaaaaaatttataatcaaaggagttacaaactctgaaatagtctcttatatacatagcgtgcaaactattagtgtatactgtgtattgctttgtatataacttagaaaatgactatctaattgttttttaagttacgggtacgtaacgactatctaaattcgttagatcacgacatctaacgaattttggtcgattttaagtagtatcgatttaaagatttgtaagttaattaagcagccaaatagaggcattggaaaacaaatgaaaatatttctgatagtaacactggagaggtaggacgaggtaggatcaatacatggtcaaccatttgcttaagaaatgactacaaaagaaaatatatatttttacaagagagattaaatggtttgttaacatgatcatgtgagtttggtgaacggttttatagaaacagaaacactttctttaaaattcttgcattatcggtttttactatcactatattgtaagttttgcaacaataatgatctttaagaaagaaaaattgtactgatacttttaatttttttttaagtttctttgaacctagcatgtatagagtggttgggaaaaggaaacaaaggtgtagctttttgatttcttttgttccttgtactacaaaattcatacataaattctcaaattctagagagagattaaatactgagttaacacttttcctcaactccaacatatggaaacttaaattgatgttttaggttcgattagtaacacaaaatattatgtattttaccaaaaaaaataaatgataaagaataccatattaattaaaaatgatataaaataacgataaaatatcaatattaaaatgaaaatacagtcttatgtcctttttagtgccgttttatgattggtaaaaacgataaatcttattcatttttcaccaaaagaataaagaatattataaagtcaacaaacgataattattggacctacataatgctattctttatatttgtaacatcaagaaaagcaacaaaaagataatgaattaaagaatcacatttcatacaacctttctatcattttccaataatggcccggacagtaagtctctggcggagagaggccgtgttcttgacggccatgctggcgacagaaaccggcgtagtcggaataagtactttgtttaaagtagcaacttcaaagggactcaatctttacgctttcctcggctattcttatcttcttgcttctctccttcttcttccttctctgttcttcaccgacaggtttctagtaactttatgagtttattttcataaacatttggtggtattgatttcatttatttattttttgtttttctttacaggtcaagatcacttcctccactaagtttgtcaatactttctaaaataggacttcttggattgctagggtaaaaactcttactaacgcaatcttttttccaatcttaagtatgaaattatgttcctatttgctaaacatgtgattttttggtggacaatctaataaatggttttggctgacaataaaaatgaacagatcaatgtatgtgatcacaggatacataggcatcgaatacagcagcccaaccttagcctctgccattagcaatatcactcctgctcttaccttcatcctcgccattatcttcaggtttgatatctatatttttttttccaattatttgcagatttcagattgttctaaaagcaaactattctagttcaggtgtcgaaatcgaaacattttctttcccgggcacaattggctaaataagtcaacttaaaattgaatattgtttttttagttcaccaaattaagttttttaaagtcgggtcatgttactatgttaggttttacaaaccaatatattttgctaaccaagcttttcctaatttggtaattcctagttgccctatgcggctatgctacccactatctcagataaatatactgtataaacgtactgtatagtgaattaggtaaacgacgagtagtgaaaatttaattataaataaatccaactctttaattatatcattacgttgcattaaacaaccacagtaaacataataaattgttattgaagcgcaatattctccgttataaataaacgtattgattagtaatactcttatgtttcttattaattaatattttaggaaaaaatttgttactaaaaaattgatttttaagctttttatttaatattaattatttcttattgataaatattaaactccaaaataaataaaatattattgattttgaattattaaaaatataaatcataaaaaataatacatttataatttgtttttaataggttttcttaatatgtgtatttttccaaaaaatcaaatattaagaaatattatcttaaggagattagcaaaactaccttttttactacttttttgcaacaatacctctttatgttgtccattttacaaaatatctctttccttgaacagaatgaccgaattactctcatctaataggaacatgtaattggaaactgaaatttttccgccaaactttttttctgccaaaaaacaaatttcccgccaatttgtttttttgtaacaatttttttctcaactaaaatatgcttttaaaaatccttgtaaatattttttggcggaaaatagatttacaagggattttaaaatggttttaaaatatttacaatggattttaaaagggttttaaaagatttacaaagatattaaaaggttttaaaaagatttacaagagtttttaaagggtctttttgtaaattctttaaaaatcttttaaaaacccttgtacatcttttaaaacccttttaaatcctttaaaaatctcttgtaaatcgtttaaaacccttttgaaatcccttgtaaatctttcaaaacacttttaaaacaattttaaatcctttaaaaatcttaaaaaaaacttttgtaagtcttttaaaaccctttaaaatcccttgtaaatctttttaagcccttttaaaatttcttgtcaacattttaaaacctttttaaaatcccttgtaaatcatttaaaactcttttaaaattccttgtaaatattttaaaacccttttaaaatctcttataaatctttgaaaacccttttaaaatcccttgtaaatctattacccacaaaaaaaaactctttttgcgggaaaatgttttttaaaaaaaaacttttggcgggaaaatattttgattggaaacttttggcgagaaatttattttgaaatagtttaggcgaaaaaaatattaatatttcattttattaatctaaaacaatttttaaatatggataaaatgataattaaaaatttaaagagaataaaattaaaatggctaaaaaataagggtaaagttgaaaatgaacaccaaaaaaaggatattagaaagaatttttctatatcttactgtgaaatttagtaccccaaaagtaaaaaagtaagttactgttacacataaactccacaaaaaggcttgcatataaacgttggtaaataaatcataaatgtcagcatccctgtttgtttgaaaaaaaaaaaaaaactgtttgtttgcatttcaacaagatgcgtatgaattcttctttctttgactatttatacctttctttttattttggaatccataaaatataacacaaatttttaatttgtggataaagaatggaaaaagtatctttcaaagaaaggagcagtgtagccaaagtgatggggacgatattgtcgttaataggcgcacttgttgtggttctctaccatggtccacgtgtctttgttgcatcttctccgccgtatataaacttccgtcagctttctccgccgttatcatcttcaaattcagattggctcatcggcggagctcttcttaccataagagacatctttgtttctgtttctttcattctccaggtacaaatttttgttcttatacataatagaaataatacaaagtgttggatatgttccatgcaaaagagactaattttgttatcggaggcagaatttttaaaatacaacagacttaaccgaggaaaattagttcaaccgtaaacccactggatcctcgaacctaggccaaatagagaatctaacttgaaaacaaaaacccgtaaagaattaccccataccagcaaaactcatgtgctatcacaaaacaacgtaccatcaaattctaggttaatcaatagatgatggcaggcctggcccgccaataaagcaggaaagcaactgttttaaaccacacaatgtagtctagtggttagactttctataacttagtcccgattcacaagttcgagcttttactaatattatttgctctatttgtttttgcattccttttcatcctttttttctttttccaatccacatattttagttatgtttgaggccacttaaagttaaggaccggccctcgatgatcgagttggtcatagaccaatcactatttacttacctatagaagaaaactctcaaccataaacattggatgttaaaactagatataggcatacaggaagaggcggccatggggtcaagcaagacaagcatgtttgaagtcgaaataaataaatatatatatatgtaagagtatgataaagtgactaataaggtgtcaagtggtccgtttaacgtccaataggtttgaccatttggaccattttttttttggggtttaatgaacggtccataatggtttatggtccaaaaacttgtccaaatccatgaaggataaccatgtccattggatatgtccatggtcgtccattactgtacaagcttcctgtttgattcaaattcatctcaattcatctcaaccgcatgatagtgttggattctaagagtactaatatcagtgatatgtgcgaagttggagtcccattataaccttttgccgaaaatatataatttttcactaataagaggccctagtaattattgttttgcttggagtcatgaaactcgtaaagccagctctggaaatagctggggttttgaagttaatcaactatcttcatacatcaaatatcaaattttgttttttgaaagaaggttgaacatgcatatataatttcaatgtttattctataaaatgtatttggccaggcaaaaataatgagtacatatccagcagcattcacagtctccttcctctacattgtatcggtttcaatcgtgacttcaatgattggactagtagtggaaaagaacaatccaagcgtttggatcattcgatttgatattactttgataacaattgtaactatggtacgttgtacataattttaaaagattaccaatatatttacttttgatcttaacctagtattttataaaacatttcaggcaataattacttcagtatactatgtgatccattcatggacagtacgtcacaaaggacctctatacttagcgatatttaagcctttgtcgattttaatagcggtggttatgagcgcagtttttctcaacgattctctctatctcggatggtatgtgatcactcatcaattgtcttcattaattatacacatttataaacaaaaacattttcaagcttttgcttcattttgcagtttgataggaggactattgataacgttggggttttacgctgtgatgtggggtaaagcaaacgaagagaaagatcaattgttgttagtttcaggaaaagagagaacccctcttctattgaacggctaaaatggccaaattagaattaaaaataaattagaactaatttacatattcttagccacacttttgggtaatgtgtacatgtatattactactgtatttcatgttgcgctttgtttataacttgaataattgttttaaccatgaagtaaagacactctatatccatggttagtaaataaggtaaattgcgtacagtagccgttgacccacttttaatttcaaattttgacactgtgggctgggcatttcatttcttagccattcagccaaaaactgaccaaaatgccctgacgaaactgaacccggtttgtacgtacggaccgcgtcgctggaatccaagagaaccgggtttgtacgtacactgttcatcgacgagaaatgcattaaatattttctgggtttcggcgaatttgacacttgagattgaaattaaaatttttaaaaattggttgggctcagaagtttttaatgctaaaaagttttgacaaaactaaaactcatgattacctattataatatagattatattgtaagatatttacataattgagattagaattctgggaaaaaaacgaaaatcaaaattgtgttacggtgaagaatctgaagtttttagttgctgttttacaaagtttgaaggattgaaggggagacaatctgtgttctaggtaagaaattcgtgttaatcctattaattacacttgagaacgtgatatgaaagtaatgatacgtttttaaaaatttttgagttcataaattgttttgttggagatctttttgtatttgtagatataaatgtaagctctttgatctgttttgttaaatttataagtacataaattattttgttagagattctttttgtctttgttgacataaatgaaagccttcaaaaagatctgatttttttgtatttaatgttgttctgacctgaggaatttatgttgcaggtatggagttacctgtattaattatggttggtgagtggatatacaaagaagaaggttggaaatttgaagctgaaaaaggaagtttcggacgctgtgtacgtattacagacacaacgacgtacacggatttggcaagtacaatatgtgatgttttcagctataagtttagtgaatggaaccctataataagttactggatgcctggaaagatgtctaatatgatagcaagtaatcgccctccagtatatattgagaatcaaatcagcatggatacatttatgttgattcgtaatggcgatccttctgttaacttgtttgtgtctttttaccctatcggcaagggaggccatacagagacagaggttacaaatgttgatgcagctcataatttttacgaagatataaatgtagatgaggaggatgacatagatgaaggtgatgagaatgaatatgaggacgaggataatgaagaggacgaagatatggatgtacatgacgatgacaccgatggtgaaagccgtgaaattaccctcgaccctacagtagacggtagtgaaggtagtggcggagattacgattacaataaatggggtgacatgattgtggaacaatatggaaatggtcatgttgaggaggacgtcgtgaatgacactcaacaaaccgtggaacccccaagggaattcactcgtctattggcatcgtgtacgtcgacgggtacacatgtacctcatgtagaacccactggtgttttggttgacactacaccaacctctgctccatccccgacgtgtcaacatggtttgtaccaatgtacgtacactagagtctgtgcagaggagacaagatgcgaaggtgaattagttgagcacacggatgatatagctgagaacgtaactggagatgatggtatagtcggatggagtatacgcgcttttgtggtcagggtgtttcaaaaatgcgtgggaataaatgagttcgacctgggtctcatcttggcagataatcgagtaatatttcgccaatgtgtttataacttttttactttcacataccgtacatgtcactaatcatgatgatttgttgtagggaatgcgttcccgcatagaggctaccattaatcgtcgccttgcttcattttactctggccgtaataatatatgcgtacactatagtaatgtgtacgtacacggtagtaatgtgtacgtacaccggagtaatgtgtacgtatacgggagtaatgtgtgtatatatgtacgtaaatatctaaataatttgtatatttacgtttcaaattttttttgaccataaaatcaaaacattcaaatcatgtatgaacaacacatgaaaaaagtacatgaaactaacatatatatcaaatttgttgttgtgggtggttagatatttattaggattcgtacatatacgttccattaaataattttgtgtacgtacattataaattaaatatatatacatgaagaaatccgatgaaaggtataactgtaattttccagtcatctttaacctaagtatccttttctacatttgagtgtcactaatgaacatgttcttgattgaaaaagcatcaattatttagaaaagaattaagtcattcaatcatttgtgagtcctaaacgggagataagacatgatttttggaataatataagcacactactaactatgtatccggtatagtattgaaaggtaaatattttacgtacatgaatacgtatagttatgaaagccctgcagtttagtattggaaaataggttttacctgaatcagactacgattcgttgaatatcatatttgcataatttatattgagatatatagccatataaataacttaattttgatgtcaaaaaattagattaatggtgtaccatgtacgctccaataaatatttttgtgtacgtacataatataagacttatgtgatttaggcattcttaggatataaatgtttggagaggtcatacacgtgtacgtgtatctcaatattatcgtgtacgtctacgggtttagttttaaatcttacctattctcaacaaataatatcgtataacataacgcttactaaagaatgtcaaaataacaattaaatagaaacaacaacatcaaaacaaaaaatatcatatatatcgtactaaatacataacatttggctaactcgccgtatgcaccatcgtagataccaaacattacaaaaattcgtcaatattgtaaataacaatgtcttcatctctagtaggactatagtagaatataccctcaccatcgtcaatattggtttattattgtatcaataaatatatctcaacaattttaactcatgaaaagatgtacgtacatcatttttcaaaagtattaagaatatctatactttgactatatatttttacttaattattatatatgcatagattttatggagaaaactccggaaatatctcatctaatcaaaataaccaaagccgtaccatgtcacatatgtaaacaatatctctcgggattggctcgtttgagtctatattaatatcggttgacaaaaaaaaaacaaaaaaaaaaaacaaagatttataatgtacaaactcaatatataattgtgtataccgctttaacaataaaacataatctattatatttacatgtccacatgtacgtacaccgtaaattacatatacgtacacataagaaatttattgaagggtataattataattttgcattcgtcttcaacctctgcaaccctaattttgcactcttcttcaacctctgcaattttaattttgcactcttcttcaacctcttacccttacccataattgtcgtcgccgacgatgatacattaacttccgaaactcctcgccgccgactactcttcttcatctctgccattttagtatgataaccagaaaatcctctttttgttagacactttaaaacgaactcgatcgaaattttctccactcaagcaaagactcgaactcgaacagagcctcaatcggaattgggtttaagttttgtcggaatttttatgcgtcttcgaatacggagttcgtcgaaactgttctgcgtttctcgaagacagtttttgattttattttaagttttaaaattatttacatttttatttatttaattttaaagatttaaaattatttccgtaaccagaatacaaaggaacgaaactgaacagttttctttcatttctcgttccagggcagattcgtccaattaagcccaagtggctaaaagctggttggctcaatccactttacctcttcgtgaaaaaaaaactgagaaaagtgttaacggtgaaattttctttagtaaatatttatagatatgacctttaacttattatatagaaaataaaagttgacattatatgtctcttgtttgagaacagtttctgtatctctctcattttttttttttaatccattgtgtatttgtgaggaacgctttgtttaagagtttgtccatcttcaagcgttacaaaaacactcgaggttttataattgataaaatctttggccatttggtcggaatttgtgaacacgacttctcaattccaagagagttaaaagaaaaaccacacttgagaaagtccaataagcataggcaaatttaaatatccaaattatcatttcacgtataacaaggagagaccaaatgatagaatggcccaccaaaatttcaattatttttgagacttaatcatcattttggtcacaagatatacaaaatactctcctggatttttatcatgagtcattccacacactaagctttatatcttttgacttgccgacaatggcctccattactctccgtcggagagacgccgtgttattgacggccatgttggcgactgaaaccggaaatgtggctatgaatactttgtttaaagcagcgacttcaaaaggccttaattcttataccttcctcatctattcttatctcattggctctattgttcttcttccttctcacatcttctcttataggtttctaaataacaatctttttgttagttaataaaccctgtttgattgattcttgttttgtcaaaagttttcatttgattacttgtgcattcttttgcaggtcaagatcacttccttcactaagtctttcaattctctgtaaaattggagttcttgggctgctagggtaaagccaactacacttcttgttcttcttcaacttttgaatgtaattattttcctaattgttggtaaagaaatttttattaacctgaaaatgtttctaatatactttactttttgctaaatgtgaatataaatgaacaggtcaacgtatctgatcacaggattcataggcatcgaatacagcaacccaaccttagcttcagccattagcaatatcaatcctgccattaccttcatccttgccattatcttcaggttttattttaatccatttacctttttttcttacaattatgaattgttaattagtaacgtcagaaattttctacctattaacaaaaaaaaatataaaaacttttgtttctcgttaataagtatttaattgttaattagtatttaatccatgattttttgggttagttttataaagagaatattaattcagataacacagatatgattatttaataaaggtgagctgttttgtagattaacacagataagacacttgaatcatcagtttgtaaaataaataaataaattttgtacttaatttacatgtttaataattaaattcagaatttcgatagcagtttttcaaagtttaattatatattgttagatctacatcaggttcaggaaaatgacaggaataaataacgacaaaaaaaatgacaggaataattgtgtggcacatgttagtcaggttcatatttttaaaatggacattagctataatgtaacatcaggtcctatttgtgatgttctaaataaaaacaattttttaggtttttgtaacactaatattttactttgattttaatcaatttgatgtataaagaatttcagaatttttatttatcagaagaaggtttggtatgatcaaaagaaagtttgaggtttgtttttttcctgaaattgatcagtttggaagttttgaaccgattttaactacttacagaacaatatttaaattttgcggatccattttcaaaaaataaatcaaaacttaaatttaagttttgaactttataataatcgcattttcaaaaaatgcctaactaagtcgtttcttttgtgagatacagaggaggccatatgagccccgaaacacattataatcttgaacatataggaacatggaggctagagcacatatatatggtacccttatttattatacagtattattgatttaagtagtagtcacaatgtttatcggttcttggagaaactagaacaaaacaaaccacaaaaatcccagttttgtagttatacatttttgtaaaacctaatccttttcatttttaattatttaaaatttaagtacaaaaacaaaactcgagagagtgaaagcctaccatataattttaggtgcgaaacccggaaagacaactaaaaatccagaaataccaaatctttcctcttaatttagagtacacaataaatccaccacaattttttttaatggggctattctgagaaccgaaccacaaaaacacaatgtctcaaaacatcttttgggatgattaaaaaaaaaagtttgtgagtttctattattctttaatgtattaaatatatatttgtttaagagaagtggaaataactacatttttaaaattatttttatttattactgtgtcaagttttattacaaatttcataggtgatagcaattttgaaaattttcatttgtatgattaaaatgaattgctttttccatttagcaaaatatttgatcatttaaatatttatcatgttttctatttgtgaaacaaaaaaatagaatggagaaagcatctttcaaagaaaagagtagtgtagccaaaatggttgggacaatagtttcactagttggcgcacttgtggtagttctctaccatggtccacgagtcttcaccccatcttctccaccatttccacaactccgtcagcttcttttgccgttatcatcctcaaactcggattggatcatcggtggttgtcttttagccatcaaagacaccctcgttcctgttgcttttattcttcaagtaataacatattaattctcttaacttgatacatcatacatacttgcatgtacataaactaaattttccttatagtagattaatattgaattggacaggcacatataatgaagttatatccagcaccattcacggtctctttcttctattttctgattgcttcaatcttgacgtcattgatcggaatcgtagcagaaaagaacaatccgagcatatggatcattcattttgacattacattagtttgcatagttgttggggtacgtaaattttaatattttagaaaacttaattatatcttaaacttcttttcaatactatagctatttttcgcagggaatatttaatccaggatattacgcgattcatctgtgggcagtacgtaataaaggacctgtttacttagctatattcagacctttatcgattttaatagcagtgattatgggagcgatttttcttggagattctttttacctaggaaggtatatgtatatatgaatcaataatcttcagacacacttgtttgtgaaacaagaaaaaccacacatctaatctaatggtttcttgttatgtggttaatgttgcagtttggtcggagggattttgatatcgttagggttttacactgtgatgtggggaaaagcaaaagaagggaagactcagttcttgtcgctgtcagaggaaactcctcttctagacgaaaacatagacgaccgaatatagatttacaagaatattggaaacgatgatttaattaatatgattagctctttgtagaatgtgtttgtgttgatcgagattaggagcactctattagtaacaataaaatgttctatatagctttgtaactgaacattgaacaatatattttgttactcatttttgaacacatgttacggacaaatgtttttgaataatatgaaaatagattgagagagttgggaaaattggaggaagaagaagcgacaaacctgtcgctaccttcatcaagaatcataatatcagtgacctctccccatgaagagaaatgtttacaaaggctaatcatgatatcatctttagaaagcgaatactcatatcacagggaaaaacctaataatttgactgcgggagacaatattatcatgtgaaaaaaaaaaaaaaaattatcaacaagacaaaattacaaaatattaaattaataaataatctcgtttaactataaaatcaaattttaatatttttgtataaattcgaaccgatatttaatttctttatgttgtaaaacataaacgcaaactgtttttttttataaattcgaactgaaatttaattttgtttaattgtaaaatttaaattaatttataaattcatatataaactaatatataactcgatttaatgacatattagactttataattaaaatgaatttaattttttgtagatggtagattttagggtcttttgtaaaactaacatattttgataaagtatttaagaatatagcagtataatatggtaaactaaataaatagcacacatgagagatgaaatgtctaaatactccttcatgtttgtttcagtgtgtagacacacgggcgtgagattgtaagctgatgatttcatgtgttatagagagtggagagaaatgagagtttgtgagtttggtaagcacacaagacgagaaaaaaggtgggataaggagaggtgatggtggtgtgggcaacgacgacggtgatggtgtgggcaacgacggtggtgatattgattgcagtggtggtcgtcgcggtggtggcggtgactctgatttcaacaccatattgcagcacaataaaataaaaaaagcaattaattccagaaatcagatactacattctctaatgtaccaaacaatgcaaaagtaatatctgcaaatcgtggatgtcaatttttgtatctagaagtgatatagtttttactaaagtctaaagactcatactatttagtaatttttggataaatagtatactatttacatcaaatctatggtttctgttatagtcctgatttctcactcctaatcatcaaagttcatgaatcgacacttgtcgatttgaatcagatctgtttcagaagtagatcaatcgaatgggagttcgaaatatggtgtttgtgagaaggagagtaaatgaaagagacactagaaagagcgagagagaggataagaaacacatagaggcggataaaggaggaagaaaaagccaaattctggaatgagaagagagataggcgaagagcgtgttgttcacatagggttataactggaattaatacagaagatataaagaatatcaccttcttttttgttaggtgttagttttctaatttatatttttttgtgtgtttcttttgcaaatttccctagattttaattggcttaaaaaaaagttgaatctttattactttgaaaaacttccccttttctcctcctccatcactctcagggtttctcggttcaccaaaaactcctaaatctctctctcagatcgtcactacccttttcaattccatcctcaatcttcaaaattcccaaacgaaatcaacaaaagatgtcgcaaggctacgcaatcgagctctacttcgatccagcactcgagaaccaagtcttgaaagcttggaacgtcttcgctcgtcgtcaaatcagtacatatctaatcaacaacgagtctcgtccacacataaccttattctcaactacttcatccatcgattcaacaaagcttgaaccaatcatcaaatcattctcatctaaacaagaaccaatctcactctctttctcttcaataggaagcttttctagtgacgacaatgctctgtttctttcgccgacgccgtctctttcgcttattcagcttcagcttcagttatgtgaagtgattaagaaagaagggtttgagattggtgaagagtatcgtgttgattcttgggttccgttttgttctgtggctgttgatgttcctaagtcacgtatctctgaagggtttttggttttgagagatttgaagcttcttgtttatggttatgctatggatattggtcttgttgagttttctcctgttcgtgaagttttctcttttggtcttggtaacaatttggaatcttgatatgaatgtttagctttcagctagtaacaatctgattatgtaattcctttggtttagttgacaaaagtttcgagcttgatggaacattatagaagcaattatgtttaagttgttgtttaggttacatctacgtttagtttatggagttttggtgcgaacttacttgtgcttgattcttctgcagattagagttaagcttgaccaaagttgtattattgatttgagattcttcaattgtgttttatgtttttgtgcatggacatgacttggtcgaagccgttttgcagttaatgtctttacaatttcacttgatgatgttgatggaacagtatagaagcaattatgtttagttttgaattgtgctagatcaagttttctgtaaaagatttgatcttctttgttcttcagagcttcttcatattttatatttgtttttgaagaatttgctatcatctgttatcaattgtgatcttgatgactggagtataagttacacttggtggaagaatatagaagcaatgtagtcatggtttgttgggaaagaaatttagctactatgctttaatcatctgcagatttatgttactcattggggattcttcatttgagtttcatgtctgcatgaatgctcgaaggcatttctctgttaacatcttgcaggattcaatatgaaaaaactcggtgaatacatgaaacagtactgtactatctgcggaagattatgagcaaccatatgaggtaaacgaaagttttgtattctattgatgaattgtgtatcattgataaaagaatcatatcagtaatatgcttgaaaagaagaaaggtaaaagaatgtttatatccacaaatcatatcatcttaactgtctaattatcgccattaaaaagtcgttccacgcatcgattggcccgggcaaacaccaatgcacgcaatcattataacctttcatccatttatttccccagtaaccattgggatgcccatcaggtctcatctgcataacccttgtcacatccaataccgcaaacttctttgctttgttgcctcgttttgttataccttcaagctgttcaatctgagatttcctgatcttcatctcattgctctgcaggtcaattttgttttctccgaaaggactcgtcctgctgcaagttcctccggtgtcccaagtcccattctcgaaatgcgcaggtgaaatagtcctcagtaccgtcactaaatctttcttacacatctcacactcattgatttgcctaaggacagctgagtaaacaagcttaaacccttcttccgggctaatctgagtcatgtttggtaagttacagtaaatgcaacccagtgtctcatctcctctatgtataaatataggtctgaagaaccaatgagcagccgagacaatagcaatgtctgtattcggtagaccattaaaccacccttcatcgatcttgccgatatctagatcaaacaatccagtacctgtattgttactatctcttctctctcgttcctccacaagaaacttagtccacgaggtcgagagagtaaaatcgtgcttcggaaagtaccaaatcctgtttctatcttctccatccttgtagatgtccttaggagtttcttcctgcacaagcaaacacacaaaaaaagcttaagcaaaagcaactattctcttcttgcaaacaaagcaacgtatatacataccattgacaacaagcaaagaagagattccatatggttcctagccacagaatcaccaataaaattcatcttcttccctcgaaccatactgagaaacgcctttggattaaacctcggaagatcgcaaccatcgggtttccatctccagaacaagaaatctttgtcgggtctcccttgttttatgcagttcttcgagtcgggaatcgtagcacagctcgagtttgtgtataaagatcctcttttgtctggaacccaatgtcccttgaacaaatcacactcaggatctaaccaaaaaaacacaacacaaaagacaaacaaatcattagaatttcaaacacaaactaaagaacacataataggaattaaacaaaactgagagattttcataaaaaaaaacagcaagattgtgggaataattaaatataataatcaaaagttttgtaagttcacaaatacaaatattcccacgaaattttcgtaacatgagttcttggagagaaaaaaaaactaacaaaatgttagattctgctcatattttacaaaatatcaagaacaaaaaacagcaaaaacgtacgtgggaacaaataaacataaaatcataattttaaaatacttcacagaatacaaataatcaaaataaatcccaagaacaagttcgtggagacaaaaaaagaaagtgacaaaagcaaaagagtttgatgatcatcatttatattttctatggttttaccttaccgatttgaggttggaaagaaagaacattttgatcagcgatggatttaaaaggattctgataaacaaagaaaccggtgaagaaaagagttatacaaaaggaagacaagaaaaatggagaaaatcttccaatgttcatcatcatccatctctctgattttttctctgaagtttcacgaaaaatcgatgacgatgatttcatcgttgcatgtcgatcatccctagaaacattaccaacgaataaacttatatatgtctataattctatatatacacgcgtagagatttttctttttattctctttccttaaaaaagtttaaatttgggtggtgaaaatgaaaatttgtgaaggaaaaaaagttataacggcgattttttatgatatttttgtttgttttcttcaatgatgacgtaacggtagccgtcagatgaatacacgtggcgtgctacgaggtggtatgtgtttgcatgtgaattgtggattggtaagttttttctagttttcttgcactaaaccacatttcacggcgtaatctcttttttttcctttgttgaaattttgttgccactttttaagtattttatttaaatgtgtaacgcgtctactataatctttctcgattctccttcttttcacaacttttattgatttcaaaacttatgtatactaggctatttctaataatttgaaaatatttgtactatattcatcattcaccaataaaaaggaaagatcacgattcacgaatcatgatgaattgatgatacattgataggtgaatatatgcagagtactgaatgatgagatcccgtggaaatccgatagagatcttttactatggactaatcaaaaattaaaaaagaaatatgaaaccataatttatgttgggcttaggcccaagctgtttgtatcatcatcataaaaccaaaaaacgtcataaatataaaaaattttgacaacaaaaaaccaagatttgtactgacgtttaggtcatgttcgtttctgagactgatgcatctaactgcatatgccaactgatgttcgtttaagtacaattttgcagacaagttagatggagcatccaaatgcgtttgacaatctcatccaaaaaagactattttttaagatgcatcttgagtttagatggatgcatcatcctcagttaaaaaccaacaaagttataaatatgaaaactttttgacaacagaataataattactagacttatatgggatcctgttttcaaaaaaagaaaaaaaagaaaaaaaagacttatatgggatccaataaatgttatttgaagtcaattacacgacgattatataaaagtttgatatttgtctatcttgcgtcctcaaaaaaatactgatgggtttaaacacataaattagcttttctattcaagacattttggtaaaagtgtgatcttttttattttttttctatggtaaaagtgtgatctattcaaaggattaggggttgccatgccacattcgtagtagtttagtgagatcaagagcataattaaaatattgaagattttacaaatgctttatctcgtcaaaaggaagcattataagtatgaccaaacccgcgacttgataatttcagactcaagctaaggtttttttgtttaaattttacttgattctctcaaagatgaaaaaaaaaaactacataggagtttgaaacaaagcatacgaaaggaagaataagaactcaattcccttcgttccgccggttaaaagaacagtcatgctttgaagattaatccactagttaatcattaattgttgtgtgacactaactaaaactaaagatagaagctagaacaatttagaaagaaccagtcatatctaaaaatacagagtgatagattaatgatggttgattagtagtccaatatggtagcgttttttggacttaagcgagtgttagctatgtgctgcattctagcttttaatttctcatcattgatgtcaaaattgaataaatgggcattatccatgtaagtgtggttttaattcggaatatttttacctaaatcgaaaaaaacgattgtctaaccgaaccaaattacctaaaccctaaacctctatttcaagtcgtttcaggactcttttacccaaaccgagtaatccgaattaccgaaattctaaactaaaccggactgattggacccattacccaagcatactacagtaaaacctctataaattaataatgtcgggatcctgaaaaaatttattaatttagagaggtattaatttatcgataaattattaatttatggagagattttataaattttgtaattttttacaaaaatgtgatctaaaaggtactttttctatacaatcaataatttttctaaaaatcattacaagtagaaaaccattattaggtttaaaaacaaaaacaaaaacttttttatacgtagaaaaattattagaattgaattttacaaagaattaatataaattaaagaaaaacagtactaaagtcatattttactaagttttacataatatataatcataaatataaatatatattcataaatttatacaattattaatttataatattgatgagaccatatatttacataggattttaaaaaaatatattatcttattaatttatcgatttgtatcaatttttacactagtcccaactcgggaccagaaaaatttattaatttatagaggttattaatttatcgagtattaatttatgaaaaatattaatttatcgagtattaaggagtgaatccattcattcacccctttttaatgaccaattagaatttgacatgtcatctattaaagaataaataaattaaaatcaaccaaacaaaagaaattaagaaaacaaattctgtaaaattttaattaaagaaattatttgtttggctttataaaatagttttagggtttatattttgtgattaaacaaaattatattttggtttgggttgataaaatagtggttagggtttatattttgtggttaaacaaaattatattttggtttgggttgataaaatagtggttagggtttagattttgtgattaaacaaaattatattttggtttgggttgataaaatagtggttagagtttagattttgtgattaaaacgaaattatatttcggtttgggttaataaaatagtggttatggtttaaattttgtgattaaagcgaaattatatttcggtttgggttgataaaatagtgattatagtttatattttgtgattaaaacaaaattatattttggtttgggttgataaaatagcggttagggtttagattttgtgattaaacgaaattatattttggtttgggttgattaaagagtggttaagatttagattttgtgattaaatttatttattctttaaatagataacatgtcaaattcttattggttaactaaaagggggtgaatgaatggattcacctcctagggatgaacccaagaattgttcttaatttatagaggttatactgtagtctgtaattgcttatattaaggtttaggttgatttaacaaaatgttagactcagttcagcttaaaagtaatcagaaaatttcttctcaatttgttcgtcttctctcatctccgattttcagataattctctattccttcctcgcaataagtctcatttcgttttgggattcatctcggtttgttcatcaactgtttttatggacatctattttctttatactagtaagaaaaagtgaaaaacatataagttgcgaattgcgatatacctctttgtctagaagtttttgttgtttaaggaatatcacattacaacaacaccaacaataacaacaaaatgctacatcgagaaaagatgatttttacataaagaaagttaaaacaatgttccatcaactaagattagaaagaccaaacgtcgttagctcaattggtaaagatcctaggcgaatcttagaggtcgccgattcgagtgacgcttgggacgaaactaatattacatgctgtggtttcgggtcaggggggaggttacgggtttcggcccaaaacttccagatattcaaaaaaaaaaaaaactaaaattagaaaggagaaaaaaatgtgtattaaaatgtgaaaattaatacatagttattgcggaagatatacacactaataatcactcgtttacgtgataaaggtgcaaaaaaatgaattgcaacaagatattccatattgaaaaatataagaatgctaattgagatacttgttttttccagcaaaattaatttatattgaatacaacaaagtagatagccaaggtggtggcataatacaaccagagaattgagatgcttttaacagaaaaaagaaataccaaaaattgatagtaaaaaagataaatagcattataatcggggaacattttgtttttttttttttgggcaaaagacttttccattaaacgaagattaaggagataaacaaacagtcttcgactaacgctgatttggcgataacatcggctctccgattcagatcgtgattgataaaacaaaaggaaacattcgaaaaaggaggatagagaaaggatgtcgtgaagaatcccatggagctcaatcgggtgagttccttcattgattgctttgattaacgtttgagaatcatatatccttatatattggtgaatttgaaattgatcgcctggttgattgctaggtgaagggccattgcttctgccatgagcggcgaactgatgaactggaccgatccaccttccataaattcaattttccacagaggatcgaacattatccagccaagaccagctttgtgcgaatcctctttccacgctgcatccgagaaaaccctaattgtatctaactgaataaccggtgtcaggactggaactcggagggcctgcggtggtgttgctaaactctgtgcggtaatccactcttttgcttgaaccatggcttgtgatataacatcagatgcctttacttgacggttttcaaaaatcttcttattccttgtggtccagattgaccatagaagccaagggaatagaggtccattgactaagcccgtcggtagtaaaaccacaaaagttctggatgcttcaatgattgctcttagagaggtgttgtggacaaacacaggaagctgtttaaacgaagccttagcccagacttgtttgacgaagctgcaaaaaaagaagagatgattcatagattcctcaagaccacaatggggacaagtcgctgtggtattgattcctctaaacttcagattctctccaatagggattgcatttttcattgctttacacatgaagaattaacttttggggctgtttttgtcttccaaatctctttttgccaattgaatccttgttgattgcaggattgaagagttaacttcctgttcttctcatttgcaatgtggtatcccgactttgcagaataatcaccagtcttagaaggtaaccacgcatacttgtctcttgcgcctagtttacttggtataatttccaagattgtatcttcataggctggcaggatttgagcaattttctctctattccaggtgaagcttcttggacagaggagttgtgagaatagcatctcatgagtttgatgggtgggaggtcccattggttgcaggggtatagaggaggagagccaaagatcatcccaaattctcgtgttctgtccatttccaattgctctaccaagctgagttttcaataagtctccaattgctttaccaagctgagttttcaagaaaaccatctgaattgcaatacttccccatgagaactttagcgagtaaacaagatggtttggtaagcaaacgccaacttatctttgctaataaagcctcattaaaacttttaatgtctcgaaatcctaatcctccatccctcttggatagagttaattttgaccatgaaatccaagccattttatgtttctcgtcggagccatcccaccaaaaccttgtcaaagccgactgaatacctttatagagcgatcctggaagcttgaagctagacatagtataagtcggcatcgatgctaggacggactgtaacaatgtagccttgcctgcgcttgataggaattttgaagaccagctgagagctcgctgtcttgttcggtctatgataagattgaacaaatcttttttcttccttccaaagagttcaggtaaccctaagtactttcccagaccgctttccttttggattctgagaacttgtttagccaaaattcttgcttcttcactagtctttgaagagaaagttatggctgatttctctgtcttaatcatttaacctgaagcttcctcatatttatgcaggatagacataagttctaggcaactctttctgtcagatcggcaaaagcacatggtgtcatctgcaaagagcagatggttcactcttggactgcctaatgcaactctaattccaggtaattttccttctgcttgagcttttagacaaagacctgaaaggacctcactacaaaggatgaaaaggtagggtgagagggtatctcccagtcttattcctctggttggagtcactgatccttgagctgatccattgagtagaaaagaataggagactgtgtcaatgcattgcataatccagtttacccatttaggatggaaccccaacctctcaagaactaatctgataaaatcccattcaagacgatcatatgctttgctcatatcagttttcactgccatatagcatatcttttctgctcccgagagtgtagaacttcatgagtgattaagacattatctgtgattgctcgattaggaacaaaagctgattgattctctgcaactatgttttgcaggactggttgaagtctcttggaaagcagcttagagataatcttgtaaaacgcggtgcagagggcaataggtctgtattcagcaacctttgtagggcttaagatctttggaataagtcgtatatgagttgcatttattcgccttggtagatgactcgatgagaaaaaaatttgcacctccaaaatgatttgagggaccacagtttcctaattagattgaaaaaagcttgctaaaaacccatcagggcctggagctttgtctagatgtattgcataacaagctttttcttatttatgcagaggagggcatagctattaggatctcatttgtttcatttgagatgcgtggaagaatggcttcattaacagtagagagtctgtctccttcctgagaggtgaagagtttatgaaaatactcagtgaaaactataagtatttcactttctttgtacactggttgggattcagcattttcaatgacggaaaacttattgattgcctttctgcctcttgtagcagcatggaaatattcagtattcttgtctcctaaagccagccaaagttggcgatttcgttgcttccaaaatgcttcttcggccttataggctaaaagaagagtattatttagagaggagattaactcagcactgtttgtgggactagacatggccttgtcaagcttttgtttgtagtcctctatcagtttttggctgttctgatgtgcttctcttgaccatcggattatactagcacgacatctattaatcttctcctcaactgattcttgatcatcgaagctccaagcctctgagataagtaacctaacttcctcgttatcccttaggcgacgatcatatctaaataatcccttctttttctttttcttcagatcaaagtgagtgataagcggtcgatgatcagatccttcaaatctcaggtaatcacttctaccagaaggatactcttctgcccatgcagtattagacatggctctatctagtctacagtgaactaggtgctcatttcttgtgcctcgccaagacagaaagtttccagaatgtcttaagtcaaacaagtcacatgttgacatgaatgatctaagatccacaaaagatccaacaggtcttttgattcctccttctttttctgatggttcaatgatatcattaaaatctcctgttataaaccatggttcagaacggttggttcccaaatcagtgagttgattccaaataagctttctttttgatctatcaggttcaccatataggaaagtggtaaaaaatcctttttcttctgcttttattagagtatcaatgaaattttggcaggagaaaacgatttctacttcaatttcttgtttccatagcagggcaagtcctccacctccagggctgtgaggagtaactaggtgaattgctacttaacccaatccaatgagagcagtgaggacgacagcatctggatttttcgtctccatgaggaataggatttctggtgagatattcttctttatctcatccagtctatgagctgttatgggattccccaacccacaacagttccaacttgccacttttaaggaagaggattggatggatgttgaaaatccatcctaccttttgcaatagctggtatgatttttgtcttaggaggtacctaacttgttgatgggatatttgcaggattctgtcttcttctagagggggagccattactgtgagaaggtacagaatctgcctgtgcagttgttagtctggttagagcggacttcctcttgggtgagccttgtgtaatacagagttgtttcttactcaactttgatcccactaatctcatagggcttttattaaccggtttaggagtaggcggtctgcctcttttttcttcaccataggagcttggagtgcttggttatcctctaagattggggcctgaatcgcttccaccaatgatggttggtgagcttgagctgctgcagagataatattagctgctgtggtagccatcagacctacttcttctccctgattaactctgtgtcttcttgcagcactttcagtagggtcattacaattaatgtattgtaccgttacatctcgcagctctcccataacttccgcagttgtagggataggcggtggtttgagaatgttgtcattagtcatttcgcgttcgagaggtggccttctgtttctagatgattccgagatttcttgatgaatgttgtcttttgaatagagtttttctctttctctccattgaaggtttggagaggatggtttgtcatgatatcgttcttgcggtttcgagtgagttctagcatctctagttgaatctcctctatagtagtcttgggacttggaaggtgatctcctgtaacttggggttctgtagtcaagggatctcctgtctgaatgtctttgctgagagagaccagaaaatctgtgagctctacgatctgatgaactgccatcatttcttcgagtatgtcctgaaggtacttgagagatgtgtctgttatttgagagattcccactttgggacttgtttcttgaggagagctgttctctttatggcggtagaggaggtagtgaactctggttttgagattttctacttgactgcaaaccaggacagttggatttctcatgtgatagcctgttgcagtgggagcagtgcttttttaatcttttgtattccagcgtcaccagagcttcactgccatccgggaagtcaatcattgcatcttttacaggaggttgcagaccattcactaggactttaactcttgctaccgctggagtaagttcatgatcaactagttcacccgctagaccaccaatgtcaattagcattttgggtttcaagtagtgaagagggattccttgaacatcaatccagaagggaatctcggaggagaaattatctgatataacaggttcctatctctgtagaattaccatccaatcatcaaaatgataaggtctgctgtttagaaccttgagcaagtcttcctcaaagtcaaaacaaaactggaagcgtcccctgccaagatctgacccaatggcttttccattcagattccatctgctagagagaaaaggtataagggaccacaggcgttgttgcactgcaggatttgtgagacgtcctatgagggtaagagagtttttttggaccaaatctgaggtatccagctgcggagccttgagtcttttccgggaaggctgagagtagtagtcatcagctatcgcttttcctttagcataataaggtatgcggcgatccatcttctaatttagtcctgaacaagctttaattttgaacagttcttgggcttgaactttgcaggatgagacaagaaggtagagatctttttgtgaggaggcagcttttgtagaagtttcagagatggttcaaagatagttcttcacactaggtgagattttcctgaaattttttcaaatggttcttcacaaaaagtgagactgttctctatccaaaccggacagaaagtttctagataaaattccaggaactaaaagagtaatgacaaacattccttcttcagggtaattgcattcattgcaaacaaacatcacacaaagtaacacaaagtacaaggagtacaagatatagaagtttagatatcgtttgggcagttgtttggactgcattcaatgagaaataaacaacctcttttaagggagaggaaactctttaagcagccgttaaagaagagagaccttcctcacgggaagaggggcgtctcctacgccggctcctccgtgggaattcgccggaaagatggttttttgggttgtttttgatagaacttctattttgggtaaacaaaagtgggtgagaatttctgtttttagtaaaaaggtttggtttaaatctggtttttcaaaaagtagtaactagaaatagaatctcgaaactcatgcgagggaaagtttttttagctttctttctcctcttcctatattttctattccctcatatcggggaacaatttctatgaattgttattgacattaaattatagtaaattagagagaaagtatttgttcgtttttgtcgattatatccatgagaactcttgtttcaggtgattgtgtttgtcgattttttttgttgtgtttcgtggcatgtgaagtttttgtttgaagtgtggagtttttgtcgatttgttttgttgtgtttcgtggcatgtgaagttttatagtttgagtgtagagttttagttttgtttgattattttttgttgtgtatttgtgattgtgaagtttttttatctgtcgtgtttgtgtatttggtgcgagtatttttgtcttgagaagagagacatggagattttacctgcctcttcatttgttctggactacgggatttgccttgacgactttggtaaccaaaagacctgtacacatgcatgaagcaagagaaatatcaaataagagactaaaaaacagagaaaattatttgaccctttatgtaaaagaaacatgaggaacaacttaccttaatatgaagtatctaagaaactgtttggctctcccaagtcttcgagaatacgattccatacttaatttgatatcttgccccttaagtgttgtagctctgcaataaggaatgccaatattttttttttaacttacaaattgaatacaaaagaaaatatgtgaagagacggatgaaactaactgatcttgcttcaaggtaccactagaagtagattatggaatatttgaaacaccttttgatactggccccgccgaagcttttgatgattcaagtcgttagtagagaggagagaacatgttaatcagacaaccagatcatgaagattggagaggtaccttgaacaaatcctggtcttgctttttcaagcacaagagctagtgatgagccttttatatctttgatattcatttccatctgagaaaaatgcatacgactaatccgatattaggttcaagccacgaatagaacaagctaacccaaggatacctaccgtgtcttgtccactgactctccagatctcggaaaggcatccttccactatttttcgcagatc

SEQ ID NO: 1052 - DNA, 85690 bp, Arabidopsis thaliana
gatcctacgatgatttgtggtggaagattagggtatggttttgttgaatcatgatcgattagttttgaacacatttctcgtaggatgattcacagaattggaagatcctaggttgttgatgcttgcttgtgttctctatgtgaattgaatgttgatatctagtgtttttggttgttttaaaacctcttttctcttaattttttgttgctttgcattcatattttgggatatagtattgcatttgcatttgcatttggttttcttaggtacatgagtggagtttagaattttgaaagtaaaatgcagcaaatggagcaaacaaatgagctaagacaatgtaaagtgaccaaggaggagaagctaggaggacaatagaccaagtggtcgattgcgtggtcgattgcgtggtcgattggtcaggaccagagctacgaagaaaatttaaatctaccaaagtggtcgattgcgtggtcgattggtcaggaccagagctatggaggaaatttgaatctaccaaagtggtcgattgcgtggtcgattggtcaaggattaatgatggggacgatatttgaatctaccaagtgatctattgcttggtcgcttgctttcctaaaccgggtcaaaatccgatttgttccgtgttgatccggtttattttctcattactataaatactcttaacctagttttagagaggcgagcttttgttttagagatcaaaacttcttttaaggttctttatcttaagtttttgtatgaatcttggttagttgcgttttgaatcaaagtttaccttttaaatctcttatctaccttctctaattatgattacacaaagaccaaacctattcctttgtgctttcatgatcatgagtgagtagtcatttagagttctttggttagggtagattaggatgatttagatgttgggttatggagtttagggctagatcactacaagaaaagtgagtattaatagcactgagttatagcgttttatgtagtattgctattaatgagtaaccactgatttttagatagcgtttagaatttataaaacgctatgaaaggtttttactaaaaaacgtgtttattaaagttggtatataagagttttgattgcagatccatattaaaacgctacggaatcataagcgggaactaaaaaattttgggctccaaaaagcctttgaccaaagacttaggctccaaaaataattttcctcgactgttcttctcctttgactgttcttctccttttcatctctctctagctcttgaacttcttcactgctaaaaaattaagaggttctatcttcactcttccttaccatctgagattgtcgcatctatcttcactcttgctctctcgtcgaaattcgtactcgaccacaaatcccatccatcgtcttcgtccgcttcaaggttgtaatttttagggttaatgcatgtatgattttggggtttagatcttgttttgttttgtttcaattgaagttttaagagtttggggttttgatttgtcacaattttgcttctttttaattgaatcgatttgggttctcgatttagttcactaggctttgaaattctttctttgatgtttcgattaggggtcttggcaactcacattcgccgaacattgtctgaaactgacaccagtatttagggttttgcttcatcaaaattgttattgtttcgatttgtatttggatttttagatctataaattgtacagcacgaatagttatagtcgattatgatgtcttgtttttggtttgattcttgtgttgtctttattttagtggtttgattcatgtcttgttttctgcagttcgagtttcgcatagacgaaggactagcactagcaggtaatggttgagtggtttagttcttctcttaactcagctgtattgcgattcatggaataaaagtttgtgtttttttgcagtctcgggttttacaattcacaagatccctcatagattcttcttctgtgcaggtatttggtttctctttgtgtgattacctttatttgatcctcatggttggtgtctgacatatagagtaactctaatacttgtgtgtttaactgctggtcgagctttggagttattgttttaatatggagaagtcttgggtttggctgccaaggtaagcttatgattgttatttacgttgttctcttatacttacagtgattatattggagttaatttgttaattttattgactaacagggctagccctgaatatggagaaggagctaataattttgttgaggcgccagccaggagattgggtaatcctgaggatattttatgtccctgcagtgattgccggaatgtttgccatcaaccattagggacagtagtagatcatttggtgattagaggtatggatcaagagtataagatgaatacttgttggagcaaacatggagatatcagggatcatcagcggactgatgttcagacttctgagtttgaggcttatgacttgattaggactgcattttatcagggagaagaaaatctgcagtctcagactgagagtggtgatcagggttctcatgttgagagtaaagaagaatcaaagagtttaggcagaaactgattgatgcagaaactcctctatactcgacgtgtcccagctatactaaagtttctgcaatcatggcactctatcgcataaaggttaaaagtggtatgtctgagaactacttcgatcagctcttgtcattagtgcacgacatgctacccgtggataatgttctaccaaaatccacagatgagatgaagaagttcttgaagctatttggttttggttatgaaatgattcacgcatgccagaatgattgcattctgtataggaagcagtatgagcagttagtaagctgtccacgatgtagtgcatcaagatgggaaaaggataagcacacaggagaggaaaagaaagggattccagcgaaggttttacggtattttccaatcaaggatagattcaggaggatgtttagatcaaagagaatttctgaggagttgcgttggcatttcagtaatgcaagtgtagacgggtcaatgagacatccagttgattcattgacttggtttcaggtgagggataaatatccaaagtttccagctgaactaaggaaccttcgtcttgggctttccacagatgggatgaatccattctcaatgcagaatacgaagtacagtacatggccggttatgttggtgaactataacatgtgtccgactaagtgtatgaaagctgagaacatcatgttaactatgctcattccaggacctactgcgccgagtaacaacatagacgtgtatcttgcacctcttatagatgatctaaatgatctttggaaagaaggaattgaggtttatgattcttatgctaaggagaattttagacttaaagctatattattgtggactatcagtgattatccggctttaaggactctagctggctgtaaggttaaagggaaacaggcgtgtaacgtttgtggcaaagatacaccacataggtggctaaagtttagtcggaagcatgtttatttgggaaacaggaagcgactaaggccaggacatccctacagaaggaaaaaggcttggtttgacaacacagttgaggatggaactgtgaatagaattcagacaggatctgacatatttgagacacttaaggactttagaaatgatttcggaagacttttggataagaaaacaaagaggagcagaacagatttgggagatgaggatctggttttagaagaagaatatgaagaatatacagatcagtggcggtggaagaagaggtcaatactctatgaattagcatactggaaggtttagttcattcagaagaagtatagtgttttctttgtgaactagttttgttgtttgtcctaacttatttttcttatttttcaggatatgtcagtccgtcacaacatagatgtgatgcatgtggagaagaactgctttgatgcattattgtccactctaatgcaaagttctaaatccaaagatggatgaaggcaaggaaggatttggaagacataggaattcgatcacacttacacacagaggtaagaggaaagaagacttacttgcatcctgcagcttattggttatctaagacatagaaaaagggtttttgcagtaggctagctaaattcagagggcctgatggttattgcgctaatatctcaaattgtgtttcagtagatcctccaataattggtggcctgaagtcacacgatcatcatgtacttatgcaaaatctcttgcatgtggcgttgcaagggtttctgcctaaaggccccagaattgcagttacccgtctatgcaattacttcagtagactgtgtcagcgtgtccttgatccagagaagcttcttgcattagaagctgaagttgttgagacaatgtgtgaaatggagaggttctttcctccttcacttttcgatattatgttccaccttcccatacatttagcaagggaagcacgattgggtggccctgttcattttcgttggatgtatccatttgaaaggtacattttcttgaagctttgtttggtctgtctcaattttaaaagtgaaaaccacttaactttatttgtactgttttgaatgatgatgtcaggtacatgaaaacactgaaagcatatgttaaaaactatgctaggccagaggcatgtatggctgaggggtatttggctggagaatgcatagcattctgtactgagtttcttcagaattcattaccaccccaagaagaagtcaatcaaaatgaagaccttgaaacagatgagaatatcctagagggtcgaccgctgaataaggctactgaagttactctaacagagagagagagagatattgcacatcgatatgttttaatgaacatggcaatagtagatccatatattgagtaagttctatcttcattcttgtcagtttgttcagcttaacttgtataatcaacttacagaccttgttactgcaagatgcatctagaggaattgcaagcagtcgatgctagatgctctaaaaacgaaactttgttatggaaacttcataacgacaggtttcctcagtggatcaaagagaaggtaatgttgtcatcgattagagaatgtttggtctgttgataaaagagactttatgtgtcattgattagtattttgtactgttttcctgttagatacctactaattcaaaggagcattctacaaagctgagatggcttgcatttggtccaagacttgttgctcagacctataagggctatattataaatggtaatcggttccacacagaggatgtaaggcgaaagactcaaaacagtggtttaacatatgaagctttcagtatgtgtagatcaagtgccaaagatactagacaccaagcagacatagtagcattttacggagtgattaaggatatcataatgttggactaccacatgttccagattcccattttcaattgtagttgggccaacaaagggaatggtgtgaaagaagaagatggatttacacttgtgaatcttcatttgagtcaagctgcgtttctgcaagatccttacatcctggcatcacaagcaaaacaagttttctattctagagaaagtgacttgagtcagtggtatgttgttatgaaggcgccaccaagagggtatcatgaattagagacagaagaggagagtgttagtcagttgttagtccacccaatagaagacatgggaaatcaatcttcagatgatgaaagtttttgtgctagagatgattgtgaagggctcttagtattagaatagttgttgacttgtcatttttaatcactttttaaaaattgatcttgttgcaggggaaccagaatgatgtcaagtcaagctaacaccaaaccacgtcgcagtaagcgtcaacagggacttgaggtgagtccttttgaagtaagaaaagttaggaaaaacaagaagcaagcgagtcctcttaagcctgtgagagaggaaaacaatgagttgagtgttgatgagggagatgagcaagtttcagaccttaatgaagaagatgcagaccttaatgaaagcaatcaggatttacctgctgatgataatgcacagcatgagagcattcaggagccaatcgaagaagacacaactagagtttcaaaccagagtgaagaagcacaatcccatcagtcagggactaacaaatagagaactagaggtccatctaagatgcgtaaactggctaaacatctagatgataaggtcgatgttgaatttacagaattgggtgaacactttgggaatggttcagtcaaactgtcgtcctttcttggtgcactagtcagggagcatgtacttgtgatacttgatgattggaagcaccttgatgaacttacaagacacgcactttgggaggaaattcaggtatgtataacaatttatttagtttaccagaacgttcccttgtgactcttagttaacaatctaaacttatgtaggggaggtttaatctgcaagaagaatggcaaaaacaagctatttttaggcagatgggttgtttgtggaggtcccataaatctaagattctctcaaaggttaaagctgcaaagacaaagcttagagtacttgagctaagaccaagcaacatcccatatgtcgcagtttggagcaattgggtgaagagtaggactagcagcacttttaaggttgtattcattgtgaaatttgattttctaaagtaaatttacaagaaaatgttaataatgttgcattgggtttgatttgtaggtacaaagtgacaaatttaggcaattaaggagggcacaaattccacatactaccagtcgaaaaggaatgattcgcctggctcaagagatggtaagtttatatagtttttggttacgaatatctccttgaaaacaatagtgagttctgctgctatttaaattaatatttggtcgtcgaaaaaaacgagtttagacccaaggaaggtgacaagaagcaaggtttgggtagcaggacacacacattctgatgggagacctgtgaagccagagtttgaagagaccattgtaagaagttgtcctttattctattatcattttcttgatcaatttgtttatcaagatttgtgttttgtttcaggaaaaaataaagtcaattgacagtgaaatggactccacatctaatactaatattagagaagatgttgttagtcaagtattaggaaaggacaaacccgggagagtcagagggatgggcagaggggttactttttctaagctagctttcatgcaagttagagattcacatgtgcagcagcttgaagctaaacaagctgaattgatcagcaaacttgaagacttgcagaatgtcgttcatgacttagctggcaaaaatgtatgtttctcacctctgttatgatagtgatgtagtctttattttactgatgcccttttttgttcttcacagtttccaacagatagtcactcaaaatcagaagcaactagtatagtaaagtagttagatgtcagctactggattggaatgcgtctactgaagttgttgttggagaaggagaattctgctaattgaacaaacttacaagattggtcgtataagacttggtccaaacgcagcagctattattgtgaggtctgtcctagtcgaagatgcatatgtctggagacctacaccaaccatttgctcacttgggcaagctttggggagtaaaattgcatggccagctgataaggtgatattggacaatgatgagcacacaactgaaaataagactgctagctccacggtactttctaacttctaacttgatttattcttaaatgtggaacttaagtggaactttgctgatatatatgcctgattacataggatacatcaacagatagagttcgcattattgattggacttttgatgaagttatagctgaaggtatattatgttcaactgatccaaaagaaatggtgaacaatactcaactaggtctgaatgttgcagttgttaaagttgatctggtaattaaaggcgatgcttttttgtggagaccaagtattgaaatgtcaatgatgagtgaagcacttaatgagaacatcgtctggcctattcagaagatacaatttataagttcatcgtcggtacatgaatcagctaacagaccatcaccactacaggaatcacctaccagaccatcatcaacggtatgatatttcatcttctgtgaatttgtttagatacagttgagtagctgcaatggtgagaactgctctaatacatatatacattcaaattttaaattgacagactctaagtaacacttcgggtaacatcaatggtgggaaacagaagtgtattttgctggatatcaataactttagccaaagagttgcagaaggcaaggtttgttcatctaaacctgcagatgttgtccaccatgtccccttaggtcagaatgctagcaaggtatgggtcgaagtttcaaagattggagatgcaaaagtgtggaggccaaattcagaaattcaattcatttccgatgcaataggcactattgtagcttggcctaatgacagactcatgttactctgaacttgctgaacttgatgtaatttttttacttttttatcacaaacaaagattgtatgaattttagatgttttattgattttatgaaatttaatttcttttcaaattgatttttacaatttggttgacctgtcacaacaattatttctgaaattgaaattattaattcgtaaaacgaaattaaattttatatatttccagaattcagtgagatatatagtaacatttcactaacgctatttatgaattattaataacaaaacaatagtgctattataaaatctacagtagcaaacaaataaacgctattaaagataattttaagatagcataaacaaaaagcgctatataaagtgttcgacctattatcgcggttgatgagatagcgtttttattaacgctatctatttatacgatagcgttattcagatgttattaattctcgtttttcctgtagtggattacttaagatccttgtttattggttgcttttaaggatagatcaaccttgatcatgttgatttagacactaggaatttcatgcccggaaggtgttcgatgaatttcccgaaccaaaatctttaagtgattttcataccttacctttggaaattgttgattagggtgattaatggctagatagacttgttatttatgcttattgatcaactgattgcctttggaaattgttgatgatagattgattagtaaagggattaatatcatggaaatatgttagtcttgcttagtgttctatggcctaaggatcattgcttgttagaagttgtttgatgctccatctctttatcatttctaatcgattaccttaacccgagaattcgtctttagttatcacttagtaatttgttaattttccgctttgtttacatttgaaacttgttagtcttttgtttcttgctttcttttatcttgttttgcattgtttgcttgataatgcattgttactaagatttagaatacttaaaatcatcttgttagcttagattaagcaattgtgtgtattcttggtgagttgattaattgcaaattatggttccataaacaattgaaaacaaatgctacatcaaatgttatgtgatgctggattacatgcttgcttgggagaagtgtttgttcatagcccttatcacagtgattatgtcttcggaggaaactgtgatgtcaatgatcgagtaaagactgtgtggtaagtgtcaataccaagtagttaatttggaatttgtgtttcatataatcttaatacaattttgttgtgtcacagctggaggcaacgcttattcaactctaatgtctgcaagttcctcttatgaattactttcatatttcaagaccttgagagcacattatctgctcatgacatatgcttcacacaagctgcggattcgctctaccttattatgcttgaatttctacagcaagttcacgctcctgtctatggttagattctgataaacatatataattaaccttgttgtcaatgatcaagtaatgactgtagtagttgtagtatttgcgtttcatttgacattaatattgttttgttctatcatagctggagcatgacagaaagaagttgcaactcagtgatacatgaggcaatgtgaaggagttgttcaatgaacgcagagcaatagtgtaagtctctacatttgggaaaaacgctctatttcccgccgagaactatggacatcacgccagatagagcatgttctttcacctcggtctatttacccatgagttggaagttaaatgctgatttccccaccaaatcaaagttctacagcttaatgtccccgagactgtgttttcttggtttggtgagtaaaccctatagaaaacgaaatactggtcataagtaaaccaaaaatatatcttattccttttaaaaaccagacccaatattcatccccaaatttttaaaatcattgctcgataaattcccatctaagaaccctgaaacatcaaaattttaattcccttcagttcgattagaaaactcgaattcaatttcgatgagcaatctatctactagtttgacgggatctacaagttctcgtggaagaggaagagtcgacagaatgccaaaaagatgttggtgtagggaaggaattgttgccctaacatccaaatccgatacgaatccttaaagaagatactttcgttgtggttttgctgcaacaaacaaggtaatttcattgatattcatcaatgtttaagctgaattagatttttttacttatgaattttattgttcattgatagctaaggaatgatgaacacactttcaagtgggttgatgaagctttgatcaatgatttagacaagtttaatgcaaagattggggaagttgaacaacaagtgagagagcttagaacacagagtttggagtttgagaaaatggtttgtgagaaagtccaaatgaagattgagaatgagttatttgagaaagtggacgatgctttggctgaatcaaaagaaggcaataagaagatgatgatcgtcgtagtgataggatgtatgatcatgattggattgagcaaattagtcggatgaatgtttatgtctcggtttagattgaacaaagtagtgttaggatgctttgtgttgttactcttgtttgttactttgtttgacttttatgattaaggtattttgttcggatgtttaagaatggtatgttgtttcgatgaatgtttatgtctcggttttcatctcttgttgtccttttgtttggcatacaactatgaacattaatccacaaaagatgcaataacaaaataaatacaatattcaaaagtagtacataacagccaaggatacataagagtcaaaacaagtacccataatatctgagaatacaaaagaactaaggttcataacatccgagataaaagaagtgccatactagccctactaagctattacatagagatcaaacttgagtgagtgaatcttgacttggttcaggttgaaaaagctgtgaagctgattgagaagcctgtaaaaaaagctgaattatgttagtataatccaacagtagccacatacataaagagaatgtcacaattttgttaccacatgtaaagcattttttcatattttttatttaaatttaatattgtttatttgtgctccatattaaaaactttcctggatccgccaacggtagtgtttttacgtatatcatttttgcatttatctttttaaaaaaatttggatttcaaatccaaattccaacaaaaagttgctatgtccaactcatcccaaacctagaactaagtccacatcccatatagatgatgtgtcaaaatacaatctgaatcatattaataaaagagctgatagatcgacttctagttgaaagaaaatgttagaaagacatgggttttagtttaactatattggttatatttttcctgaaataatttcataaatctattaaaaatattgataaactgaaacactaattttcttatagtcaaatttagtgactcgggtgtcggaaagtttttgaaataaacaatcctcatatattttcatacttagacataaggttttttgttgccgacctatatgatcttttcttaatttgcgaaaaagcccacgtaatccccaaaaaaataaaaaaagtataaatgtactgtaaaataatccgggctacgtacggacatacaaatctccaattttatattttatgttattgaaaaatcaacttatatattataaaattgtctttttaacaataaaaaccaacgtgtttattgtttggctggaaacagaagtcgcacggtcttgccattggttactatcttactggtggtggtagataccatcatcaacacgaatattctttggttgtcggctagaatattttaacaggccatatttagcttttggttgttggctagaatattttaacaggccatataaaatcactttaggtttcttctctacaaatcatgtatttggtaacataagctagactaaataaacattagttgaaagtaataatatggcagaaattaacagcaccttgtaaattatttgagattacatataatattaatcttagttgacgaattttcaatacatatttattttattcgtttgtctgtcgctagactcagccatattaaccagcgacaaattacattgttcgtttgtctgctgttatattcatcgatcaattgcagcgactataattgttgctatctttgcggtttagtctcctgagccggttttatgtcttgcgaaccgattcttcaactccatcatttattctatcattagtcaaaaataatatctcttacgaactacttcgtttaacctataaaaatcgttaaaaaaaaacccagctatctcatacacgaagctgtctaaactccgaagcaatttataacaacgtacctcatacgtgagagtggtgcaagttaatcccaccatcactataatagacggttttctaaaagcttgaaaatatgagagatgacaaagctcgacattgataagctttgatagaagttgaaatatgactgttccaaataacgtaacagttagagatatatgagctttccaaataacggaacagttagaaatatatgagcttctttatatctattcattatatcattctgaaacgactcataacaaacaaaataaatctacatcttcacatgattgtgatataaacacaatgtattaatcagagaaattggaaaaaaaaaaaaggaacttgctaaacatcaacaacacccaacgaaaacccctagtggttaaagatagataccactaagactaacagtaacatatgaagttcaaaaaacacaagtaatctaaataatcgagcattcttatggtcatcgcccaaactggatatttgatcacgtttgtatcaattcgtaaggattataataataaaaaatataaaaatcataagatcacttttgtcgcttgtactggtcaccaaactgattatgcacactgataagcaatatactatcaatctttgtcccaacatctgcttgagaagttttttttttttttctacaatgttatatatgcctcgtcaattctacagcttaacactattatcaatggtagtttctcatgctagctcttagataaattaggtattaaatttcatgtttaaaatgattaattgttaagaatgacttttatataagagtcagatctaatatttcttagattagttcttagataaattaagtattaaatccaatatttcaattcaattaatcttagttcttagataaattaggtatactaaatctagtcgttttcgtttatgtttacgtcatatttgtttaaacttttatgtcatggatcttttaaattttatgagttgtactgattattaagtttttcaaaattaaaatgtttatattttttattttaaaatatatttttttaagaactccaaattaagaggccacaactgcatatcgtcaaaattttaatctcttagccaaaatcttaacatcaaaatttttaaaatcaattataaaaatattcctaagaactatattaagattatgctaagaaactaccgttgattatcctccgagtccgatttacttttgttccttgaaaagaaaaaaaaaacacagaagaattagatactgccaaaaaataacaataacatgcaaacctttatgtgaattccctaagacctgcctgcaatctaatccgtatgatggattaacctctgaaatctaacccataaattttgatgtgtctctagagagcattgagaagcctaatttatattgaattttattcgtttgtgatgaaatttagaagacgaaagggtaatctggaagagaaagagaggcgaggaagtgaagagatgaaacgcttcggaaacctaattttttccgtttacttgcaactattggatccttaaaatgttaagctaagagattgtgaatcacattttaagagtctttggtttcttaaaaactaactaattatttaaaaacaattgttgctttcacagtatattgtcatattgtggtgtatatcaaaaaggcaaaatcttaactaaactccaatattttggaaaaatgtgaactacttccaattttggatatatcaacaaaaacaaaagacactacatcatgacaaagaaaaaaaaaaagagtcacttttgatgaccagtgatagagatgaagatttggtcgtaaagtagggaagattcaaaaattcacgactcattactatatactattaactttcctttagaagaaataacaccgtatctctccaatattttaaactatagttagaatatagcttgttaatattttgtacagcgcatagagatttccttattgattctgttgtctagtctatatatatcgttgaaaggtgtatctcgagaaacacaaccatcttactctacatttcccatttttgagactcctaaatcattttaaccttcttcctcaatcgtgaccatcaccaatgacgctacacgtcattgagactgcccgagtcacccccaccgactactcagtcatcaactcagccaacttgcacaaacttcctttaactttcttcgaccttccatggctactattccagccagtcaaaagagtcttcttctacgagctcaccgagtctactcgtgaccatttccactccattatcctccctaagctcaaggactctctgtcccttatcctccgtaactatctccctctcactggccacatcacttgggagccaaacgagccaaaaccgagcataatcgtctcggaaaacggcgtcgttttggtgactatagccgagagtgacgctgacttttctcatctttccggttatggacagcgtcctttgtcagagttacatgccttggttcccaagttaccggtttctgatgactcagcgaccgctttctccatacaaatcacgttgtttcctaaccaaggattctccataggtgttgcagcacaccatgctgttttagacgggaaaacgtcaagcacttttatcaaagcttgggctcaaatctgcaaacaagaacttcaaagcatgccggagaatctaactccgtcttatgaccggtctttgatcaaatatccgacctatcttgatgaaaagatgatagagttagtgagatctctcaaagaggaccaaaccaacatcagaagcttgacttcgcttccctctagtaaactcggagacgatgtcgtgttagccacgctagttctctctcgggctgatattgagagacttagggaacaagtcaagaacgtgtcaccgagcctccacttgtcgacttttgtcattgcttacgcttacgcgtggacttgtttcgtgaaggcacgtggaggtaataaagacagatcagtgagtctcttgttcgtaggagatttcagagaccggttagatccgaagctcccggggacttacttcggaaactgtatgattccggtgggctgttataaccgtaaggcggcggagtttatggaagagaagggatttgtgacggcggctgagattattagcgatttggtgaaagggttgagttcaagaaagatagagaccattgcggacactttcgtggaaggatttagttttcagagttggagtacacagtttgggacgatagccgggtcgacccggttgggagtatacgaggcggatttcgggtggggaagacccgttaaagttgatattgtctccattgaccaaggagaagcgatcgcaatggctgagagacgtgatgagtcaggtggcgttgagattggaatgtgtttgaaaaagactgaaatggattcggtcgtgtcttttttcaacaatggtttacatagctaaactcttgttttgtaagattttaataataaggtaatgcttggttagttattcttgtttttttctcacaagaagtattgggcataattctccactaataaataagtttaaataaagatatattagtaaaagtctccaaaaacacatatagaagaaaacaagatttcttcagaaactagaacatttatacactagaaaaacatctcaagccatctcttaaaaaaagatgagaattttagactatcactcttccactatgaaaaatgttataagtcattccaacctattcatcgttataatcattttttcatcaagtatatctctaattcattacttgtatctccaattttttagattatacaaaaaaatatatcattttgacagccatcatcataaaaatgtctcagtcacttgattcatctttatctataggaagatctagagacaaaagataatgttctagcataatcacggacaaagataatgtcctagcatcacatccattcatcactactggatcccgtattgtcatatattatgcactatcatatatcatggaccaattatgaaaatagcacttaaatgcttatccctttgtatgaagcgacacttttttgtatcttataactttaggtatttcttccacttttttttacggttttattcttacgttccaccaaatttcttccacctacaaattatttctctatctttctaccattcccagaccagatcaaattcaaactgatttgtagtaacggttctttcattttggaatatagaactcaaaatcgatatttttattatgattttggattttctaactgattcatattgagtttcctaaataaaaaatccataaattaccaacaaaactcagcagcaacatataaacaaattaaatcgaatataaacttccaaaggagacaaattaggcaaaaccccaaataaatttcaaaacccagaaaacgaaccaatcaaatttcaaattcgaaatctcaaaatcaaatttttatcaaaagtctatttaaggtttttccttgggttccctatatactatcatcctagggtttacttatattgagacaatgggtatttgtataagaaataattttttgggataaacagattaaaattttctggaaaaaattagaacgagaagcataggaagaaaatgaaaaaagaaggaaacgataagatattccaggagcaaaatcgttaaaccatcagttgagaaatacccattcttataagccatgataaatgtacattttctcaagtttttaggcttaaatatgcctatttgaacaaaagcccccatagatcatacaaaatttcaaaacaaaatgattcaaaatgcatctttttccttgacccaaaataaataaaagtttaagtaaatacaatgctatgagatttaccattacctaaacccatcaaattccacaaaaatacaattcttcactcgaatctgtgagcataacttttatcttccactttatttcgttttcaacaacaactagtgcgttgaagcttttaaatagtgaaagtttctgatttttctatcataaaatatatgaaaattgcactcaacggccataaaaatttaacaatatgccaactaacaacaaaaatctaacaactattaaaaatagatgcgtttatggataatctgtgactggctgtagcaataacgattaacataaattaaaatctacaaaaatacatacaaactataatttaaattgaaaaccaaaaactatattattataataaaacttcaaaattcttaaactaattaaaaatattgattaactttaacagtttcaaccgtttttccatattttgaatgatctcaaaaaaatgtaaaaacactataattaatcataaagacgtcggtcaagaaacactgcttaataatcaaagtataccaaaaactttagaacactaattcaacattacaataaaataacaaataaatgtgcactaaattctttgcttggactttggatttttaatgatccattccatctaatggtaacatttcatttttttgtacttttaacaactcgaaattcatttataagaagatgataaaatgtaattcttcatgtaattgcgaaatttatttgacataggaatatttatttgtagatatcgaaatcactggtaaataaagaaagaaaaacattcatctcacatttcttcaaagagataccaatctccaaaccaccaatctcatccctccttgccgacatagaaaactcattgttcttgtaaagagacataacatcagtcttaacaggtcttccccacccgaaatccgacccgtatatcccaaattggtttgatcctgtaacagtcacattctgtgtatccaatttcatattttttgttccatcctcatacacttcccatattgactcaatgtttcgtgaacccaaacctctaaccgaatcacttaaaatctcaactccgttaacgtatccatcttttcctagaaacgttgtcgctttgtatccattgaaatcaattggtaagacacaattcccaaaatatgtcaaaggaaccggtggatctaaccggtttctgaaatcagcagcatacataaaccgaaccggtcgattcgcgtctcctccacacgacttaaccatgcaagtcaacacataagcgtacgagactacgaacgttgataaatgaagatcggaccgggttgactcgttcttggctcgttctttaagtttttcgatatccacttccgtcaactcgagcgtgacccgaacaacgtcgttatcgatctctttagccggaggaagcgttaaggttcttgcatagtctttctcctctgagatatacgaagagagctgaaagatcttttgctcgagtccggccggaacattgatgaccgtacgatctaaaaccgtaggtagatcaaaatcttgaggtgtggttccgtgtttacatatatgagcccaagatttatgaaactttgacgcagttttgccgtccatgacgacatggtgaactgttgttccgatggagaaaccttggtttggaaagagagtgatttgtagagaaagaagagacgctgagtcagaggaaacttgtaactcggggacaagaggacgtaattcagtctccagacgaagttctttgctagagatataagagaagtcagcttcggactcgaccactgtgagagagacagtgtctttggggaagatgactatgtgtggtttaggatcttgggggttccatttgaggtgaccggagagtgggaggaagtgggagaggacgagggagagggattgttcgagtttggggaggatggaagagaagaaggagtcacgagatgactcggtgagtttgtagaaggtaactcgctctatgggattgagttttagccatagtaaatcaaagaaagtgagtgggagaacgagtggttcgactgagttagttacaaggctgactcgagagatcttgatcacgtttaaggccatcgttgacggagacaatctcacttggactcttttttttcagacagttttcaaacagactactgttttggtgtgccaaataaacatctattcacttaattatcaaaagcatgggaataaaatatgacaatcccactaccatatgaaagatgcttttggtaggtaaagatgttttttagttatatcatactgcatttcaaaacaaaatgatgcaaaaaaaattccttagacctcaatgattaaaagttttaggtgattacaatgttatgagattttccattacctaaacccatcaaattccctttgaatacaatttttcactagaatatgtgcgcataacttttattttcctctttgtttcgttttcaactaaaactaatgctttgaagcttttaaaaatgagaaaaatgtcagaaaaaattcccagttgtgcaaaagtattgaaaaacaaaatcttcaccttactaggtgatgaaatatataatcaactttcgttcatttctaattaaatcattaaattttgttggtttcttagtttaatagtgaaatttagcactttgccaaaatagtcaattagtcatcatgaatttgactaacgaaataaattaacataattaagtctcggctgaaaatcttaataagtgaacgtagatttcaacagagacgtaacactgttaatttatttcgtcatgcaagcttaacgacgtgactattttggaaaactgaacaaaagtttacgattaaaatgagaagtcaacaaaactttacgatttaactgaaaaatcagcaaaaattgattatatattccattgaagccaaagttggggatttctttcaacattttttcacagttcaagatttttccgacatttttctttttaaaaatagggaaatttctttttgtttttctatcataaaatataggatagttgcactgaaccagcataaaaattaaataatatgccatcaaaccataatttttttaataactattaaaaatttgtgactctttcacagctttcacagcagtagcaacaatgttttacataaaatataccaaaaatacatactatgtataatatattttgagaacccataattatttcctctaaaaaaatttcttcaaatttgttaaaaagttttaagagatttacaacatttgaatatacaaaacatttttaatagttataaatatcttttcatttaatttatatatatatatatatatattatgtatataatatttaagaatctgttatgatagtgtttaacaagagaaaacaattatttatttatttttagtgaattattatgactaatgtagataaaaggaattttttaattttggcggaaaaaagctttcaaaatatttagttcaaacaaatatatagatttgtagcagtataaaatgatttgcgtgattgttgttaaaagctaacaaccgtaaccgcctacaaaacataatgtttgctggtaattggcgaaaaaccaatcaagcaaatttaaaacatgaaaaaaacaaaatcatacattaaacagtggaaattggagagatttgaactaaaaaaaaaaaaatacattccccatcaaaattagaactgacacctccacaattattaaactatccaaactttaaaatatatctcgactaagagaaatcaaaacctcttcatcgatattctctttcaggcctcctccggaaatgatcacctcttatatctatactaagttttcttcatactaaaaagtacatattgtcttgcatcataagatgatcttcttaaagagacaagtgcatattcactcgttcaagttagtagaaatccgacttttcttcttgggatggaatagaacacaatctctcttaataattcattcagatttatggttttcggtagggatgttaaagatgggtaaaagtccagtgggaacccgaaacccgcttaaaatttaaagcctaaagatcaatgtattgttaaaaataaagtaggctcaaaacgagcggatcttatttacgtagagttgtatgtgggctttaccctgtcgggttatggatatccatggacttttttccttctaaacttaatgtactaaaacgacatcattttttctctcctaaaatccctaaatccccaaatttggtttctctacgtgttcttcttctctaccaattttaattcctaaatttgattcatctctatcactctctctcttcaatttgatttgtgataaaccctagtctctaggctccgaagctcactctcgcctctctaggataaaaaaacagagaagaaactcagaaacagagcatttgggaggaagaaaacggacccaattccctttgacccaccggttacaagagtagtcataccttgaagactccacctgttaatatccattgttgtgttgtgtgtgttacgacacttagtcactatagccacaagtataatcagttagaatgataagtttaactagaatctaacccgtggtacaccacggagcaaatattttatttatatatataataatattaaattttaccgttttatatttagtattaaagttatattattttctattaatagtataattaaaaaaattagtgatgataaaaaaataaaataaatatttaacatgtgttatatcaatccaaacccgtctccttgtatttcatatcaatctaaacccgtcctgttatacttctcgtctcatgatattttaatttttatgtttaaatattaataatgtttcataaaattaaaatatatcaataatattctttaaaaataataattgtttttgactttaatgtaatgacattctttataaattcttactttacttcaaaaatacttcaaaaaggtactacaaaagtacttcaaaaaggtacttcaaaatttttaatatatataatgttatgttttggtaaaaattattataaataaagatttagtttaatcataatttgggattgatatacaatacttgtgtttttgactatctattttttattctaataacctaaatttagacattttgttaatcctactatattatttgggaagtacattttaaatgtaaccttaatttttgtaagtaattacataggtatgccattagaaataaaattttaaagagtatctctttaaggattaaaaagtcaaatactagtttaattaattaaatttaattaaaaaacgaaatacattattaatttccaaaaataataaccaatcaaaatcaacatataagatttgatatctaaattttaattaatttaatttaattagaaaaacgaaatacattattaatttccaaaaaagtaaccaattaaaatcaacaaattatatttgatatctaaattatcatattaattttttattaattattatagttcatttctcatctttatatgattctatttttgcggaaaaataatatcatcattataaaaaaataattagagttttttcccatatgtcataatttgaatttttaaaaacaaatataaactgttcaatacataaaaaaatattataacggataaaaaatagatttaagaaaattttctactgagtaacgggtcataatttgaaatatttatattcaatttcatacatattatattgaaaatttataatcttatatactacaataattaataacatattagatgtgattcaatttttaatacaagttgaaaatcctagaattgcatgtttagatcgatattaatacaagatggtatactacaggtgaaactcttaaattaacaatcaaactacaagtgtataatcttaaacactaaacaatatagataatatcaacaaaacatatacaactcacagtttactatacatttaaaatcaaataaaataatatcaaatatttttaaatcatctttataataaaaaaatttagtttaactaaaatatataccgcaggttaatatctagattatagggcttattggatctaaagacggatcatcaaagatttcttaaactgaagcaaaatatattgaatattcaaatatctatctgttaccaaattataaacaaataagtcaatttaatattttatatacgaaatcaattaaatcttaatcacataaaaattagcacaaaaaagtattcatcaattaaaaaaatatcaaatctctgtgttatataagttttgatactatattcgaataaagtgtaatataccttttcaatttgtattctttaactaacttaagctaactaatatatttgctaatcttatacctatcaaaaccgactatcgtttcttatctctatagtatttttgcaagacttttttggtggatttggataaaagtgcattcgggtcatatggtacattctcctattaaataaatatggtgcactcctatgttattatctaaaatatttacattctaattcagagtcatatcattaataaaattaatattaataaaattaatattaacaaaataaatagctttttggcaagacggatttggagggacggatttttgaatcaacattaataaaaaagtaaaatataattaatccatcgttttaatacgggttagatctttaatttattattttttaagaccactaatattaaacatatcaaatcatcctaatttagaaaagattatataaaaccaaaaatgtaatgtggtatgtataatgttactatatataaaattaaactatagatataaatgtattagagaatgatacaatttgcaaaacttttctatataaaaaattattcttaaattttaaaaattactattttaaaaaaaaatcacgggacggtaaaaaaattacagaacgagttctattttggaattgggttatatggtggatgtatttgaatcaatatttataaaattttaaaatattattaatatgctgttttaataggggttaaaacttcagttttttaacaattatctcatggattcgtggtataccgttacttaataacaattataaactgtataatataaatattttataaaagtaaaatttgcaagttttaatatatactacttttaaaaaaaaaatcatcccacgggttacaatctagtctatattattaattgggaagcattgtgtgattgaagggtagtttataactaattaaataaattttttacataggtaatatagtaatttaacaactaatccaaaacacattaatgagtttaataggctaacaaatagtatggatcttttaacacacacgcaaaataattcaaaaatagaattcatgtttgaattgattcgactaattgtatttgactaccttgcgcacccaactttattgttcttcatggatgtactttgaaaaatatgcatagataatcatatattatttatataaatttgtgtttgaactatataatataaatcgtatatagttacaatatgatacgtacaaacatatatatgcaatatggttcagttcatatggtcacatggaagctcaactaatataattatagaaatctgtttcgaattagattagtttgttatataaattatacggagcattttgaattagatttgtttgttatataaattataaaaatctgtataaatctaaactaatatatatggtaatcatttaatgctcaataatatcctattcgtttgttgtaaattctaacaacacggagaatattgtagcaacatgaataatcatttaatatttctaacaattatcataactctaaaattttggatcattctgaaagtaaaaaaccacacacacgttttgaacaatctctttttactaataccattgcttatacaaaaatgaatgtacttgctttggtcacagaccttgctaacgtaaagcctttcaaaatcgaatggaaaaatccaagttaagattttgtattcatggacttaatacacggaatactcagaagaaaccatggaaatgatcctacctgataaaaatgtaagtattgattttcgtttaaatctaggttatatcaggattgtatcttttatattattaacacaattgtatttcactaatttactaatttacagggaactttgatacatgctactattaagaaacaacatatgagagcacgcaaaaccaaactatttatataaataaaacactaataaatgatgcaaaaattgttaaactttaaataactaaaatttctattcaaattttaaaactaagaaacagaaaataaacgtgtaaaccaaagtaattttaagaacaaaagaaaaatttccaatgaaatattactattatgatatctctgctactatataattcactaacccaaaataaaataaaatcttaactaaaagtttttgcaaaaaatattgtttttacattaccttccatacatcttattttcaaatattatgataactgataaatttatgatatatatactattatataattcactaacacaaaaaaattaatacaaacttttatcaaaaccatatgataatacttataactcgcatattgtgcggttcacaacattagctattgtatcataaataacaattatacacttttctatgcacattataatttatatattacaatatctttcactaaaaaattattccaatacatttcttaaaatacgaaaccccgcacgtacgtgcgggtcagaatctagtattatttgaatcagcaatatcaacttaatacatgtacaatttatttatgccaaaaaaaaaaacaaaattattttgtacaattgcaaatttaaaacgaaaaatatggattgagataatttgggtttcaattttttattacgtaattaaatttttaatgaaaatattaaagcatatattgtaatataagatttgattcattttattaactgaaaataaatgatttaaaacaaaaaatcagggtgattaatgctaattggaaagatttaaatgtttttgtgattttttttttagtttcctaaactttagtaacataatagattttatatttagatttaaaaataagtttagtaaaacaataaatgtcgatggcatgccattataaatcagtgtcaggatttatttattaaagtggctgcaaaaatgtatatgtagatgacgctaaatataaatatattcagaaaatacagaaaatgaatacaatttaaaatatatctctatataattcgagtacttacagatagtttcaaaacacatggatttttgggattttacccacaagttctaaaatccattcgagtttttttaaaatttgagatttttatgggtgggttcaatttgggttagggctggactgtttttttttaccacgacaacatccctagcttccggagatgtcactaaacttcatgtccaattctggtggaaactttagtgaaaattggtggaaacttgggctaatgggtacaaagaagaaagtctcatgaatcaaatcaagactgtattgaataaattatttatccgaaacgggtctagatcatattatttcacatcttactgtaatgattgactttaaagaatatagatcaaaaacctatagtatcacacacataatactccaaaatcatttaaaaataaaaccaaaggaatgttatttttatttatagaaattctaataaatcaccaaaaatttatagaattcacataaatcccaccaatctaaaatccacaaaatctttgaatcactctttcaatacaaagtgtgtattacacataactttttcaactttacattcaaaatatacacctaactactttaccaaaatctttaaaacacaaatatatgacatacaatgatacaaatataacggataaatctgcattaaattctttgcttggactttggattttttttcatgccccatcgaatgaattcaagatacagatttttccttttaacaactgaactcacttatttagaagacgatacaatgtaatgatcatttaaatccagatttaactttcaattgtcaaatccattactaaataaagaaaggaaaacaatcatctcacatctcttcaaagagaccccaatctcatccctcctcgctgacatagaaaagctattgttcttgtaaagagacataacatcagtattaactggtcttccccacccaaaatccgccccatatatcccaaactggttcgacccggtaacagtcaatacttttgtaccaaccttcatgtttttagttccttcctcgtacacctcccaaactgactcaagacttcgtgaacccaaacctttgaccgaatcacttaaaatctcaacaccgttgacgaatccatcttctcccaaaaaggtcgtcgcttcatatccattaaaatcaattggtaaaacacaattcccaaaatatgttaaaggaaccggtggatctaaccggtttctaaaatcagcagcataaataaaccgaatcggtctatccacactgccccatgcgccttaatcacacaagtcaacacataagtgtacgtgacgaatgatcatttcttgtgtccttttttgggacaactaatctgcaaaaccactttagagtcttcatatcccctttgagttaatgatttgtgttaagacgaatttatccctgtaatttattttgaatgaataattagaataattaatagaaaacattttgaaaaaaaaaaaaacggaaaaagaaaaaaaaaaagctcgagcacgagctcgacttcttcttcgggattcttcctccggcgagctccggcaagctccggcgagccgcattgtcgtttttctcctcctgcaagctgcatcaatctactaagtccaggtatgaagagagcttcaaaagctttgaattacatattttgaggattttgagattcaatccaattagatttgggttattgtgttttagcacctatattagaagtttaagtatagatttaggcttcatttggtctgttaatgggtaagcaattgatttcacatgctgattcatactaaattgaactcaaatcgaatatttgttcttgtcgcgaaaataatactggtcgaactagctatagtagtaccgtaatttatatagatagtatgttttaatagcaccaatattacttaaacacgtagtatttcatatatgtaatagtattactcacacatgtaatatttcagaattagtactagtattactgtaaatgtactagaatcggtaatactagtaatattgactgagtatgtgtattgttttggcaggttacaatgaaagagaacatgatcatatattttaaattccaaggtcgcatgtataatgtgatgatgaagagattaagggagaagattactctctcagtgttagaagataggataatgacgaagcttggattagatgcaaataaggtaaaattgcatatgaggtacaatccacggttgttcggagtagaggaagaaatgaacgtttgtgatgatgaggatgtctttgtttatgtaacatccgcaaaaaataatcggagaagtgttttggttgtggaggagatctctaaaccgcccgagccggggcaattgcccgagcaattgtctagagttggtaaaagttctgttggtaagaactatacggagttgaattcagaggaggatgaaatgagagtggatgatggtgcactcatcgtcttattagaagaggaacaaggaactcaacatcaacttgaggcaatagtggaggatcacgggactcaatattaacttgaggcaatagtggaggatcacggaactcaacatcaacttgaggcaatagtggaggatcacgggactcaagaagatgaaacacgctatgatgagtctatggataattctgataggggggaacagtatgttgagtcgccacctgctgtagaaccgggtatgtttaaaaaagaatgggaagacggaattgggttgaccttacgtcaagaatttccaaacaaggcggcattgcacgaggtggtggattgagctgcatttgctaacagttttggttatgtgattaagaagtcggataaggagcgctatgtcctaaagtgtgccaaagagagctgttcttggcgtttacgagcgtccaatatcagtaatactgatatattctcgattagaaggtacaataagatgcatagttgcactcggctaagtaaaggtagtagtaggctcaggaaaaaaaacgcaacccacaattagtcgcagctctccttcatgatcattttccgggatagttggaaactccggttccaagaattatcatggagctagttcagacgaagttaggtgtgaaagtatcatactcgacagcgctaagggggaaatatcatgcgatttatgatttaaaaggtaccccggaagaaagctacaaggatatcaattgttatttatacatgttgaagaaggtaaatgatggtacagttacttatctgaaattggatgagaatgataaatttcagtacgtatttgtagctttgggagctagcattgaaggttttagagtgatgaggaaagttttaattgtggacgtattcgtagctttgggagctagcattgaaggttttagagtgatgaggaaagttttaattgtggatgcaacacatttgaagaacggatatggcggagtgctagtgtttgcctcggctcaagatcctaaccgtcaccattacatcataacgtttgccgtactcgacagtgagaatgatgctagttgggagtggtttttcgagaagctaaaaacggttgtacccgatacttaagaattggttttcatgacggatagaaatgcaagcctcataaaggccatacggaacgtgtataccgcggctcatcacgggtattgtatttggcatttgtcccaaaatgtgaaaggtcatgttactcacaccaaccgagacgtactcgcatggaagtttcaggagttaagtcgggtctacgtcgtggcggacttcaaccgagcgtatgacgggtttaagttgagatatcctaaggcgaccaagtatttggaggatacaaccgtgaaagaaaaatggacaaggtgttgttttcccggagaaagatacaacttagacacaagcaattgtgtggaatctttgaacaatgtgtttaaaaacgcaaggaaatactcgttaataccaatgcttgatgcgatcatcaaaaaaatctccgtttggtttaatgaacatcggatggaagccgcgtctggatctttagaaaataagatggtgcctttggtcgagaattatttgcatgatttgtgggtttttgccgagaatatgtagtcacatgcgacaaaggaatagattatacggtgagcttgcttttgaaaacttgcagttgcaaggttttcgatatccaaaaatatccttgtattcatgcattagccgctttcattaacattatggatgatgaagatcggagaagaggtttggagttacatgatttggttacaaaatattattgggcggagttgtgggtattggcctattataggactatttatcttgttccggataggtcgcagtgggaaataccagatgaagtaaaggcgttgaagatagttccgctgtctaaaaaaccgaagaaaggaaggaaaaatatgctaaggtttccatcaaccggggaaaagcagccaaaacgacaaaggacgcaaaacaaaaggcgtccaaggcaatcgtgtcaatgattattatttgggaatacgcctatctgagttttttactttgtttctgcagtgatttgttgtttttatggtatggacttactatgtaatactgtatttcccctttctgtaatactatgtctgtttctattgtttttttgtaatattggttataacaagtaatatcatgtctgtttctgtcgaatttgtggtcatattagtactactggtaatactaagttggtgttatggagttcgaatttgtttacctcaaaactcaatgaaaatgaatacagtgagttataaacagataaaaatgtattattaatcatttatacttaattaagttagaaattttaatattaaatcgttttaacttatttttagtagactcaatacaacatatcccttatacttttaagctcacttttaatattatcaccaacttaaaatgaaaaattcacattgctacatatatttaatttataattgcacaaaatatttaaacctctatatttataaagttcaatctagtgtactactaaataaacaaattgtaaatataggaaatactgctaaacatgaaaaacatggaaagtaatactatttgagaaattggcactaccaaaaccttagaaaatactatgctgtaaaaaggctgcgcacatgtcaaaaatctccaaaaaacggcgcacacgtggggaattaatttttttggttttcccccaaaatttttggcgcctaacaaattttgagattccctccaaaaccaaaaatttcacttttttctttttcctctttctttttcgatcttttcttacaactttctttcatctctcatctctcttctcccacatctctcatctctctcttcgactcgaattctctcacatctctcatctttctttcatctttctaccatggatagactgtgtgagagagacccctactacgatgatatgaaagtggcgaagagagccattgagcaaatggaaatggttgcgatgatggaagggattcctaagttttgtccatgcggtggtagcattgtcgacactcgaaaggatgaaaagagatactatcaatgcgagaagtttaaggtatgttgatgtagagcacaagtttttcaagtttgtgtagatctagatctagatatatttggtatttcagagtatttcccgttatggtaatactgcctagaacaagtaatactgcacaagtttttctaggttttgtagatctagatctatatttgataaatatttggtactttgtaggatgatagaactgattgtatgcacatccgtaaactttgggataaggctatggaagaagaggtgagtagcttaagggagagtgttgattacaatcggaagaaagttctaagtcatgagtatctcatagaagaaatgcaaaaagaattgaaagcccaccgtgcagagattgtgaacgtgagcaaagtgttattccgtaatcctatggctccaaagaagtaatgtgttatcctattgttccttaatcttattgttaatttgcttgtaagactttccctatgctttgtaagactttctgtatgctttgtaagactttcccttcgattgtaagacttctctttgattggtaatactatggttgttcagtttgatatttccagtatatctcttagtagtaatagcacgaggtatttcccgtatttcagttaacaatatcataaaacatcctaatacattaattgaatacaaacatagttttacgagtacttgcgaaatcctaaaacaaagtcaaagtacaagaaatcaaaatacaaatccggagaagttacacgaatagttttcacacgttactagactttgcacgggttgaacgggtcactcgtttgggcacaacaggagcagccgcattttccttaattgttgattcctcctcatctggtgggttctgagacatctacattgttaatttagttaaaccttggtattacgcgatattaccaattatggaacagtatatccggtattacccagatttaccttggctttcatctcatccataaatgcttcgaacgttgcttgtttttcctctatttccataagcaccaacaaagcttcattcagcttatcattgatggaatggagcttctccattacatcaactaacgtcgggtctcccggtccaacagctgtgggaacttcctcttcatttggggcttccattcgtgcctgcacatcctcgttgtacacctcctcaaatctaatttcacgcccttgaccaagacgcttcatccaactatcaactacaacatcgtgcttatcaacatcatcctctactcccgtgatttcagccaaaagaggtacttcttcagccttctctctaattatactctcaatgacctatggaaataatagacaatgaaatattagaaagaaataaaatcatatttgctcaaggaataataggaaatactaacctcagttgttccgagtacatggttgatttgctcaagggtaaatcctttcatctcgatcctcttgaaattcaccttgcacatcctttgacaaccggcatgtgcaccctctttttcttctatgaatctttccctaagtgatggaatggcttcaaatgctaaaaactacacaaaccacatgaaatttaattgttagcttcaattacgaaaatgtaacaaggataaaacatgtgacttacctcaagcggcacacagaatccgggaacaggccatggtgactgagtgttcgggacgacaccgttaaaatgatccaatttgtgtgagatcgattttaacatgtactcaaatgaatatctccccgatggaaatatcttacaaaacgtaagatcacttgcagacctcacacagaaatcatcaattggactagccctttctccggtcttagtaggcatgacaatgatgctagttagaaaatagagggccgccatccgcaacctatcctttgatctagccggttccatctccattagcttggttttcacgtcttcacgtctaattaccccggttttgaagtacctgttggcgaagttcatattaccagcactctgataactagctggataggccttgcagttgaaaccagagatcaaagcatgctccctaataccatagcggatgggaactccattaacaacgaaccaaacctccttcttcttctcaatagatgccgttcgaagaaaaagcatccacatccgcattaacttgtgggtatatccggaaggcaggtggtagatgtgcttgaaactcggatgctccataaaataattcttctcaacatgcgttagaggatgttccaagtcagcgaaggtcttcaacacctccgagatataacacctcgttgctaacttcatcttcttgggatactccgacaccgggaagtacataccaagtggctgcattgccatcgcttcctccatatcctgaaagaaacaaacattcattcatatatcactcaattgtaaatagtactgccacagtattactctgtatttccaaaagtattccccgaaattaccagtattacacaaatcctactattcatatatcactcaattgtaaatagtactgccacagtattactctgaatttctcagaagtattccccgtaattaccagtattacacagatactcctattttactatgtagtatttctcaaagttactagtactaactatcgataaatcacaattgtagtattactctaaggtattacccacatccgccaatattacctaaatatcaacatagcatttcccaatgttactagtactgtccacagttcacaattgcattattacccaattagatcggtattacgaaatggaatacttaccacatttgcgatgtcctcgtctatggtcctctcctccccggatttttccactatcacgtcctcgtctctctcgtcctcgtgtccctcatcctccacggacttttccacattgacgtcctcgtcgctctcagagctcctctcctcctcctcctcgataacggttaggccgtcatcttgtctctccgcctcttccacgggattagcacacgcgagttctttgtttgtctccgtctcctctgaatcggaatcggagcccaaggttcggctactactccctgattcttcttcttcacttgcttcttcttttcattttcatcttccacctcatcagtttgcatattctcttgaatttcttcagcaggaatatgcttcagagcatcataaaacgtagaatcatcaagcatcgggctctccgtcgttggagccgtcgttggagccgttgtcgttggagccgctgtcgttggagccgcattggttgccatcgccgtcgcagtcgtttgtgttggcgactgctcctcagccggcactttctctttatctttcttcgccggcgcctgaaccttcgctttcttcgccggcgcctgaaccttcgctttcttcgacggcgcctgaaccttcgctttcttcgccggcaccttctccttcactttctccgccggcgccttccttcactttctccgccggtgccttaactttctctgtcttcgccggcgccgacgcttctatctcatttcttttcccttgacctcctccacgcgtcttaggcggcatgactgatttcgaatcggaaatagaacggaaatactggtgaaaggaagaagaacgatcgattgaatttaaagaaatagggaatgttgcggttaatttcagcggttactaaggagaagaagaagaaaaatcaaaaacggttgtaatgagaaaaagaatgaaattcgaattgggaaatccctggaaatattagagtttttcttatttgattttcaaataaagagtaaaggtggttcgggtggtttggttcggaaacgaaccatgatttttctggtaattaataggttcggatggggatatactagtaatatccatatatttcgaattaaaaaaaaaaaaaattatttctgttttttacaaggattttttggcttcctctttgcaaaaaagggactggccagatgatttttcgtacgtgactacaaacgttgatagaagaagatcggaccaagttgactcgttcttggcttgttctttaagtttcttgatgttcgcttcactcaactcgagcgtgacccgaaccacgttgatgttctctttagcgggaggcagcattaaatttcttgcattgactttctcctttgagagatatggcaagagttgaaagagttttggttcgagtccggccggaacattgatgaccgtacgatctaaaaccataggtagatcaaaatcttgtggtatgttcccgtgtttacatatatgagcccaagctttgtaaaacttggacgctgttttgccgtccatgacgacatggtgaactatggttccaatggaaaagccttggtttgggaaaaaagtgatttgtatagacagaatcgatgctgagtcagaggaaacttgtaactcggggacaagaggacgtaattcagcctccagacgaagttctttgctagagatataagagaagtcagcttcggactcgaccactgtgagagagacagtgtctttggggaagatgactatgtgtggtttaggatcttgggggttccatttgaggtaaccggatagtgggagaaagtgtgagaggaagagggagagggattattcgagcttgggttggatcgaggagaagaaggagtcacgagatgactcggtgagtttgtagaaggtgactctctctgtgggataaagttttagccaaagtaaatcaaagaaagtgagtggaagaacgagtagttcgactgagttagttgcagggctcactcgagcgatctagatcacgtttaaggccatcgttgacggagacaatctatcttgggcagtcttcgaacagacgagtgtttggtgtgtgccaaagtaaaactttattcaccaattatcaaaagcatatgaaagatgctcagggtaggtaaagcccactacaggaaaattgagtattcttagcggtcgaataagctatctaacgagatgatagcggagtagaaagcgctatatcttcgtccatgataataggtcgatgacttctaatagcagttttaagtagtgctatattttgattatatattatagcgtgttctttttgcaatttaatattatttaataatgattatattttgttattaattattaaataacagtatttaatatatgcaatttaataaattggaataacatttataatatgcaatttattcaattaaaatagcatttatatatatgcaatttattccactaaaatagcttttgtattatcattatttcggtttgttatatttgtaattatatattattttaatttatgaggttttttggataaattgagtattgacatataaatatattatattttattacattatatgaaatcataacacaaaaacaatatattacaaagtatatacaaattttttttaaaaaaaagtaaaagtacatatattagtagaaactcttatatgaactagatgagtacccgcactacgtgcgggcttatgtagtttacgactcttaaagttatttttattcaatattaaattatctattcctataaaattgagagactaccacataaaccttgtgtagaaatgtaacacatcaacaaggttaacataaaccttgtgtagaaatgtaacacatcaacaagattagcatctgttcttttgatgcttccggcctttgacatctttgtccgttgttttatttttaacctatccaattcgtgttataaatccagtgttttgtgtaatttgaaatttagatgtttaggcaaatagaataccttgaagagcaagccttcccaccgttatattctcctttgccgcatcaccatcgtcaggattgtcaccattgctctcgtccttggtcatgatatattaataattaatcaatagataaatatacctcagtttcttctcctccatctacatgtagcacatgttaatgattgtagttgattttgttcttgcaatctgaaaaaagaaaacatatgaatatatgatgttagtttactcttacaatcccaagaaataatttaaaagagattgaaaagtaagacatgcatgtatttataattttatatgggagctaattaaatatttacgttatgtaacatataagtggatatgattagaagtttaaaagttattaaaaattaaaatgaaattaataccaataagttgtatacatcatgctcttggggaagtttggataagaatagttgggtatttgaaacgtccaaatattattcatgaatcatgaatagttgagtacttcgtaaatgcataatcgtggatatgagattttatgtagattaaatcctggctttacttagagctgattaattatttatttgtttattttaataggtacacgtggcgagctattagatgctgacgtgtcaagcagatggagaaagatagcctcctttcatatatatgattcatcttgtaaacctcactgtaaacatgacaccaattttcgctgcatccaacacacacaaagcctttatcctgcaaacaccaaattctcattaacactgataataggtttttaagatcaattaatcctaaagcactatcatgttgttgtagtactgaaggttgtcaattcaaatgggtatgatgctaacaatcaagatgtgatcagaagtcactaagtcaagccaagcaataacaggttttggtgtgttctagcagtcctaagtgaacatgcagaaaacagaaaatcaaatagaaacagtaaaacactcgaccaacacagctctttgcagagcactgggtgaggtcgagtaacagacagaaagtataacacagatactcgactgcacagtctgttgccagacaactgggtggtcgagtatgaggtcgagtaacaagaaagaattgtagaaattaagcaacaaatgacaagatgcagtaaacaacagtaaagtaaacaaagaattcaatcagataaagaattcccgaggatggggtaattgagtagtttcgtttcctcagtttacaagtgattgtcatgctcaataaattgtccctagacaacaagttcattaaccaaatctaagtgccaccgcaacagagaccctcaagttaacctagtcccagactcaatcaccattgacgagagctaacctaacatgcattacgaatcaacaagttaaagccaaaacgctctctgcatccaataccttggtacatggccacgaatctctggaattagtggttcagacatttcatcgaacaccttttgggcgcggagatgtctgggctcaaattccagttgatcagaaagcaataagcattaagaacaactaatccagaagggatctatcaatcaatactcaaccacctagcatactaagaattctacacttactctaacccatcctcagaaacctattcactactcagacatcatagcagaaagcataaacgttgaacaagttgaaaacatgataacaacagtgtaacaacaggatgataacagaatgaacaacagtaaactaaaatcaagaacaaatactgaatacttaatagataaagagaaatccggattacaaaaggtctagaacacagtgtctgcagaataaaactagataaaaacttgtttgcgaaaatgtgaagtacatgctacttatagccaaatattctgaaaccctaatacttaaaacgacgcagtattgggacggattaagaactgtactcgacccatgtggtcgagtgggaggtcgagtgaatagctggagtcttcttttcttccttgttctcgagtgtttggttgagtacggaatgaagaagactctgaagcttgccagcgagtgtgtagtcgaatggtggtgatggtgatactcgacttcctggtagagtgatgtggtcgagtgatgatcaggtaatggaggtgaagacactcgacctcggggtcgagtgatgtgatcgagtggtggtaaggtgatggagatgaagacactcgacctcgtggtcgagtggtgaggtgaagtggtgatgtcctctactcgaccagggggtcgagtggtctgctgaggttgtgaatcgtctactcgacctaggggtcgagtggttttgcatgatcaggtccgcttcttccaattagctcgtcaacaactccgaatcacctgaaaacaacacaaatatgcaacatgcatgcaaaactatcctaaacatgcaaagtgatgacaaatgatgagaaatgatataaaatagtgatgatatgatgctaaagtgatgacaaatggatgctcaaaacatgcaaaatacacacttatcaaacacctcacatcaatttcttaaagtaccaattctacttaatctagacatttgcgccaattcaaattacagaaatatataattctcagatcccactaggcactagttatggcctcagacaaatccaagtaacataatgttgtaaatctttgttttcatatttctcattgtcttacacaacatcactaccacatttaattaacaaaaaaaatttatagaagaaaataagacaacaactctttaaccactacacaaccattcccactagacttacttaactcttaaacttagtttagtctttacttaaaaaaataaaatacaaattgatgcaaaagaaaaccaaagaaaacagattgcttgtcaaacaagcaaaacaaattttgatgaaaataactgaagagcttgagaggaagttttttttttctcacttaaagattttcattatataatacatcggagaaatatatttttgggatgcgtttttgaaatacaaaagccggggcaaaacaaaaatatctccgaaagataaagcccgatacaccggaaacagaaggaaatatactaaagtcaaaaagaaaagctctcgaaatcattagaaaagtcggaggagaacaataactgcgggattaagagcttaaaggtcaaagtctagaaaacccacaatcgcggaatttagagctcaaaggtctcgaacatacctagcaatctcaaatatgagtctccttcttagatttgagtatagcatgttgatttcggatgagtaagattcaaagaaactagctcaatacacacaattggacaagcaaaagccacaaataatcattcaattgtaaatttagaatcttgacaccattgacaaacccatattcccacaaaaatgccatcgaaaaacattcatctcacatttcttcaaacatatactaatctccacaccacctatttcatccctcctcgctgacatagaaaactcaccgttttggtaaagagacatcatttaagtgttaaccggtcttccccacccaaaatccaatccatataaccaatattggtttgacccggtaacagttaatacttgtgtacccaacttcatgtgtttagttccttcttcgtacacttcccacaatgactcaacacgtcgtgaacccaaacttttgatggaatcacttagaatctccacgccattcacaaacccatcttctcccaaaatgtatgtcaattggtaagacacaattcccaaagtatgtcaaaggaaccggagggtctaaacggtttctaaaatcagcagcgtacataaaccgaattggtctatctacattgcctccacgcgccttaaccacacaagtcaacacataagcatacttgactacaaacgttgacaagtaaagatcagaccgagttgactcattcttggttcgttctttaagtttcttgatattttcttgagacagctggagcgtgacccggacaaggtcgtcgtcaatctctttagcggaaggagactttaaggttcttgtgtcgttgtctacgtctcctgatagatacgacaggagttgcaagatcttaaattcgagtccgacagaaacattgatcaccgtacgatccgaatgtgtaggtaaaacaaaaccttgtggtatggttccgtatttacatatatgagcccaagatttgtgaaaatttgttgaggttttgccgtccatgatgacatgatgggttgtgagcccaagagagaagccttggtttgggaagagagtgatttgtagagcaagaatagatgaagagttagaggaagtttctaacgtagggataagagaacgtaacttgctctcgagacgaggctctttgccggagagtcttgagaagtcagcgtcggactcaaccacagtgaagagacagtgtcttgtgggaagatgatgacatgtggcttaggatcttgtggatcccatttgatgtgaccagagagtgggaggaagttagtgagggcaagggagagagattgctcgagctttgggaggattgtggagaagaaagagtcgtgagatgatgactcagagagtttgtaaaaggtgactcgctcgatgggatggtgttttagccaaagtaaatcgaagaaagtgagtgggaggaagagcggggtgactgagttagttgcatggctgactcgggagatcttgatcatgttaagagccatcgttgatggagacaatttcacttggactcaatttcaggtatttgtttcaaaacaaaatttcaccttagccttctatctcagtttttcttttagaaagtggcaaagtgggctgggccaatcaggttttagccatttgggcttaagtggacgaatataccctccaataagaaatgaaacgaggcggttttctttgtttttctgtttatgaaaataatatttaaactttaaaataaatcaaaaacaagttaataattttaaaactaccaaaaaaaaataaaagaaaatcaaaaactcttttcgaagacgcagaacaattctgacgaaacttaaacccatattgaaagtgaaatttcgattgaggctctcttcgagttcaagtcgttgcttaagtggaggaaattttgatcgagttcgtgttaaagtgtctaacaataagaggatttttgggtttctcaattcactgtttatagaagaactcaaatggcagagatgaagaagagtagtcggcgacgaggagtttccgaatttagtgtcgaagacgcaaaatcaaaaactgttttgaagacgcagaacaattccgacgaaacttaaacccagatcgaaagtgaaatttcgattgaggctctgttcgaattcgagtcgttgcttaagtggaggaaattttgatcgagttcgtgttaaagtgtctaacaataagaggattttcgggtttctcgattcactttttatagaagtactcaaatggcggagatgaagtagattagtcggcggcgaggagtttccaaagttaatgtcatcggcggcgacgacaaatatgggtaagtttgccctaacttcgtttgggaatgttttgatacaaaatttaggttaattttagagatttcaaatcagaaaatttcaattgacaaagggtttttagtgtttccgctaaaaacagtagattgagtataaaatttacggtgtacgtgtatatgaatatcaagtttatgtttagtttgtatttggatatagtgtacgtcttaagaacttcatcgtatttttcaactttcaggaagtacttctaaggatcctggtgaattaccacagaggttgtttgcactcgaccactacccaaccaaggctaagataaatgcgtactctaaaccggagtaccttagtcatctagcatatgcgcttaagggaataccagaaataacgttccttctagagtctccatttagggacctatttaggatccctgttaacaagccatctttttctggtaaacttgttcttgggttaatatgccgtcagttagttacaaagaaatgatatgagatgtagatggtattcggtgatcatcctattaagttaggattaagataatgagcacttttaactggtttggaatgtggaacctatcctaaaaatatgactttgacttggtacatagatgaaactgctagatcctttgtagcttgcgatattatgctagtatcctttccctcaatatccacatgaacaagttcaatatgttcaaaatcctccagaaaactctttaagtgtttcaactcttcagcagttccgcaataagcaagaacatgcaacaccctcacttggttcagaggcatggagaaatcacctgtgtaaccattcagatcctaaaaaaacattaatcaagaagattgatcaaccacacaatttgtatatatatattgattcatagatttttcttactgaatatatatatatataccttgatggttagattttcaagctttggagaatgcttaagtacacatttgcgagcaattaccaaccatcttcattcataagacctaaagataacttaattagactgttgaacacagttagacaatcttcatagaaggaacaaatcaaacaaatcttctgaaaacaaaaacaaactttaagactgtcccaagatttctcaaaacgaaacaaggaaaattgccgagacgcaaagaacttacatcgaccgaaccaggagacaaatgaaggatctcaacattaatttcttatccccataatgagtttcattacatctgcatccgcaatgcctggtggatcaaaatccagcgtgtagcatgtcaggagtccatattaacttgtggatactgacacaaggagaaactagaatagttgaggtatacaagatttggcaggtcaaatgataggctgctattaataacacgacttcgataataaactgatagtctcttgagagacgggctcaatatggtgttgttaggtattgttggtttgcctctgataaggagtgtgttaaggaatattgttaacacctaaagcactcggcaaccaacaagaagcgtgcaaagcaaatcatcatgtttatcgataatcgtatctatgtagagaaacttaagagatggaagtgacacatatgaaggaaggtttctaagagggagccttagtgacagcttaacaagtgttttgcttgcaaagagctggtgaggcaaacattatgcatctcgatcttttatccttagttcaatttccaaaacaccacgttttatgacatgagagatccaactgcccacataagccttttgcctttgattctcctttggaaccttacattttagagagaatttcttgatcagaaagtcacattgctaagtcagagttcaatccacaaaattcttgaagctattattcaagaaagaatcatcaaaatcgagagtatccaccaagctaaacatatacctccacttttttgagaggacaaatgttgaagcagcttgttttgtctttttttatgtatgaatgttaaatttattcaccaaaaaagactgttttacaaaaaatgcaacatcaagctgaacgtttgagaagaaaaattaaagacgaacaactgaaatatagttaattcggatgagtatggaaccaatatcgtagcccaccttcgtaggtaggggaggccagcaaagtactaagctggtttcgaacatttttatcgaccatttttgctagcgtgttgggtggagttggtggttccccgtgtttcctcccattccgttcccgccatacactatggatggataactgaaacacatatcgcaagacaaaaagatggacctttggaattggtaaagtcgtaagcatggaaatcagagactcccaatgagttgtgtagtgttgtccaagcaagtgccgggtgaaggcggaccaaacctgagtcgaatatgaacaagagaaaaagagatggtcccttgtttcgatatcctcatgacacaagacacaattaccacttacggcaacattccaattgagcattctgtcaccagtcgctaagcgattacgaactgcgatccatgctatgaaagagtacttaggtgtagatttgggaaaccatacacctttgtaccattcacatattgtatatgttgtcgtatcgcatgccaagtttctcttcagatgaaaacattctcgaaagtgccattgtttctttttcaaagaaaattgtccttcccagaatgatgagtagggcgtgagtttaggactctaattcatcctcaatccggttgagcaaaacagacctatgacgacgacggtgcgctgagaggccttctgcaactgagcaagtaaaggagatacctaaatcaatgcatccacgaggacctaaaagatccgtcaacctaccaagagaacaccaataatcataccaaaaggaggtatctgaaccgctatttacctccaatctttgtaaagattttgccttgtctcgatactttagaatttttctccacatccaagaaccaatacttgtagatccgtttaccggccataaggattttgatcgtaacagagttgctctgacccagagagaatctttggtagagacgagtcgccaaataagcttcagtaaaacagtgttcgtttcagatagcgaccttagccccatccccccccccttgagaggagactttcaagttcctttatgcacttactaggcaacctgaagactgagagccagaagcttgtgatgctcgatagaaccgaatttagcagttgtaagcgacccgcaaacgataaaaaccgatctgtcaaagaagcgattctagatcgtattttctcaagaagtgggagatagtcggaacgtgtcatactttttgtgagaagcgggagaccaagatacttgaccggaagtgttcccgcaacaaaaggaaattggtgaagcagattatctatacgctgaggtgagcaacctgccataaacaacgtcgatttctctaagctgatttatagacccgaaaatcctggaaagttcccaaagacctgtagtaatgctgctatggatcgagcactaccatctgaaaaaaccaaactgtcgtccgcaaaacacaaatgactgcatgagtcccatgtttttaaaccaaggatggtacccaatatcattatccctagccgctttgtcaagcattttagacagaacattcatacaaatgacgatgaaataaggtgagagggagcagccttgtctcaaccctcatttgctttggaagtaacctgccaattcttccattgacttgaaccgaaaaagatgcagtaccaatacagagttcaatccatcgaacaaaaaccagcgggagataataaccttttagaaccgtgagaagaaaaggtcattggaccgagtcaaaagcctttgatatatcaatctttaatgcacaccttgcggagattgattccttatatcataaggatacactacaagaaaacaggtgattgacgacctacaagtcagtcgtttagtagtcgtaactaaagctaatacgactaatttgcgactaatgactgtagtcattaatccatagtcgctaaaaacactagtcgttaattagtcgttggtcaacgacaataatacgacaactgactaaacagtgaaaaatcgtcgttacgtagtcgtactatgtcggcgactaattgacgactatcctacgattatttgtactgtacagagcgtgtgagaacatgtagtcgtttcgtagtcgttaattgtgtacgacgacattacgacgatgttgcgatgaaatattctaaaccttgggtatgtttccaattgtcgtaaaatagtcgtaaatatgtttacgactattcgacgactctttgacgattaaaagtactttaccaaggatttgaaagtttttgtcataacatagtcgtataagtatatacgactattggacgtctgttttacgattcttttatgactaatttgtttagtcttatgattgtcgtaaagttatgtgactaattgacgactattcagcgactatagtgctacttatttactacttttttgcgactaatagtttggtccgaataaagatttggtcatcaggtgatgggtttcttgtttgttcttgtttattcatcgattgttcttgtttgttattgatatgctatacaatatgaaaacactgcttatatattgaaaatcaagttcaaaacataaaattatcttgttcaaacatacaacttattgaaagatacaactagtgtttggaaacctaaattctatggatcattagatgggggagtaattgggatacgctctgtggatgtggaagagtgtgtggcaatgaagtccaagaactgcggatcggtttggcggagatacttctcgactaaggacaagtgctcgagcttgtccttttgcttagctgtgactcgggctgtctcggcttctcgggcagcaatctcagcatctcgcttttcgttatatgcagcctgttcttcaatttgccgctgagcttcctgcagccgttcttctaaggctttaaaggttgagtctccggggagttggcggttggcactgcctagagtttctttaagacagccaagttcataaggattgcctcttgcatccttttctgtggactgcaagaaataaagaggaagataattagtgacagatcctaaatgtctctaagactctgaaaaagacaaagaacatcttacctcgagaaatatggctgcatactcatctagtgtgagatcccgaggacgtgaagagccatcagacacagaagaagcagccgcctctagttcagacaactctctcacattctgctcatacgccagagcaatcttctctgccttctgatcaacataagtcccatccgacttagtgtgtgtttggatgaacacctcaccaagagggacaggtcttcccattttttcttcctgcaaacacagatcacaagcttcattactatcaacagactaaacatcacacacagttaaacgaacatcactaaaacacatgggaagattgcagaaacacttaccaattcatcttggatttcttggaaagactttggcccagagtagtggacgtgaggaccgagaccgttacggtcagagagacgagctttggaatatgtcttactccttttttgtgcctcttcagtgtcccagtagtcgcacatggttccccacagagtttctccaatccatggaggctgctctcgagttctccttgcggtgctaaccatgtccttcaagcgcctcttaacgatctcattgaagtagtattggactgtccctgttattaagagatcccagtggtgagttttctacaaaaaaagtgtgaagttagtgaacaaatgacagattaaatagtacagtctaatgaaagttggagaaatacaagaagcttaccgcaaactctaaaaacaatctttctcttttatccaatggcacacaggaccaattatagtagggagcattgaacttttgagtaaaaatccatgtgatctttctaaccaatttagatcctctgtcgcgagtaaacctccaaacacatgcaacacagacagaaagtaaacatgtttaaaatccaaaacactacaactacagcagactatataattgaacaaaggcagattctacaagattctagacaagtataagccgacaagatcacacacagaacacaatagtcaacataacaagatcatagacagtaaagaacaagtatagacaagtatagaacaaagacagatcctcattgtcaaagccgaaaacatgctaagttcaacaatcaacaaatgttccacaattatgttcatgattcacaacagaacacaataaagaacttaacaagattatagacaagtatagaacaaagacagatcctcaatgtcaaagccgaaaacatgctaagttcaataatcaacaaatgttccacaattatgttcatgattcacaacagaacacaataaagaacttaacaagattatagacaagtatagaacaaagacagatcctcaatgtcaaagccgaaaacatgctaagttcaacaatcaacaaatgttccacaattatgttcatgattcaccacagaacacaataaataacctaacaagattatagacaaagtgaagaacttaacaagattacacacgagtttagaacaaaggcagattctactatgttacacaaaccctaacaaacatccaattccaacaaaggcagattctactatgttacacaaaccctaacaagccattctacagaccataacacgagttacactacacaggctaagaacactagaataaaatagaggaagagaacataccactcggttttaggtttgggaattggagacaagacacaacaccactagatggggtagagagtgtcgattgcagagccaacgccgagtcttcttgtagctccgacaacgtcccaggaacttcctcttggaagttgttcccttgagacgacgggtggctgtttgctggagcgtctgaatctcgcgactgaggaggagtttgctgaggtggcgctgttggcggcggagtgtagtggacctcttcagatagaggcggaggagcttgatgttgtggttgagtcgttgagttctggaagagttgcagaggcggtggatagttgcggacgtggggtgcagacgttgaaggtccatgttgttgagccggctccgtcgcaggaacttgaaccgccagcgccggagtgaagttgtattggggaggaagatttgcaggtcttgatccgccggcgccggctctctgagtgacgttcggcgtcgtcttacgcttccgggagccacctcgaccggcgataggcatgatagtgagccaaatgaagagattgaagagaaaaagaagaagacgacgaagcagatcgaagaggttgaaggtgagagatcgaagaagatcgatcgatcttagcagaagaagaagaagatcgatctagaaggagaaaggattgatcttagaaagagttctggggattagggttttcgagacgaagaagaagaagaagaggaggttggatcgaataggtttaaggtgagaaatcgaagaagatcgattgatcttagcagaagaagaagaagatcgatctagaaggagaaaggatcgatcttagaaagagaattggggattagggttttcgagacgaagaaaaagaagaagaagaagaaatggctaagtgtttggctcgaagagaaatgactcgatttagggttttcaacacaatagaagtcgcataatagtcgcataattgtcgcatattcatttgggtttgggcctcgaaattttgaagcccaactaatcaaaaaagtatcgttgaatagtcgtaattttgtcgccaattatactgggtttgggtttcaaaatttcaaagcccaacaaatcaaaacttgtcggaacatagtcgcatctttgtcataaaatattactgggtttgggcttcaacatttagaagcccaaaataccaaacatctgtcggccaatagtcgcaatattgtcgccgataataatgggtttaggccccgaaattaagaagcccacaaaacaaacttgtctcggtatttagtcgcaatatagacgcctatactaatgggtttgggcctcgaaattttaaagcccaacatatcaaacaggtgtcgcataatagtcgtcgttttgtcgccggttttaatgggtttggatttcaacgtttagaagcccaataaaacttatcttcgtcgctcattagtcgcataatagtcacttttaaattgatataattataaatgtgaagaaatatttgtatatcataaaaaagttcaatgatattatgaaacaaaattcattctaatatttattcaaataattatacatatattaacacagttatacatcttcatcttctacttcatcttcgtccgaggacgataaattacatcggaattcgtcttctggttcagcatccccgacatcgtaattaaggattattgggtttaagttggctaccggagtttcaagaacaggatcttcaattatagtgagcaaaacatcatcatcattttctgtttgcaaaagagttggatcattgttttcatattctccagaaatgtttcccctcggattgacttttagaacattgagccaaatgttctttggtttcttcatatatggatacggaatataacaaacttgatctgcttgagatcctgtatacatatatcaaagatagattattaataattaaaaaaaaaacgtattttggacttaagaataattacgtaccaagaataaatggctcgtatttattgtatttcctcgtagatagaatgtctacaacgccactatggcttcgtcgagtgcctctcccgatctttgggtcataccacttacacttaaaaagtgtgatcctcaaattgacgataccctcatactcgagttctataatatcagttaagataccgtagaaatccgcttcatcagatgaatcagcgtaattttcacctttaacacagaccccatagttacatgtctttcgtccagcgccgtgattttgcgtatgaaacaaatatcctcttgtgaaatacattggccaagttttaaccttgttcaaaggtccttgcacaatctcttgaacccaagtaggaaatggagaagtagtgttccagtatgttacctacataatagataaacaatatcaattagtatatattaaatgatcacctttcgaatgaaccaaaattgatatagacttacatattctttaacccataaatgatattcttccgctcttctcgcgtagagttcttttttgggcaagcatggatatttggcagaaagataatcttcgaacatactatatttacaaacgaggaaaattatcaaagtgatcttagtaaaaatttacaaacaacgagtgattaaaaatacctctcaaatggtttaaaatagtcacaatttcttaaaacatatgcatgtgcgctttggtagtctttctctgaaagccaatctacatgcatttcaccacttggacggccgacgtgcataaatatattaggtactccagggacatgatatacaggaactttaccttcattgaatcttgttaacctgatccatgtaagtgaattaatatcgaagaatatctaatcgttaaataattaaatatatttaccttgattttgtttgaatatgatcggcaaagtagtgctctgaaaaataagcaatctcgtcattgatatatgactcaacaattgaacctgcagcatatcttttgttctttgcttttcctttcaactttttgaaaaacctctcgaatgggtacatccacctatattggactgggccacccaattcagcttcgtatgggagatggataggtaagtgttccataacatcaaaaaatgatggtggaaagatcctttccaaattacagatgattaaaactatgttctgtttgagaatttgaacgcgacttgtctgtaaagttctcgaacatagatctcggaaaaatgctccaattcctaaaatatatgtgcaagttaaatgattagattaaaaaaatgttggaaaaaaatatagtaagtatatattgtacctgatagtgcaaggtggacattccggtcaagcagttcagcaaagataaatggaagtagtcgctccataaatacatgacaatcatgacttttcatgcctgaaaacttttcattatccagatctatacaactagccaaatctgaagaataaccatctggaaatctaatataatatttcacacattgtaataaactctgtttggcttcttctgtcaatgtatacgctagaaatggagctttgccactactatcaatatgtaagcctgggcgtgaacaaaatttctcaatatccaatcttgacatgatattatcttttgatttacccttaactctcatgagagtgttcatgatgttgtcaagaaaattcttctctgtatgcatcacatcaatattatgtcgaagattgaggtctttccagtaagacaactcccacaagatgctttccttgtgccaattatgtttcttcccatagcctcgcatcttcttttcatgaccgttcccaccaacatccttcgtttttggtggatttacactagccaacctctcgtaataaacttgctcccctgtcaaagactcaggtggatattcgctagaagcatctcttcctttcagaaagtcttttctgttcctacgggatggatgaccatgaggaaaaaatctacggtgacaatcaaaccagcatgtcttccgtccattgggtagataaaaagactttgtactttccatgcaaacaggacaagacaatttaccatgagtagtccatcctgataacatgctatacgccggaaagtcgctaatcgtccacagtagtactgcttttagattaaaattctgactcaatgaaacatcgtacgcatcgactccagtagaccacaactcttttaactcctcaataagaggttggaggaagacatcaagactagctcgaggatgatttggaccagaattcagaatggtaagaaataagtactctgtattcatgcacataccagggggtaaattataaagagttaggatcacaggccacaatgaatgattacgagacatgccaaatggattgaacccatcagtacacaacccgagataaacgttacggggttcttccgcaaactggggatgtaaccctaggaaatatctccactctgctgcatctgaaggatgattcatttctccctcctttgattggtgctcagcatgccatcgcattgccgctgctgtcttatggctctgatacattctcttcaaccggtccccaataggtagataccacatacgactatatggtactttggttcttcgacggtcgtccttaggcttccatcttttcgcacaacaaaatcgacattgatcttctttttcgtcttctttccaaaatagcatacaattgttctgacaaacatcaatcgtatgatatggaagtcctaaattgcgcattaacttctcggtctggtaatgtgaagtggttgtctggtttccttctggtaaaaaatctgtaaacatttcgcaaacggagtccaccaacttttcactcatattatactccgccttgttgtgcatgagtcgagatgctaaggataattgcgactgcccttcacgacaaccattgtacaaaggattatttgcaccttctaacaagtcgtagaacttatttgaatggttacggaccggttcttccacattctgataactatcatcatgacgatagttatcatcataccccacattaaaattaaatgcatcgttcaccatatccacatatggatcttctacaatattacccacttcttcatgattctcactaaaataagtcctattcgtgtaactcgttcctatatccatattcatttcttctccatgcttataccaaacataataatcaggcataaatccatgactaaacaaatgactactaactcttctacccgagatgatgtgtttttcattcttgcatacactacaaggacaatgaaatttacctcgactactctgtactattggctgactattagcgaatgtcatgaattgctcaactcctgcgacgtattcggctgacaaattccccgtcacttcatcaaatctcttgtacatccaatctcgatagaaaccgccagtaccgccataattgtagtttcccgccattatacaataaagtaactaatatttttttttctctttgatgttgttgttgttttgatttgttggtgaaagaagagttgcgtgaacgtttattatataggccaatttttgtgactaatttacgactacaactaaataattaggtgtacctacttaccaatgtgaaacacgttttccatctactttatacgactatggtgcgacgtttctacgactacaggctgactaagacgtctaatcgtcctgtagtcgccaaattagcgactaaataaaatagacggtagaatagtcgttaattagcgactaagcaacgacaaaattatcccttcaataatataatcgtcaaatagtcgttacttgccgactctttgccgactgcatacgatagtcgtaaaacaacgactatgtaactacaatttttcgtgttgtcgcatgcgagtcgtaaatccgtcgtcaaatagtcgtataatgttacgactacgtttgttgtcgctgattgtagtcgtcgtttacctgttttcttgtagtgataatccttaactagttccgaggctaacaacaaattctccattataagccgatctttgatgaatacagactggttattcactacaggaaaatgggtttttaatagcacagaaatatagcgttttatgtcaatatgctatcattgatagaaggataaaataaagataacgtctccaaaaatgaaatgctatgatagctttactcactaaaaattattttcacgtgttaagtaaaaaaaaggttaagtccacattcagtcttctctctcactgttcaactcgacaattcctctctctcactgttcttcaaaaaaatttctttcaatcgtcgaattgttctgtctgtttttcaaaacgattattgttctgtctcttttccaaaatggttattgttcttcggtagctcatagctcgattggtcttcgataattcactctctcacaaagcccagaaatatctgataaaggtattttaatctgttcaattcaatatctgatagaggtttgatttcaattttgatttcatttcaatttggggattttgatttggggattttaggggttttagggtttcgtttcgatttggggattttagggttttgttttgattttagggatttcgatttagggatttcgattaagtgattaattgtttttcgttttggtttattttaattttaggtcctcgtttcaatttggggatttcgattttagggttctttagttagatttagatttggttttcaatttggggatttcgtgttttggcttttagtttgatgaaaactaatagtcattttctttatgcagattattgtttcagaatctacaagagcttaagaggtagcagattcttatctatttctatattttttggtttatttgttgtgagatgagtgtttgataaatgaaattattgtcacgcatgtctgagtaatccgtggttgagctctggtgttataacatggaaaaggcttgggtatggcttccaaggtatgaattttctggttatcaattagctagtgttttatttcaactttgtttcttcttattgatattttgccttgtttatttacatgaagggctagcattgaatatgagaaaggtgctaccgtttttgtgaatgaatcagcacaaaaattgggtaatcctgaagaattattgtgtccatgcattgactgtcggaatgtttgccatcatctattagaaatcgtgttagagcatctggtgattagagggatggatgagaaatataagattaaggcatgttggaataaccatggagagagaagggaacataacatggctagtgttgaatcttcagagaatgatgcttatgacttgattaggactgcatttttcagtggtggagaaaagcagcaaattcagaatgacaatgatgcttatgatgaagaactaagcaaagaagaagctgagtttagagagaagttattggaagctgaaactcctctatacttgacaagttctaagtataccaaggtggttgcaataatggctctctatcgcatcaaggtgaaaagtggtatgtctgaaaactattttgatcagttgcttacagttgttcacgatatgcttcctgtggagaatgttcttcccaagtcaactgctgagataaagaagttcttgaaggttttcggttttggttacgatatgattcatgcctgtaagaatgactacattctttatcgtaagcagtatgaggagttagttagctgcccgcgatgtagtgcttcacgatgggagaaggataaccacacaggagaagaaaataaaggggttccagcagaagtcttaagatatttccctatcaaggacagattcaagagacttttcagatcgaaaaggattactgaagagttgcggtggcattccagcaatggtagtgtagatgggacaatgagacacccagttgactcgctcacttgggaaaaagtgaaggagaaatggcctgagtttgatggtgatcctaggaaccttcgtttatgcctttctacagatgggatgaacccattctcaatgcagaatactaagtacagtgtatggccagttatgttagttaactataacaaggctcctaccaagtgtatgaagtcagagaacatcatgttgaccatgctcatccctggaccaacagcccccagtaacaacatcgacgtctacttacaacctttggtagatgatttacttgatctgtggaatgatggtattcaagtttatgactcctttatgtaagagacttttacacttagagcaatgttactttggactatcagtgactatccggctttagggactctcgctggttgtaaggtcaaagggaaacaagcatgtaatgtctgtggtaaagatacaccacataggtggttgaagtttagtcggaaacatgtttacttaggcaatagaaagcgtctccgacctgggcatccttatagacgtcgaaaagcttggtttaataacacggttgagaatggaactacaaatagaattcatagtggagttgatattctagagacattaaaggactttcgcaatgattttgggagaccgctggataagagaagtaagagaagcagaactgatttggatgaagagggtgttaattcagatgaagaagcagaagaagatagtgataagtggcgttggaagaaacgttctatcttgtttgacttaccatattggaaggttagtgtgtcttctaaactgtattacaagtatatgtagtatggatttgtctaactttgattttttcattgctcaggatatgcctgtgagacacaatatagatgtgatgcatgtggaaaagaacatatctgatgcaatgttgtcaactttgatgcaaagtgttaaatcaaaagacggtttgaaatcacgaaaggatttagaagacatagggattagaaaacacttatatgcaatcacacgtggaaagagaacttacctgcctcctgccgcttattggctatcaaagttagagaagaagttgttctgcaataggttagcaaaatttaggggtcctgacggatattgtgctaatatctcaaactgtgtatcagttgagcctcttggaattggtgggttaaaatcacatgatcatcacgtccttatgcagaatctactttcagttgctttgagaggcttgttgctcagaggacctcgagttgttgtcgctcgtttatgcttttacttcaatagattatgtcagcgtgtgattgatccagagaaaatactagccttagagtctgaagttgtggatacaatgtgtcaactagaacggttctttcctccttccatgtttgacataatgtttcacctgcccatacatctagggagggaagcacgaatgggtgggccagtacattttcgctcgatgtacccatttgagaggtacttctacttctaactctctaattatgtgatatgttgttagttagctttattgaaatcttcagactctaaggctagtattttctcttatgatgtaggtacatgaaaaaattgaaatcttatgttaagaactatgcaagaccagaagcgtgtattgcagagggctatttggctggagaatgtgttgcattttgcacagagttcctacgcaactcgttaccatatgaagaatcagttaatcgcaatgaagatattgagacaaatgagaatgtgcttggaggtcgtccattatataagggtacaaatgttacactaatagagaaagaaagagagataacacatcgatatgttctaatgaacatggctgtgactgaaccttatattgagtaagagcactgaatctcctgtatatatctttattcatcgagtatgatctttacattaagttttgtcttttttcagtatgcatttggaagaattacaagaatttgatgatagttgtgcaagaaacgaaactctagtgttcaagttacacaacaaaagatttgcaaagtggattaaaaataaggtatgagttcatcacttacaaatatgatattgtttctctgtaatgatgtattgagtattgtctgtttttattagatcccttcaaactcaaaggatcattcaatgaagctaaggcggatagcacttggaccaagactaattgctcagacttacaaggggtttatcgtaaatgggcataggttccacaccgatgatgtaaagcgaaagactcagaatagtggagtcacatatgaagcctttagtatgcgtagatcaagtgcacgtgatagtaggcaccaagctgacatagttacatattatggagtcataaaggagattttattgcttgactaccatatgttccaaatacctattttcaagtgcaattgggcccataaaggtcatggtgtgagagaagaagaaggattcacgcttgtgaacctccacttgagccaagcagcatttgtaaaagatccttacattatgccatcccaagcgagacaagtgttttactctagagaggatgatttgagtcagtggtatgtggtaatgagagcgccaccaagaggttatcatgagttagagactgaagaggagtttaatagtgcaccattttcagtccaaccaattgatgattcaggaaatcaatctgatgatgacagtttttgtgctagggcagattgtgaaggggttacagtagtggattaatgtatgatttattgttaagaatacatgtttaactttggagatttgatggtttttcaggttatctgaaatggctaagaaaggtgaactgaacccacgccgtagtaagcgtcaaaagggactagatgcgagtcctgtcatatcatccttgaagaagaaaaagaagcaacaaaaggaagtgcttattcctgtgatagaagaaagcagcaaggagacgacttttaatgatgaagatggagttcaagtagagtttgaggaagtaacccaagcttctcgtggtgctgattcattggataaaaatgaagaagctgatgaccaagaagttgagagaacagaccctattgaagaagatttggagcctcctgctcaagaagaagattttggccagccttccactgaaaggcttacaactgcgactgctgaaacatcaacacaagtgtcagtgaccaagaaaaacagactaagaggacccacaaagctgcgaagagtggccaaaagtgcacaagacaaagttgatgtcgaatttacagaattgggagaatttgtgggatctggttcagttaaactttcatcatttcttggagcacttgtgagagagtacgtccctattattctggatgattggaggcagctagatgatataataagggacacactatgcgaggaaattcaggtaagtgtattgatcatcttattacatttacttgaaaaactaattaagtaaagaatagtgattttctatacatttgtatactaatgtaggggaggttcaatgtggaccaagaattgcaaagaagagaaattttcaaacatatgggttgtttgtttagggcttctaaatccaaccttctggcgaaagtgagagttgctaaatggttttaatcataggaagtaagagataaagtctcagatacaccacattcaattcttttacttgtagaaaaaagagagttcagacccctcgcaggtgacaaggagtaaagtttgggttgcaggacacacgcattctgatggaagaccagtcaaggccgaatttgtcgagaccattgtaagtaatatctaatttcttgtggtttactctgatattatctaaagctagctacttatacctgtttgattacatatttgaatgcaggaaaaaataaaatcttttttttgaaagaatgtaaaattgtattcagtcaaaaacctttttacaaaagatgtaacagtgtgtgtaaaagtttagaatataagctgaagatacaatagctgaaagaaaagactagagaggttgtagaggatgaaggggtcgagtggagaaccaaagctgcaggcaagtgttgtagctgtgatctcctgtatctcggattgagctgattcgattacgaactgttttgtcaatgagcttgatgagcctattcggtggtgagctaagttcaccatgacgtctagcattcctttctcgccaaatgtggtagattgtggcttgaaaggattgtagattgtggaaaaaataaaatcaatagagagtgaaatggatttcacatccactagtgttaaagaagatgttgtgactcaagtactaggaaaagacaaacctgggagagttagagggttgggcagaggggctacattaacctagctggcatttttgcaagttagagactcacatgtgcataaatttgaagctactcaagaactattattgagcaaggttgaagacttacagaatgttgttaaaaaaatggctagtaataaggtatgtactcagacgcccttgtttactgttatgatctatgttagttaacttctatgtgatattttagtcttctaacaattttatttctcagccaccttgtgatactcaatccagatctgaagcaaccaattttacagtaggcgtcaaatgtcaaattcttgatttggaatctgaagatgatattgttattgctgaaggagagttgtgttctactgaaccagcatataagattcgtcgtgtaccactaggacctaacgcagctgctattgtagtcaaaacggtatttgataaacaagcttctgtttggaggcctataccaaacatcgtcttcattggacaagcgttgggagccaaaattgcatggccagagaataagttgattttggacaatgatgacttcacaagttggagcacaactgcaaacaagaacattgatgatgcatatacggtaattgtttagaggcttgttatcaacttatccaaattatagaaacttactctttagctaggttggtaatacatttgcctgaaatgtaggaacaagagagggttcgtattattgattggactgtggatgaggtttatgctgaaggtaaactgtgttcaattgatccaaatgaactcttgaacgaagtacctattggtcgcaattaatgcaattgtggagattgatttggtggttaaagaaagtgcctttttgtggagaccaattgctgagatgtcagtcatgggtgatgcacttaataagaaaatcgtttgggcttagccaaagatacagtttgttaataacgcaatgccgccttcttaaaaagtaacaagatcaacacgttcggtaagattcaagaacctttattttgtagtatgatttgatttgttgttcatatactggaattctgatggatatacttttgaattttcaattgttagaatggtagtatcaacactagtagcagtaaaggtgaaaagaagaaatgtttattgttagatatcgataaaactgagaaggtagttgcaactggtcgagtttcttcaacaaatccagaagatttagtacatttcgaacgcctaggattgaatgctagcatcgtgtgggtagaatctgagaagattggagatgctaaattctggagaccaaattctgagattatgtgcattggcgatgcagtaggccttactgtaccttggcctaatgatagactcattttgatatgatctatgttatgcatgtgtttgtttgatactgctgtgaacttgggttattgacagatttgatattgtgtaatattgtgtaatattgatgtgaacttgttgtatgattgacaatattaattaaaagttgatttatggttttcttacattatattgatattgattatatatgtaaacaacaacataaatgaaagcagacaatgattttgtgacatgcttaaattaaatttataaatagcatataataaacgctgttataatttaaacaataacacaacatacccgctattatattaaaaacaatagcagatgatatgcgctattgtacacaaaacaataacataaaacacccgctattataatgtacactataacaaatgatatccgctattgtattaacacttttaatagcgtcgctaaaaaccgctatgaaaacttggcaagctatcgtagcgggcgataacatatcgtttttattttcgctatagtaacgataaatagcgtttttcgtcttctattaaaaacctattttcctgtagtgattgcaacttattgcatctctgttttgtcgaaagtgaggacaatatttttccaagaatttcatctgtaagacaacttatagcttgtgtcaaatcttttggcatccattgcctgaaacatgaagtgatgggtcctgtgattcaactactagattaaccaaccgaaagcgattgctctagaaagttgaatacttctataaataccctatagaagaaactcaaaactgcttgaatagtaaagaacgtgggcaattataataactagagaaggaacaaatatgaaagttctattgatatagagagactgagagagagacgaactgttcctgtggaggacgtcgaagagagagagagacggagagaacgatgattaccataatttaggtttagggtttccaaaaaaaaaattaaacactaattccaaaatgacaagagaaaaatcgtttaaaagaacttgctaattatcaatatcccatatgaaaaattaattgaacctaatcaaactaaattaaccataccatacgaattgaaccaaaacggttcgaacatacctgaaataattttggttaaagttcaatttactagaatcgtataactctaagggcacaattatcagaatcccagtctctacatattctcttacaagtatcttcatattagtcaccttgactactctacagattcgtgcattaatgtctctttcacgttaaaaaaatcttgggaaaagaaagcaaaagagtaattttgaccgtctagctctctagtctctatataaccccaatcgttaacagaatgaagataaacttaaaaacatggcatcacaaaccaacaaagagcttttcgtgggtggacttgcaaggattttgaaagaacagcgacaagtcgatgtccggctgaaggcaggggacagcgatcagaagggtgtatctatatctgctcataagcttgttctggtctcttcctctttccttattattttttcatcatcatatgattcttaaaaaaacatttacgaaacgttctttactcgtactgaatttcattgtgaatgttatggaatgttttatagtctgcaagatctgaggtgtttaagatgatattggaaacagaagagatcaaggctacaactacgctagacacaatcactctctcagagctaaaacacacagagttagtggctttggttgagtgataagtaccaaaatggcttatcaagatatgtaacagaaagagatgagataatagaagaaataggttgagatgcagaagaatttcagagaaggagaaggaagatgaagaagataaacattcttaagattataatcaataagtgtttttcaatgactaaagaagagtttaaataaaagacattactaaagtaaacatgccaaacactaagccttataaaaacccataaggcccaactcctgaacctatcaatactccctcctttgagagtcaccttgtcctcaaggtggaagaaagtgaattccttggacgagtgtcctaacttcggttgagcctacagctgcaaccttctttttgacacttgattcccacttatcaaccatctcctcaacatgcatttgtgtaacctctttaccgaattcaatcattagccttgaaaccacagttttaaaaggatgatacaatcccacaacttcaaacggttctgcagtccttacctcctttgatatgaccgcctctttagtctgttatgtgtgcacctttaacacacacggagcgggtttggtctttctcactcttggttgacatgttccgcgtacttccagctacaacttcactgtgtttcaccccgggttgcccaaaaaatgatttctcatcgtcattctctttagtatccttctaaggttccaaccatgaaacttcttccaagtgttctggacttagcttcaactcttgactttcaacgctcttaacatgtccaccttgtatttccttagcgattcctccacatgtaaccttactctctccttttaaagttaccttgtcctcaaggtaggaaacaacaagcatttccccatcgttatttctctgttcttcaatatcctcttgctcattttcactcttcatctttacttttgtagtaacttgctcaagttcttcgtgctcagcacaaagagtgatccattgttggttgtggctgaaagagaaatcttgattctgccaattaaccattgtctctcccagttttgagagccactcataaccaagaatcacatccacatcagtcttggccaagtctagcagaaggaaattctcagtgatttcaacttcttgaacccataatctaattccgagacaagttcctacgctttgtatgcactgcctttgtcccaataaaactgaagcttggtttgtaatactcgtgggtagtttgagactgaaggctaactcaactaagataaaattgtcggttgctccagaatctatagctacaacgaccttatgatctaatatgaagccatagaatctcatacctttgttcctggttaaatctatcactagttgctccattccctgtctcaaggtataactatcctgctctaattcttccagctcatttataactccttttttcttctttaccacatccagcttagcttgtaccagggtaaggctcatcagctccgcctgtcttgattggtagctgttctcaatgacgacacaattccagaatttatgagattattactttcttctaaccattgtgttgtatccatcatttgtacaatcccattcggtttcaattctcgaactgcagtttgcaaactaggttgcaacccttgtaagaacatctcctcgaagccttgtcctggtaaggtaactgagcgaagacaaagagcttcaaacctttctctgtaatcacgcactgatccttcttgttgtattcccgaataatgaggttgatgatttaacttcattgtcgtctttgtctctcggcccatcatacacttaaattccttccagcttgtaggtgaattctttttccagagatgctttatccattgcctagtctctccttccaagttagcataaacaatttgtaacctctcatgctccgaaattttattctcaccaaaataattctcaaagttatttagacagcttcttaggttttttccgtgaaaagcaacgaggctctgtactagctgaaagtcctcagtccacggctcagttccagaccaacgtcaccacggacagctgcatcacacctcaagctccgttaaaggcaaaaggggatgggattctacccttaccgctgctggcagtaccgatccaaacaatggatccgtctcagacatcatacgggtttagccagaacaccggtcagctaggatctccgggtaacaacactgggtcacctggaagaaggtcagatctatcacagtatgaaggacagagcccagatgactggttattcagaatggagaagagttttctgcagaaccagaccttggaacatcaaaagttggaggtagctataacgtgtttagtttcggtaacagctttaaattggttgagaggtgtgctaatgagaggattgttcaaagattgtaatgattttaagaaaaaagttcgaaaatgatttggacacagtcgttgcgggtctgttgtgtggcagttgttgaacatcagacagaaaggctcagtggaggaatttagagaacggtttgaagaattaatagttgaggtgccacacattactaacgatcttttggaaggaattttcttaaagggaatgaggaaaaatataagagaccaagtgatgcgtacacgtccctctagcatatatgagattgtggagacagcatgcctcatagaagagcaagagcaggagaagacgtctttccactcaaattacaactcgaaatccgttagtagaacaaattcagctccggtgcttcatcgaagcaacaacaatagccctatcaagacacaggatatcattcaagctaggaggtcatttgatggggtaagagataacaggaaaccggatcagaggaacaacgcatgctacacgtgtggagaccgctattttccaggacaccgctgtaaaaatcagaagctcaaatgtttggagttggtcgcaacaagcgaggcgggacagttactggaggaggaagacgaatctgagagtgaagaagaaccggaacctaaggtggaaggacagacaatgatgcatctttcgttgagttcaatggctggccttactaatgaaaagtctatgaggatgaaaggatggatagcaggtcaggaagtgatcgtgttgattgattcaggagcaactagtaacttcatttctgaagaagttgctcagcggtgctcactaacagtcacaccaacaagtgattttggagtagcagttggtaatggtcagattatttcaggacaaggcaaagttaaggatgtgcagctacacattcaaggggtggatattaaggaggagttttttctgtttgctttgggaaccacagatatagtgctggggtactcgtggttagctaccttgggagatacaaggatcaattgggggcgccacactctgaaattcaaggtcaacgaagaatgggtgacactagtgggagacccagccctcttgagacaacagatatctcttcatgcattggaaaaaacagtgagaaaaggtgacacatgaggcggaaggaaacaacagtttgggggttcagaaacttatcaaggattacaagaaggttttccagttaccacaaaggttacctccatcaaggaatagagagcattccatcaccttacaactaggaagctcaccgatcaaggctagaccatatcggtattcattcgcacaaaagaatgaaatggagaagttgatcagagagatgctagcagctgagataatcagacctagtatcagcccattctcaagtcctgtactattggtcaagaagaaagacggaggctggagattttgcgtggactacagggcattgagcaaggctaccgttccggactgatatccaatcccagtgatcgaggaactgctggatgagctacacagagccacgatgttctccaaattggaccttaaatcggggtaccatcagatacgaatgaaggctgcagatgtggagaagacagctttctgtactcatgagggtcattacgagttcttggtcatgccgtttgatttgaccaatgcaccggccacctttcagtcagtaatgaatgagttgtttcgaacctacctgcgtcaatttgttctagtgttctttgacgacattctggtttatagctcagacgaagagacccaccttaaacatctagaagcggttctccaaattctacttcagaataagttatatgccaatgaaaagaaatgtcactttggaagcaccagaatctcttacttgggtcacatggtaacagggaaaggtgtgtctgcggatccagctaaaattgaagctatggtgaactggcctcaaccaaagaacataactgagctgagggggttcctgggacacactgactactacagaaggtttgtagcaggttatgggaagatagccaaacccttaacagaattgcttaaaaagggtaagtttgaatggtctgaagcagctaataaagcttatgagacacttaaaggagcagttatccagttgccaaccttagcattgctagactttgcaaagccttttgtgattgaaacggatgcttcagggacgggaatcggggttgtgctatcacaagataaacgtcccatagcgtttattagccaggggttctctagtaagggcagaattaagtcagtttacgagagagagctgttggccattgtctttgtagtggacaagtggaaacactatctagcaagcaagaaggtgattataaggacagatcagaggagtctcaaacatctgcttaaccagaaagctgtgtcagctatacagcagagatgggcatccaaacttgtcagtttggattatgaaattgagtacaaaccaggcgcagaaaatcgtgtagcagacgctttgtcccgacgtccagtcacagagcaggtgatgaacatgttgttgctggctccagctactctgcacaagattgaattacaagatcaagtacaaggcgaccctagcctcaacctcatcagagaaaagcttttaagtggacaagagtctgaaaaaggatacagtttggtggttggcaccttacataaagatggtaggataatgattccaacaaattctccttttattccaaagttgttggaaaggttccacactagtcccattgggggtcatgaaggggtgctcaagacactcaagagattggcgagtgaagtttattggaagggaatgaggagagacgtggtagagttcctcagaggctgtcaagtgtgtcaacaaaataagtactcaaccttgtcaccagcgggtcttctcacaccgctacccattcctactaaggtatggtcgaacattagccttgattttattgatgggttaccaaagtctgaaggctatgatgtggtgttagtagtggtagataggcttagtaattatgatcactttgtaccgctgaagcatccttacacagccaagtctatagcagatattttccttcatgaaatagtcagacttcatgggtttcctgagagtatggtctcagatagggataaaatctttatcatcaatttctggtcttctctgttcaaatcacacggaacatccctggataagagtacatcatatcaccctcagacagatggccatacaaaagttctgaatcgttgcttagagacgtatattcgttgctttgttaatgggaaaccaaagacttgggctaagtggctaatgtaggctgaatactggtataacacatcgttccactctgcgattaagatgactccatttcaggctctgtatgggagagaacctcccaaactcttgcgattcggtgatgtacccactgctaacgccggcgttgaagagttgctgcaagaaagagactgactggtcactatgctgagagagaatctacaagcagcccaagctcgaatgcagaagtcagctaacaagcatagaagagaattggaattctcagtgggaacttgggtctatttaaaactcaggccgtatagacagctttctgtagctcaacgacgtaatgagaagctatcgccaaggttctttggtccgtataagattctggaacgcataggagcaatggcatataagctgcagctaccaactgaaagttctattcatcatgtgttccacatatcccaactgagacaggcgcttccaggttcagcacaagctcaaccccttcgcgattatgacttctaacttggagtgggcaacagaaccagaagaggtaatggagatcagagagggcaacacaacagaagatactaagctcttgattaagtggaagggtatgccagagtgtgagaatacatgggaaccaatgacgggcatcacgcaacaatttccagattctcaccttgaggacaaagtggctttgttacgggggagtattggtaaggcagcaactcaagcaatggagtcagcaagagaagtcagaattccaaggaagagagtaccaaagaaggtttatgatcctagtggctgaaatgaagctaaaggaagtcaaggaaatactctgtaccatccagaggctttgacaatgtctttgacaatgtcaaagaataagaatgcctatagttttcttatttaactttgtgtcatttaagtgttgttgtgagtgagtggttgtagtttctgtaggggaactactacttaagcggaactctattttagggttatattcatcaatgaattaatcaactttccttattactcttctctcttatcttactcgacttctatcctatacttcttcttccttttctacttctattctctgttttccttcttgataagttcacgcttatcaattggcttagtgtttggcctgtttactttagtaatgtcttttatttaaactcttctttagtcattgaaaaacacttatcgattaagaacaagaaatgtttatcttcttcatcttctctcttcttcttcctgcctttctctgaactcttctgaatctcatctctatttcttctgtatctcacctcatttctgttacttcacttgataagccattttggtacttgataatccagaatcgaaattcttctgctggtgaaacacacgccaagtgttcgacaaaacgcccaggcgagatttctgcatttttccttggtgtgggttcagatttggtcgtgagaccttgaggcagctcgtgatgttcttgtttcctcttctcaggtggttcttcagttgcattcaccggaaaaagcgtagcaaaaatttcacgaatcccttttcgatactcctcttgttgagcttcaagcctttggacgatggaatctagcttttcctccaccttttcaacaaatcgatcgagtgttgcttctagatcagagattgtggcggcttgattggtttgagcagcttgagtagtcttgagttcaactctcaatgaaagcaccaattgataagtaccaaaatggcttatcaagatatgtaacagaaagagatgagataatagaagaaataggttgagatgcagaagaatttcagaaaaggaaaggaaggagaaagaagatgaagaagataaacattcttaagattataatcgataagtgtttttcaatgactaaagaagagtttaaataaaagacattactaaagtaaacaggccaaacactaagccttataaaaacccatatataaggcccaacttctgaacctatcattgagttcatctacagttccggatctaggctttctacgaaagggaggcaacacgttaggtcactctatcttgcagccgataaatatgagattccgcatctacgtgacctatgcagaatccaacttataaaatctcgtattccttctaatgctcttaacgtccttaagcttgctcaaatcccttttgacaaagacctcaatgatgccaccttggattatatcaaaaccaatataagtacaatttctagctctgatgagttcaaggttttcgttgtcaatcactcaaatcttaccgtggagatagtgaaaggttctttgggacaggggtagatcgtgtactatatgtgggaactattgccagttgtgcactagatcgtgtaataatctatttcacatcgatgaaactgaaaaaaaaaaaagatacaaatataaacagattgcttgtcatacaaatgttggcgaaaatagtagaagaactcgtgaaaaagctttttatagatatttgtaaattttttattttgcaagcttaaaggggtgctcatatttacaagtgttacatatgtaaagagaagagggtaactaaaagatgggatttaattgggactttagtacggtctatattaccattagtgtctcacctttttcttaagtcttggaaaatgaagtaaatcaaaagtcattttgactgccgtcaatggggtttactttcctctctatatatctgaccatcgttttctaaatcaaactcaagttatcttataatggcaatggtgtttaatgaacaatggcaagtcgatatacggctcaaggaaggttgcaacaaaaagggtgcgcaatgttaaaccctgttcatttctcaatttgacagatccatccaactgatccattcaacatgtctatctggatgattcattcgactcttgttcgttttatttttagtcggttcatttgactggaccatccgaatgagatgttgttcgtttgcttatctctatcttcatccaaatgatttgtaataatacaaatacctaaaatacccatgttttcatctaattatatttttattattacttgtaaacatattaattttatttcttaatccaaaatatatttaaaagtaaataaatttcaaataatagtttttttatatttataaatttattttacgtttttgacgggaaaacgtgattttacggttttgacgagacaactcaattttatggttttggcggaaaacaaaagttaacgtttttggcggaaaaacgtgattttacgtttttcgcgagaaaacatgattttacggttttggcgagaaaacgtgatttttgcggttttggcgggaaaacgtgattttgtggttttgacgaaaaaacgtgattttgcggttttgacggaaaaacatgattttgcggttttggcggaaaaacagaattttacggttttggcgggaaaacatgattttacggttttcgaggaaaacggaattttacgttttaacggaaaaattcgacattgcggttttagcaaaaaaaattttataaaaaaataataattttaaaataagatttaagtttatttgtttttttttatctaaaaatacatctaaataatcaattgaaataattatggtatttttgtcatttgttgtttttgactgaatcatctccatccaaatgatccaatttagttcagccaattgagtttcaaaattaagcctaaattttcaaactcctccaaatgaatcatttggatggattatctgaatgaaccgtttttggcaccaaacgaacatcaaaactcataccagatgatccatctgactgatgaaacgaacatggccttaattgtttttgcaacctcaacaacataattcgtatcatttatagtttatgaagcctaaactaaaccagaattgatccttctgtttaaactagtcacaatgaaaatcaaatgcatcatcttttttttagttaataatcagtaaaatatttgctaatatatgtcttctccaaatgtttaaaaagtctctatccaatataaaccataagaaaatttagatgtctaaagttacaattgaaataaattccattgtttaaaaagtaaaaactaacaccaacaaccagaataaagatatgaaatacaagttttaataataaactagattttatcccgcggtacaccgcggtgacaatttatctttttaaagttagtataatttttcttttgcaaattgtatctatctataatatatttttattttatagtttacaattgttattaagtaacgtcctgccaaacccatcccgccaaacccgtcccgtaaaaaaactatttatttatattaatgttgatcttatttatgatatgtttataaatcattgtctaaatatttttgtcgatgcggaacgttgaacccacacattttttgctaataggataatatatgttcatttttaaaattttgaatcatatattatataatgatgttaaaaaattgtaatatatcaaactttttataagtttaaatattaataatgttttataaattttaaatatataaataataatatttaaaaaattaatatttttgcttataaggtaatgacataataactctaaaagcaaggatttagaatatttaaatctttaattaaatattttcattaataaataattaatgtcagtgacatgacattgtaaataagttcaaatacaaaatttatttatttaaacaaaaaacgtttagtaagaataatatttatttaacaaaaaactttgttttaaaatattgttaacaaatattgtttttgcaacctcaacaacataattcgtatcatttatagtttatgaagcctaaactaaacgaattgatccttctgtttaaactagtcacaatgaaaatcaaatgcatcatcttttttttagttaataatcagtaaaatatttgctaatatatgtcttctccaaatgtttaaaaagtctatatccaatataaaccataagaaaatttagatgtctaaagttacaattgaaataaattccattgtttaaaaagtaaaaactaacaccaacaaccagaataaagatatgaaatacaagttttaataataaataatcaactacacaagaaaaaaatgcaactacttgtggttatacaacttataaaataaaacaccaacacatttgtaacaacaacatcagaacatcacgttgttttagttaatctttctatatcttcctttacgtttgttatcccccaaactctacaaaaaatcttgcagcttcctcagttttctaccgtatgatgttccttaatctgtacgtttgagaagatatacgtagcatacgaatgatctctctgtaaaactcccacgattcgcttacttccgtaatagcttcttgcccgaaagggtttttcttgatgaaatcttgaacgttttccgcttctaccaacttctcaagatgaagtctcaaatcaccaccattacctagtttacaatgaagcagaacaaaaattgtgattcttcatactcacttaatcgttaccaaaccccgcaaacttgtaactgaattagatgtttacctaaagatgtatctgtcttgttctgatgattgtatgaatgagggaatattgctgtatatggctgtaacattcagatggtttattcaaaactttaaaatatcgatgacgataaggtaaaagaattgttgtataaatgacacgaggaagatgggaagacatcgcaaaatagcttaccgggttaagcaaagccttgtaaggagaatcgtctagcaaaaccgtgttggtttcgttgtaatcacccattttccaaggaagtcttggatcgtgtttctcccaaagccggtttagatccttgaacaccacatatttgtacctattttcaagcgaaccaacactggttgtagcacaataagacatgtcctgcaaaaagtaaatccccgaaaaatcgatatttactagtttcaaaaaaggaagagtgcatggcaagaaccaccttacccaacaaaacaacagcttactcttcaaatcaccaagcaagaactcagtgattcttacaacattattcctgcaagcaaacaaaacttatatcgattattcacacagatatggaagtaacaatgatatgatcttatatataataagagtaacgtcttactgttttctcgatgaccagataccaacttcaaacttgtcaaagcagaatctcaaaaactcatcacaaaaaggtctcttgaaaactgtcataaccaaaaaaaaatgcaaactaatataagtaacaatgtggtctcacaaataacaatgaacaaaaagaaacttacttgctcttcttccaatattaatatccgctggaacatccttgagaggagtaactatatcagcaagcaacccattaagatcaagaacaagaagttttttccttaacaccaatgaatttaccccgctgattccaccaaaaacaacacaagaatcgttgttctctaccactgaaacttcatcactactcataacagccgatataaccgaaccttcttcattcttttctatggtttcatcacccgaaacaacacaagaatcgttgttctttaccactggaacttcatcattactcgtaacagccgatataacagaaccttctttattcttttctatcgtttcctcacccgaaacaacacaagaatcgttgttctttaccactggaacttcatcactactcgtaacagccaatataacacaaccttcttcgttcttttctacggtttcatcacccgaaacaacacaagaatcgttgttctttaccactggaacttcatcattactcgtaacagccgatataacagaaccttctttattcttttctatcgtttcctcacccgaaacaacacaagaatcgttgttctttaccactggaacttcatcactactcgtaacagccaatataacacaaccttcttcgttcttttctacggtttcatcacccgaaacaacacaagaatcgttgttctttaccactggaacttcatcactactcgtaacagccgatataacagaaccttcttccttcttttctacgttttcgtcacccgaaacaacatgttttcgatcaaccaagctcgataccgaaacttcttctttctttctctcattagattcaacgtcaacacaagtctctttcttatcttccatatctaacaaacaaacttcttcattccctttaaccacggtttcgtttagcggcaacattgaaacctcgtgacaattttcgaccttatcaatcaatttagctttcttaatcagaggttcctcttcaacagaatgttcaattgctctcatactaaactcgaaaaactcagaatttgcatcactaacttacttcaatccaatctgttgaagaagaaagtataacaaattcaaagagagaaaatcaaaatcaagaacaattaaatgattctttagttttaacttttaacaataacaactgattaattaagataatgcaaagttaaatcacaattaacgtgtaataagcaaaaatctaagactttgtaataacaaagatgatctgacttaaaagcatttatcaaaacagtagttcgtacatatatgtccgtatcattacacaagtgatcgatctggattttgtatcccgtacaaatttctccggaacaattacagtaaagaaacttacagatgaatttggagaggaagaacaaaagtcggagacagagagaattccaaatgttgacctttccccagagaatttggagtggaagagaatttaaggatctgagaggagatgaaatgacagcgttttgatgtcgtttggtgttcccaaggatttttttgcagagagacaagaaagaagtttagtggcttagacgtgacttggtggggtctttagatctctcgtgttgtcaagttttcgggtcgggtcttcggagctggttcgctcgggtcggttaatttaattctataaacagtttctatgctaattaattgttttacttagacttagacccagtaaagcccatatacattacggtaaaagtccaatttcgatccaactttggtagcatgtagatttcaatccaaactaaacatttttacaaatactagagcaaaacccgcgtcaaaccgcggatgtttttttttaaaatatgattttgttaagttgtatgtaggtattgaatattatttatcataattcatgatatatatagaataaaaggattcattagaaaataattgtgaacacaatgcatttattgatttttttagtaagaccgatatagtctttataagttttggaagctaatttttgctttacgaacatttatttagaaaaatcattaaaaaaaaaatgtgaaaagtgtttaaaatcaccatgtattaattctggtaagattaaagctattttaacgaaaatgtcatacttatgtgtcgttctctcagaacttttcaatctatttaattaaacatctaaattttattaggatatttatagattttaccattagtcttacttctgatttttttctccaattaatttatacttttgaatttattcaatgatattaaaacaaaaatagattaatgtatgcaattaaaatatacaaatctatacagaaaaaaatatttaacgtttctttgtatctattaatataacaaaatatatatatcatagaacataataaacataaacattagtaaaaccatccattcgggttctatatttgttcaaagaaaatgcttagctaatttcatacgtctaactaaatttttttttctttttacaatttttcgatcttcccattcattccccgtaggtccttcttctcctaattgtttccattctaccaacaaattttctataataatttgcaaatctaaattggctaattgttctcggatagcacccgccccagtcagtggcggagccagaacaatgactcactggggtcaaaaaaaaattaaacgaaacgataaactttactataaacataacaatgtcattataaataaaaactctaaagatgaactctacgttcactcatatcttggaatcgttttatcacctattcgtttgtaacagtgttaagtacttgcttttcaataaaacaaacaagacaatcacttaagaacacatcaccgatacggttacgcaatgtagtcttcacaaaattcatcgcggaaaaacatctttcgacagttgccgttgcaacaggaagaatcaaagatagctttagaagatgatataccaaaggatgtgaaagatgctttcttgtctctaccatcacacgagcaagatcaccaagacgctttaaatctgtaaacctttcatcgtttttcacattatcaaggtagatctcaagttgatgatcaagagatctacgctccacaaaactaaagtcatctggataaaactaggtcaatctcacgagcatggacttatcaaactgacgaaaagaatctatcggactcaaagatgacatgcaaataagtagttcagaattcaactcatcaaagcggtcattaaactcttgaagttgcatatctaagacagtgtagaaacaatccaccttatagtgatgcaagttggttataccggtctttttccttggtcttctagaatcaacaaattcttcctccattttaagcattccaatgttagttttctcgctaaaagaactaacttcagccataaaagcatcccatccatcgtctctaaccttttgcaactgacatttagtagttttcaccaatgaaatagcatttaagatatcttgatcttttctttgccaagcctttgataagctatcactgagtcccataacaagcaacatcaactccagatagaaaacaaaatcaaaggtgtgaaaatacttgagaataccatatgcttgttgtcttttggtggtgtcggtgccttcatcctggatatactcgagaactataactatagatgaaaacaactcctcaagacgcaacaaagtcttataatgtgaaccccaacgagtatttccaggtctttgaagggaaagttcttggttcaacctagttcctgtcttaatttcaccattgctaatcttttcttccactttttgccgatcgatttcccggatcttatcttttcttttgcaaaaagctccaacaacatttagcaaaacagaaatcatataaaaaaactctccaacttcaacatgtttttttgcaactgccatgacaaccaattgtagttgatgagcgaagcaatgcacataatatgcagagctattttctttcaaaatcaatgatctcagtccattgaactttcctttcatgttgctagctccatcgtatcccttccctctcagctttttcaaactcaatccatatttagcaaacaaagaatcaatagcacttttcagagataaagaagatgtctcttgcacatgaataacaccaataaatctttctttaactaccccatacttatcaacgaagcgaaaaactactgccatttgctctttatctgaagcatcagccgattcatctacaagcaagccaaagacatcattatccatttcttcaataatagatctagttacctcttctgaaaagcaatggacaatatctttttgaattggtggagatgtcatctggttatttttaggagcatttttcaacacaactttctttacaacttcattctgaccagctatatacttcaaaagctctaaaaaattacccttatttgttgactcttctgattcatcatgaccacgaaatggtaatccttgatgtaacaagtgtcgagaaacatcaatggaagcattcaaccggattcgataatcattcttcacaacattggtttgcttatggagagcagtggcggagccagaacaatgactcactggggtcaaaaaaaaattaaacgaaacgataaactttactataaacataaaaatgtcattacaaataaaaactctaaagatgaactctacgttcactcatatcttggaatcgttttatcaccgattcgtttgtaacagtgttaagtacttgcttttcaataaaacaaacaagacaatcacttaagaacacatcaccgaaacggttacgcaatgtagtcttcacaaaattcatcgcggaaaaacatcttacgacagttgccgttgcaacaggaagaatcaaagatagctttagaagacgatataccaaaggatgtgaaagatgctttcttgtctctaccatcacacgagcaagatcaccaagatgctctaaatctgtaaacctttcatcgtttttcacattatcaaggtagatctcaagttgatgatcaagagatctacgctccacaaaactaaagtcatctggataaaactcggtcaatctcacgagcatggacttatcaaactgacgaaaagaatctatcggactcaaagatgacatgcaaataagtagttcagaattcaactcatcaaagcagtcattaaactcttgaagttgcatatctaagacagtgtagaaacaatccaccttatagtgatgcaagttggttataccggtctttttccttggtcttctagaatcaacaaattcttcctccattttaagcattccagtgttagttttctcgctaaaagaactaacttcagccataaaagcatcccatccatcgtctctaaccttttgcaactgacatttagtagttttcaccaatgaaatagcatttaagatatcttgatcttttctttgcaaagcctttgataagctatcagtgagtcccataacaagcaacatcaactccagatagaaaacaaaatcaaaggtgtgaaaatacttgagaataccatatgcttgttgtcttttggtggtgtcggtgccttcatcctggatatactcgagaactataactatagatgaaaacaactcctcaagacgcaacaaagtcttataatgtgaaccccaacgagtatttccaggtctttgaagggaaagttcttggttcaacccagttcctgtcttaatttcaccattgctaatcttttcttccactttttgccgatcgatttcccggatcttatcttttcttttgcaagaagctccaacaacatttagcaaaacagaaatcatataaaaaaactctccaacttcaacatgtttttttgcaactgccatgacaaccaattgtagttgatgagcgaagcaatgcacataatatgcagagctattttctttcaaaatcaatgatcttagtccattgaactttcctttcatgttgctagctccatcgtatcccttccctctcagctttttcaaactcaatccatatttagcaaacaaagaatcaatagcacttttcagagataaagaagatgtctcttgcacatgaataacaccaataaatctttctttaactaccccatacttatcaacgaagcgaaaaactactgccatttgctctttatctgaagcatcagccgattcatctacaagcaagccaaagacatcattatccatttcttcaataatagatctagttacctcttctgaaaagcaatggacaatatctttttgaattggtggagatgtcatctggttatttttaggagcatttttcaacacaactttctttacaacttcattctgaccagctgtatacttcaaaagctctaaaaattacccttatttgttgactcttctgattcatcatgaccacgaaatggtaatccttgatgtaacaagtgtcgagaaacatcaatggaagcattcaaccggattcgataatcattctccacaacattggtttgcttatggagagcagtggcggagccagaacaatgactcactggggtcaaaaaaaaattaaacgaaacgataaactttactataaacataacaatgtcattacaaataaaaactctaaagatgaactctacgttcactcatatcttggaatcgttttatcaccgattcgtttgtaacagtgttaagtacttgcttttcaataaaacaaacaagacaatcacttaagaacacatcaccgatacggttacgcaatgtagtcttcacaaaattcatcgcggaaatacatctttcgactgttgccgttgcaacaggaagaatcaaagatagctttagaagacgatataccaaaggatgtgaaagatgctttcttgtctctaccatcacacgagcaagatcaccaagacgctttaaatctgtaaacctttcatcgtttttcacattatcaaggtagatctcaagttgatgatcaagagatctacgctccacaaaactaaagtcatctggataaaactaggtcaatctctcgagcatggacttatcaaactgacgaaaagaatctattggactcaaagatgacatgcaaataagtagttcagaattcaactcatcaaagcggtcattaaactcttgaagttgcatatctaagacagtgtagaaacaatccaccttatagtgatgcaagttggttatacccgtctttttccttggtcttctagaatcaacaaattcttcctccattttaagtattccagtgttatttttctcgctaaaagaactaacttcagccataaaagcatcccatccatcgtctctaaccttttgcaactgacatttagtagttttcaccaatgaaatagcatttaagatatcttgatcttttctttgcaaagcctttgataagctatcagtgagtcccataacaagcaacatcaactccagatagaaaacaaaatcaaaggtgtgaaaatacttgagaataccatatgcttgttgtcttttggtggtgtcggtgccttcatcctggatatactcgagaactataactatagatgaaaacaactcctcaagacgcaacaaagtcttataatgtgaaccccaacgagtatttccaggtctttgaagggaaagttcttggttcaacccagttcctgtcttaatttcaccattgctaatcttttcttccactttttgccgatcgatttcccggatc

SEQ ID NO: 1053 - DNA, 82356 bp, Arabidopsis thaliana
aagcttgaagttagcttaaggaataagctaaccaaatcctaagtgattaggattagattgtatttaggagttatctacatacaatatttagtagttatctaatgttattaggagttatctaatagctagagttttcatataaatagagatgccaagttgtggtaatcctattgagaagtttagagtttgagagtttgagagctttagtgagagctttaggttttgagtaagtttcctaaagattaataaagagtgagtctttatatacaccattttcttgttctataaatcgatagtttcgagagtatatcgtagatctagttcgcttgtgtctaatacttgtgtgcttgggtattagttcgtgatcagttgtatcctgggattcaaaaattatgatgtccgaaaagcacttatgggcgatttattgaagtaaggaaaaagatatcatatcttgcctccgtgatttactttttgtccttaattactgttattgtaattttattgttatcgttatcttaatagaattcgtacttgtttctcaattcggtttttgggctattacaatcttaattcaataaatctgcttttagcttatcgctctagaaggattgagaatttttcgaattttttaaaacgattttaaaatcttctaaaaattgtttctgctatcatctttgggtgcttacgcggaaggtttatagaagaacgttattacttctttctttctcctctttctaaattgcttcgcaaacgctatgtagcgattgttatggacagtttcttatataaacttctctagtttccacgaacgctcatacttgagtgagtttgtgaaacgcgaaacaagtttttgcgaacgcttcttaagcgagtttgcaaaactaattcggtgtaatttagttacctgaattttttggttaatatactaatcaaatctgtttttctgtgaacagaatgactgatattaacaccaacaacgagatcgttggcaacaccacagttgctgagaccccggatgaggaagctttgcgccttgcgaaagagcttgaaaagacacagatcaccgattctgatatggataatgtgcgccgaaatctgttcggtaatggttcaaccaacactaccataccagcctctgtttcccaagggatgatgtcacacttgtttgatggcaaatccgggttcaaaacgtggcaagaaaagatgcgctactatttggtcagcataaacatggaaaggtacctcccagaggatccaccaatagttcctcaaggtaccacatatgtgtatacagttggaggtatggatacatgggctcaaggtgactattgttgcaaaggtctaatcctgaaccgcttgttgaacgatctgtttgacctctacagcaaggccaagtcttccaaaacactgtggctaactttagagaacaagtataagactgatgagtctagaatgcaaagattctcaactgcgaagtttctgaatttcaagatggtggactccaaaccaatcatggaacaggtggaggctcttcaacgtatctgtcaagagatagagttggaagggatgtcgatctgcaacgtcttcaagacgaattgcttgatcgagaagctaccaccgggctggtcagatttcaagaattaccttaacttcaaacgtaaggcaatgacttttgatgatctcatccgaaggttaatgattgaaggcaacaatcgtggggctcacgcgggtgctcagaatcaagggcatgatgttaatgtagctgagcataaggccaagctgaaaggcaagggaaaagggttctctattcctcagaagaacttgaaggtttcatcgtcaacaaacttcaagaagagcaatgctgagcggaagttctaaggaaagtgtcatcattgtggaaagattggacacaaggctgatgtttgcaagagcaaagccaaggatgtcaagagccaggcaaacctaactgaagaggatatggttgcagtggtcactgaatgtaacatggtggacgacaaccaagtgaagtggtactacgacactggtgcaaccacacacatctgcacagataggaccatgttctccacctatgtgaataacaagtcaaacgaacaactcttcatgggcaacacggcgatgtctaagattgaaggtaagggcaaagtggttctgaagctgacttcgggacgtgagcttactctgcaaaacgtgaagcatgtacctgacatgcggaagaatctcatctcttgaacggtgctaagtaacaatggctttgccgttaactttgagtctgataagctagttcttaagaaacatggggtgtatctgggaaagggtttcgttaaaggtggactggtcaaaatgtctgtaatgacagtctttccgaaaaatgtagcttctgcttctgttgtggaaatgaatgaaaatcctattgcttacttggtagagtcatttactacttggcatgaacatttaggacatgtcagttataaaacaatgcgaaaaatgcaaaacatgaatttaattccgaaattcaaaactaaccaaaaaaaatgtgaagtatgcgtacaggcaaaactcactaaaactcgctcaccacgagttaaaagaacaactgaacctctgggtttaattcacacagacttatgtgatttaaaatatgtgcaaactagaggtggtaagaaatactttgttaccttcatagatgattgcacaagatattgttatgtatatctattgcatagcaaagatgaagctctggtaaaattcaaagaatttacactcgaagtagaaaatcagcttcagagaactataaaaatagttcgaagtgatagaggaggagaatataatgagccattcaatgcattttgcagagaaaaaggtattatacaccaaacaactgctccttattcaccagaatctaacggagttgcggaacgaaagaatcgaactctgaaagaaatgatgaatgcattgttgcaggaatcagggttagcctagaacatgtggagggaagcttttcttaccactaactacatccttaataggataccacataaggtgactgcaaagtcaccatatgaactttggaaaggtacagtaccctcgtacaaatacctaaaagtgtggggtgtctagcaaaagtggctgtaccacctcccaaaaaggtcacaattgggcctaagattgtagactgtatcttcatcggatatgcgcacaacagcaatgcttatagatttcttgtttataaatcggatattccagatatccatgaaaatacagtcatggaatcaagaaatgcatcgttttttgaagatatttttccttgtaggaaaactcaaaaacgaactcgtgatcaacgagttgcagcaacatcggaagctgaggacaattctttgggtactattactgttgaagaaacagaacaggaacctgaagatcaacctaggcggagcaaaagagctcgaaaagagaaatctttcggtgatgatttcttgatggcgtttttagctggaaacgtaccaagaacttattcagaagccatgtcttcccccgatgcaccttattggaaggaagcagtcaatactgaaatagactctatcttgcaacatcatacttacgagatagcaaatctaccccaaagttctaaaccattggggagtaaatggattttcactattaaaaggaaaacaaatggtgatattgataggtacaaggctaggcttgtggtacaaggattttgacaaaaagaaggtttagatttctttgatacctattctcctgtaacgaaaataacttcaatcaggatgctcataggctttgcagccttaagagatcttgaaatacatcaaatggatgtaaaaacagctttcttacatggagatttggatgaggaaatctacatgaaacaacctgaagggtttgttatcccaggacaagaacacaaagtgtgtaaacttgtgaagtcactatacggactcaaacaggctcctaagcagtggcatgagaagtttgacagtgttatgatgtctaatgattttaccattaatgaatgtgataaatgcatatatttcaaaattactccaaaagggtacattttgttatgtttatatgtagacgatatgctcatcttggggagtaacacagatatcataaatcaatctaaaaacatgctcaaaagatattttgaaatgaaaaatatgggtctagcagatgttattctgggtataaaaatcatcagaactgatgaaggcattatcttgtctcaaacccactatgatgagaagatactcgatcgtttcaagcattactctaatgggactgcaaaaaatccagttgatcctcaacttcacttgactaaaaactctggtgaacctgtgcaacaggtaaaatatgcaagagtagttggcagtttaatgtacttgacaaacagtacaagaccggatttagtgcactctgtaaatgtacttagtcgctacacaagcaatcaaggatataatcattgcaaggctataactagagttatgaactacgtatgttataccaaagatcatggcttgcactatggtaaagaacctgcggttttggaaggttacagtgatgccaactgaatagcagattccaaaaactctaaatccactagtggatacatctttacacttggaagtccagcagtatcctggaaatctagcaaacaaactgtggcagccaaatcaactatggaatcggaattcatagcattggatacaactgcagcggaagccgaatggcttcgtaatttcttggaagacattccaatgtgggggatacctgtgcctgcaatacgtgtacactgtgatagccaatcagttataggcagggcacaaagtaccctatataatggtaaatctcgtcacatcagacgttgacataaaaccattcgacaacttatcttaactaaagtaatcacgatcgattacatcaaatcagttgacaacctagcggatccatttacaaaaggtttgaatcgagatcaagttgcaagatcatcaagaggaatgggtttaaagcctaccacctaagaggaagtttgatggtaaccccacctacaaagattggagatcccatgacatagattcaaagggacaactaaatcaaactaaatctgttataagcactgagagactgttgtctcttcctagttcctaaaataatgtacagtgcttcctgtatgtgtaaagattaagcatttgctttcaatgatttgaacctagctttgtaagatatgtgaagtatttacatgatattttttaaaatacaagcagctagtaaatcaccttgtgagtgtgaaatggggccgtttctaggagaatatgtgaggctatactctctaagttcactcatgattaaccaggcatgttcaaggccacaatgaacaaaaacaaagaaccacattctacgagaaaatgaagctgtgttatacttgctgtctaagtttgcatcaaactccggatggttaaagacatcatgttcaccatctggccgagtaaactcgacaggtactaacaatcagtaggttcaaagcagataaacgccaccaactcaaatacagttaattttcgtttatgctctcgaaggtctgtctagctagttgctttagtccttaggattagtaaagttttcatatgtttagacttatttctattcatgtgggggtttgttggaactttttttacttaaaatttttccggtgactttccggccaaattccagccaaacggctgaacagaattatcgggtcattagtgcattggaaagctggtaaagagtactacaaaatggtatactcatacgtcaaaaacggagttgtattgaatgagaaataatggtgtaaagtgggatacttgggccaaaccggaccaaaccgaaccgaaccgggctgaaccgggctgcgggttgtcgggacgtcccgtcgtcggctcaagggctgtcgggcttgcggaccgtcatgcttgtgagttattgggcttgctgagttgaatcttatggaaatattctcaggatagtcataaaatattctcaggataggatagtctcagaatattctcaggatagtctcaaaatatgtcatgcttatcctaagaatattctgcaaaatcctatctccctctactatataaagagacccagcctctcattatttctcaagctctcaaacacaaaacactctaaattctaaagtctctcctctctctctattgcttcttaaaagtaagttcttagtttagttgtttcgagagtatatcgtagatctagttcgcttgaatctaatacttgtgtgctcgggtattagttcgtgatcggttgtatcctgagattcaaaaattgtaatgtccgaaaagcacttacggccgatttattgaattaaggaaaaatatatcatatcttgcctccgtgatttactttttgtccttaattactgttattgtaattttattattatcattatcttaataaaattcgtacttgtttctcaatttggtttttgggctcctacaatgtataccctgtcccggtaccactcatatttactcaagttggtcgtcctagtggcaaaagaattgacttttggttaaatgagagagattaccaatgcgcacatgcatatgttttgcgtaattgtgaatattttcgcccgcttgaaaggtattctattttaaccaagtaataaaactttgaaaatctctattttgtaattaataatggaagatcttcgacatgtttgataaagcagtatgttggatgcgcaaattcggaatgaatatccagaactctctgatgatgaggttgcgtcgaaaagagatgaagattttcatatatggattcgccaatatgtagtcaaatactaccgatcatctctctgatatcctacaaattaaaagtgtacgtttacttctttattttatgatttatcagatttttatgtaggtggaagcaacgcgaagtcatcaaagtttccctccatgggtttatgaaatagtagaaggtcctgaaaacaaagtcaagtcttggcccatgtattttacaagagcgtatatgtttcacacgcaggatcatgggcgtaccaataaaataatgaattatggggtatgtgttcgaggccaaaattattctgaagcatctcatgaagaagatgtttatgggatcgttgaaactataatcaagctcgagtatccaggatttgttaacttaaagatcacacttttctactgtcaatggtttgactcaaaagttgggaaaagaattcgtatgagaaatggaggggttgtagacgtgctagaataagggagatatccaaattatgaaccatttattttaggtaaattttaaatttctttagtaagtgatttgtaagaaattcatatttcagttaaaattttaaaatgtcggttttttacagtgtctcaagctgatcaggtttgttatctttcttacacgaacatcaaacgacttcgaaaatcgtggctttcagtttagaaagtcaatccaaggaatgttgtccaagggaagtttaccttaaatgatgtggttgcattgcaacaatccgttgatgaaacaactctgagcataattgaagaaattatcgttgagagcttagctgaaacaaaccatcaagatgaacctattgattttgatattgaagatgctgaagaaggagatgaatttcattgtaattcatcaacatctgaggatgaagatgaagaagaaccagatgatgaacaatcagaatattttgaatggacatgattttaatgtgtatttgtaagaaaattataaataaaatattattttaatatctctttaagtacttatcttcgaagatgaaaatcatactattggccagcccagttggtcacatactagcccacaatcttatacgatcgcggttcgattccatttgacccctttttttatttgaaaaactttattattcgtcacaaaacggtcgctctttgcaacttatttgcgaccaatgaaagttacagtcgcactttgcaactgattacctacatattaccaacactcatttttgcatttcgatatttttaagtttttgtctatgtatatgttttcttatacgttgttactttaatttgattgaaattagatataaaatcataaccaaactcttcaattctgaattttacaaactaaacattcaaaacttcctaatctatatgaagagttacatgttctttgattaacatgattgatattttcaaacaagttccaaaataagttatgaaagcaatgatttataaacctaaacatatgtatgtactttatatcacaaaaatggatgcacaaacacttagctggtcagaaatattttatgcaagttcttcaagaaatggtaacagttttctttccaacaattcccttaacagcttttctattattacttccatgattttaatctgtttgattttctttgtcaggaagaacagttgaagcggcgagtatcatttggcgaagtgttcatgaaaactcatacaagggttgatggaacttttgtagatcagaagtctcagcatgttggtgaggcttacatgaagatgctcgaagaaaggatgtctgaaattgacaaggatggtcctcaaatttctggtaattcctcgcagcattcaactcatcgtatgctcagcattgatgaaaagaatgagattttttttaaagtaattttctgtttttattttgcttacaatctgcttgtctttgtttgcttggaatttatgagcaatggatacttaaagtaatgatgattgtctttggtgattgtaattgtcttattgtttcagtgtactcttacagatggcaaagggaacccttttggccttggatcacttgtggagactctgaacaaaagaagaaggacggagagttatgcgagctcttcatcaacagttgcacagcttcaagagcagctgcagctcaagatgtctgaacaagcggagcaaaatgcaaaatgtgatgaggagcaccgccaatctcaatctcggatagccagcttggagaagctcgtcctcttcataaaaaaaaaagatcccgagttggatgcttatttgtcttcagattctacagatgttgaaccagtcacacttccaaccaccacacaccacacttccaaccgccacagccaaccaaccaaccatcacagaagcaggcaccaaaggagacaacagattaggcaccacacccttagtctctacttcagttactttgtctaacactgcttctaacaattaaacttgatcttttgtagcttttgttgaacttgttaggatgctaatcttttgttgcttttgttgaacttgttaagatgataatatttaggtttcactatgattttgtgaatgtaaacttgattactgttcttaatggtatttaactagcatcattggctttttaattcaatattaatcaggtttatcattccaaatatacgacaatttgtgactaaaccaaaacaaaaaatgtgactaactagtgaccaaaccactttataaaccagtgaccctttcgtcaccaaacttactcccactatgtgacaattatgtgacgaatttgtgactaaatcaaattatacaaatatgactaatgtggcacaagcgtagcaaaagtgttacaattttgcgatgaattttaaagcgccttaacttcgtcgcaaaaaggaaagactattttccgactaaattgtaactaagtgtatgaaccgtacctcagtgtacctcgttgcagtttagtcgcatatctgcaacttcttgggatcgtcacaatacagtcgcatatttacgactaacagaacgcgtccgcaattcgtcgctaatcggcgaccattttgcgactttattatttagcgacggtttaatatcgtcactaagtagtcgtaacaaccttgtttgcaaccattttgggactaatattggagttgcaaattgcaggttttcttgtagtataattgttgtagtctcttcctttctcttaggttttcggaaaatactgctaccttttctcttaggttttccccaaatactgcaatcttcatctatctcactgtcttcaacgacgagattcacaatatcttctgttagaacatgaaataaaacaagtaaaattcaggcttcttgaccacaaacttattgagtcactttagtagtaaagaaatatctttactcacctgaaaactcaacttgcgactgagacatatctttagcatcagaagagactaatttcatttcctttgtaccattactttctccaagaaaagcaaactcaagaccatcgcttgtatgtagcatcggtgactcatagacataactcgaacactacttacttagatcatgaacttctgagaattttgaaaatagaagtgacgaaccacataagtaaaatgaaccaatagatctagggatgtataatcataggaaaagagtgaagaggtgaaggagagctaaggagaagggaggaatgaaggaagaatcaaggaagaggaagaggtaagagaagagagcgaagaggatgaagaaaatagaaattagggtttgatttttattttgagcttttttcttattttgggctaagtattggcggcatagggaaaatatttggttaatgttggcgattataagtaattttagttttgattccgtaattatagggtttagcgtttctgaaatgctataatatagttatcaaaattcaagtaccatctatgatagcagttacggaaaatacgctatcgtaatatgctatcaatactcatatttcttgtagtgatgatggaggagttttaataacaaattttcagtttacaaacacctctttctctgcatattgtattgtcgtaaacaactctttgactgaccaactagatattgacccgtggtacaccgcatgttgatattttctttaaaaagttaattttttttttaattaatattatttatttatgaataacatattcaagagatacattatagttctataattttattttatttttttgattttttgtctttaaaataatttatatatataggctattgtttattgaagtatgatacaccttgtgacgatttttataactaaagattatatttaattttaaattatatttgttgtgttaatattatttgttttgtttagtgtttacaattgtataattatattttgattgttaattctagggtttcacccatagtataccatcccataataatatcgatctagacttgtcccatatgaccatgtcgcatgaaattaaacatcattttattatttcttataaaattcaaatactataaatatttgaaacttcaaaaaaaaaatattgatctaaactttataattgtattttgattgttatatctaagatttcacctatagaatatcatctcgtattaatatcgacccaaatcattcttaccatataactttgtcctatgaaattaaacatcattttgtcatagttttataaacttcaaatatttatactaatagaactaacgaacgttactgtaaatgataaccaaaacatagaacaaatagtaacaaaaatttaaaaataaataaattattttctaaattaaatatataatattaaacgaacataaatttaatttttaattaataaatatttaatttgttttcttgtttgttcctcatcaaatttgggaagaaacaattttcttctacgattcctcaaaaaataaggaatgattaggaataatgtggggtccacatgttacaatttggaaaaaaaaatttagttgaatggtgaaaaaaggggaacaataaggaacatgtccttcctgtccattccttaccttaaaaatggtcaccaatcggaccctttaaagtttcaatccttcaaaaaaaagaccagagtaaaccggttaacattcttaattttggatgcctgataaatctaagctttctgctcattcgtattcagaatcattttaattctttttatagtatgactttgaaccattgcccagttttttaagcaatgtgggaccttgtacaaatattttgttttctttatcgattgagtaatgtatatcagctttttaaaattgaattacataatatgcagaaaaatctaacatttattaattatatatatttttatataaaatcaaaataatttagaaataagaacaaataaaagtgaaagaagaatttatatatttatatttaatgtaggtaaatatagaaatgtagtgcaataaagataaactttaattaaggatataaatctaagaaaatatattcttaaaatagatttggtagggactaaaaactaattattatttacttttggactaaaatttcgctggaggatattttatgcaataactcaattataattattcacaaatgggatgttaagaaaggaaaatatttatgtaaatgtttaatgttgattgatgatttgtaagttttgtactttaaaatattttgtttagatattttttgtagggattaaaaactaaataatatttacataaaggattttttacaaaagcttcaccaaaaatgtataggtagaaatattattttgttcaggggttggtaacacagcttatgacacaaacttagacaaatatacactcaatagtatctctcttcttgtggacttgctggttttggaaggcgaggaacgctctactcttctccacttcctcgttcacggagaatgaaatagttgacaaagcttaggctgaagcgaagtgttgtcaatcagctcaagacaggacgttatctcaagtatttccatcagtaaactctagagaacacttaatttcttcttcctctgccccaatcgtgtgttacacagatgctgcgtggaatgcaatctcttttaatgctggtctcggctggtctttccgttctaatacgactccttcagaaagtactatcaccagagctgtgactcatcgatccgtggtttcttcagcgattgaggcggaagctctggcgattctggctgccctaacgcaagctcgctctcttggttttagggatatttaagtcttctccgactgccaagccctgatttctatcctgaattcttctgagattcacattgagatttatgctaccttaatggatattcgagctctttgtgcttgtttccactttgtaggtttttcttttattcctagttcagccaactgtgaggctgatttgctagctaaacatgccctttgtgcatttgaatccaactctgtaccgtgagtttcactacctaatagaatctccttatgacaaaaaaaaaaaatacactcaatatcgatcgtgcaatatgtagactttttgtttttttctatattgtagaagacatgtagaaaagcaaaagtcttactctggtgtcaaaagaagcaagcaaagtggtcacacccaccacccatccaagagctcttcggctaatttcatcctttaaatacaattcaattgcagtttacctaaaataaaaagaagaaaagcagtgatagaaaaaagtacatatttttaatatgttttttctatctttattggataacatgttaaacttgattggattagagtgtatgcaatctttctcttaacttctatcttctatttagctagatttacacccacaatccttatgcgacaatgacttaaacttaaaacaaaatcttcatcgcacatcttcttagaaccagtgatgagtacatcacatttcctcctctctggtttttgctctaaacctttatagtatgtacatgggagatctcctaaacagtagcaacagatctcccatttgctatgtttttttgttttttcttcttttttttttatttatatagagagcagaaaagaacatgtggtttcaagtgtcctctccagcacatagaaagtatcatcactccagttaccaataacctaaggatattacataaaaataggtgataaatgtggaatagtgtatttattagactgtatatatagattcggtttagaccggttaacttagattgtatttacaatgtatatggtttagattggtttagtgtagagtatataaacatccaattgtacattctgtttcgattgagaaatatagaaaactttcacatatctctttgattcatgttctctatcatggtatcagagcattttctgcgtttttccagttggttttattttcaatcttcaattcttactcagtttcttcgattattcacttctctttacatcgattgttcttccgcgcgatcgattttggtgaaaatagagaacaaaggtgggaaaatgaagaatctcagtgatactcctgacgatggtggttttgttgctcgatctactcgtaactcgatgattgctgaagatcctgaagttgcgagagctcaacaacaactcaatcgaagattcgaaacttcggtaatgactccaacttattgatagtgttttatgttcagataatgcccgatgactttgtcatgcagctccaccgattttgagaacgacagcgacttccgtcccagccgtgccaggtgctgcctcagattcaggttatgccgctcaattcgctgcgtatatcgcttgctgattacgtgcagctttcccttcaggcgggattcatacagcggccagccatccgtcatccatatcaccacgtcaaagggtgacagcaggctcataagacgccccagcgtcgccatagtgcgttcaccgaatacgtgcgcaacaaccgtcttccggagactgtcatacgcgtaaaacagccagcgctggcgcgatttagccccgacatagccccactgttcgtccatttccgcgcagacgatgacgtcactgcccggctgtatgcgcgaggttaccgactgcggcctgagttttttaagtgacgtaaaatcgtgttgaggccaacgcccataatgcgggctgttgcccggcatccaacgccattcatggccatatcaatgattttctggtgcgtaccgggttgagaagcggtgtaagtgaactgcagttgccatgttttacggcagtgagagcagagatagcgctgatgtccggcggtgcttttgccgttacgcaccaccccgtcagtagctgaacaggagggacagctgatagaaacagaagccactggagcacctcaaaaacaccatcatacactaaatcagtaagttggcagcatcaccgaaacttctgaggtccgtggatcgatgttgaagaacactgactctttcgacaatcaattggttctccattcatagaatcatccaggtttaacgattgtatctcatattcttgatggaactaattacaacagttggtcgattgcgatgaaaattagcttagatgcaaagaacaagctaggcttagttgatggatcgttgttgagaccttctgaggatgatttgagtttccgcatatggagtagatgcaatagtatggtgaaatcatggattcttaatgtcgtgaacaaggagatctatgatagcatattgtattatcaggatgctatggaaatgtgggatgatctattcactaggttcaaggttactaatctgccaaggaagtatcaacttgaacaggctgttatgacactcaagcagggagatctagatttgtcagcatacttcattaagaagaaaacattgtgggaacaactgtcaaacacaaggattcgtactgtgaagaaatatgattgtgatcaggttaaagaacttcttgaggaagcagagacaagtcgtgtgattcagtttttgatgggattgaatgataatttcaataacattcgtggttagatattgaatatgaaaccaagacctggattgaatgagatctataatatgctagatcaagatgagagtcaaagaattgttggatattcaagacctgtggtgtctactccttcaccctttcaagctcaggcaattctcactgaacaaaacaatattctgatggcacaagggaattcacagaaacctaagtgtctcattgctttcgtgttggtcatactatggacaaatgttacaaagtacatggttatcctcctggtcatccaagggctaagaagaataattatgtgggcagtacaaacatgaccagttcagattcagtggtgtctcagaatgattctatggttattcagaaagagaatttgcttgaagagaagaatgcagacatgtcaccacatcaacttcaacagatgatctcttatctaagttccaagctccaatcaaatactgtctttccatctcctgataagtctatagccttgtcttcaaatcccgtacaatctatctcacagataactggtacatttctctctctctatgatttctcttactatgacatgttgacttcatctatacctcatgaaactgagttgtctcatagagcttgggtaatagattcagggggtagtcttcacgttacacatgaaagggacatttatgtagattacaaagccttagatagaacatttgtccggttacctaatggtcaggctgtgaaaattgagggtgctggttatattcaacttactgatgctttgtctttacataatgtgttgcatatccctgaattcaaatttaatttgttaagtgtgagtgttgtgactaaatctttgaattctaaagtcaatttcacttctgatgcttgttatattcaggcacttactcaggagttaatgattggaaacggtagtcaagttgcaaacctatatgtcttgaatgttgataagtctctttgtcatgtttctgagtcttctttacaaggtctgtctgtctatgctagtgttcatgttgaacctgatatgtggcataaacgtttaggacatccatctttgaataaaattgatactctttctgaagttttatctttgtctaaacagaaaatcaataaaacatctcatcattgtcatgtttgtcatcttgcaaaacagaaacatttgccttttaaattgtcgaatcacatgcgtaataaaccgtttgaattgattcatattgacacatggggtccgttttctgtacctactgtagatggttttagatatttttttacaattgttgatgattttagtcgtgctacatggatttatatgcttaaacagaaatctgatatcttacatgtttttcctggttttcttaatcttgttgaaactcaatataacactaaagtttgttcagttaggtcacatcatgctaatgaattgaaatttacatctttatatctggaaaaaggaattaaaagttttcattcttgtcttgaaacacctgaacaaaactctattgtagagagaaagcatcagcatttgttgaatgtaactagggctctcatgtttcaatcatgagttcttttacaattttggggggattgtgttttaacagcagctttcttgattaatagattaccttccccagtcttggaaaaccaaactccttatgaaagattaactagtgaaaaacatgattatcaatctcttagaacctttggttgtttatgttatagctccacatcccctaagaatagaaccaaatttgatcctagagctagagcttgtatttttctaggttatacatcaagttttaaagggtataagctattagatattgagacatactcggtttttgtttctagacatgttatatttcatgaggaaattttccctttttcatcatccactatctcagatgatgtaaagaacttctttcctcatttttctcttcctgcaccaaatcatgatggacatctgcctctagtgcaaccatcttctgatgctcctcaacatcaagatgagacatcttctcctatttttattccttctgaatctaaatcgaataggcagggaaaactgccttcccatttgcaggactttcattgttatactactaatactcttaataccctatctaaaacttccccttatccactagcaaactaaatctcttattcttatttatctgagccttccagtgcttttattaacaccatcaccaaaataaaaataccgcaaaagttttcagaggctaagaatgacagggaatggactgatggtatgggtaaggagattgacgcttttataagaactgaaacttggagtatctgtgacttactacaaggaaagactgctgtgggatgtaaatgtgttcttaccattaagtttcatgcagatggcagtatataacgatataaggccagacttgttgcaaagggatatactcaacaagagggcattgatttcattgaaactttttcccagtagcaaagatggctacagttaaggttgtgctttctttggctcctaaaatgcaatggtctttgcatcagttagatgtttctaatgcttttcttaatggtgacttgagtgaagagatatacatgaagctacctcctggttatggagagttgatgggagtagaagtttctcctactgttgtttgtcgtcttcacaagtcaatatatggtttaaaacaggcttctcgccaatggtttttgaagttcaagagtactttggtgaattttggatttgagacgtgtcatggtgatcatactttgtttatgaaagaggctaatgggcattatttggtagtattggtgtatgttgatgacattttgattgtgagtactcatgatgaagttgttgtggagttgaagtcacaattgagttctgcttttcaactcagagatcttggtcctcctaaattctttctaggcatagagattgctagaaatgaccaaggtattactcttaatcaacggaagtatgttctggatttgttgactgctacaggtttttctgattgcaagccgtcttcgatacctatggaacctaatcagactctttctcaagaaactggtgttgttcttgctgattccaagcagtatcgtcgtcttattggcaagctccaatacttatgcatcacaagacctgatattactttcgcagtttcgaagcttgcacaattctcatctgctccaacggatattcatcttgttgctgttcataagattcttcgctacttgaagggatctattggacaaagtttgttttatggaacagatacaaattatgatttgggaggattttcatatgctgatggagggacttgtccagatagtagaagaagtgtgactggttttgccatttttataggttcttcattggtatcttggagatcaaagaaacatgatgttgtttcaatgagtactgctgaagctgagtatcgggcaatggctgttgctactaaggaactcaaatgggttggttatctcttgacagctcttcctttcaaagcatcggcttacttatactgtgataatgaagcagtcttgcacattgctagcaattttgtgtttcacgagcgaactaaacactagagcgtgattgtcacaaggtaagagaatgtattgaagctgggattctcaagactatgtttgttcgatcagataatcagcttgcagacatgtttactaaacctctttatccggtgctctttagaactaacaatagcaagcttggagttcttaacatctttgaaactcaagcttgagggggctattagactgtatatatagattcggtttagaccggttaacttagattgtatttacaatgtatatggtttagattggtttagtgtagagtatataaacatccaattgcacattctgtttcgattgagaaatatagaaaactttcacatatctctttgattcatgttctctatcagtatttgcttgcaaagtcgaaattatttcaacacttttaccttaacggttttgtcatcgtacatgatccaacaatccacatatataactcaactgaaatggaattagggcatcaattggataaagaaaactatgagtacagatttatatccccaatgaatacatgaaggaaccatggtgaaatatcattgaggatctcgttcctatttctggcttacttccggatgcactaacctttccaactcatgcgttcacttgatcacctcttctcttgatttggtcagcatgaagatcttgtttatcaccatgctctgtgatttttcataaccacacagaagataatgaatcaaattatgtaagaccgaaggaaatgaaagtagcttcaaaccgaaggaaatgagaagaatgaatgcttgagaagcgtacctaaattctgcatcaaaaaggacaattgttcatcaaaaaggttagggaaaaaccttcggtgatgcacttaagggagatgtggagaggtgtcgtttatgagataaatggtaggaaggggaaacgattgaactttcttggacattattgaaaaccctaatttcttagactaaagattctatgtcgagagaagtctaaaagttaatgacgtggctgtacttgggaagaattttgagttagaaagagagtaatatgacgtggctttttcattaagttaactcaataatacataaatattgtttcatgtcgttaatttactgaatgtataattatgaatttgctgatgtggcatgattttaggtagtcttgaatttgctgatgtagatggtttgagaagccacaatgagcttcttttattagtaagagattggtttagaaatatttttaaagagaaatttctaacaaaatcttacatgtatgtttcttatctcctaccgctaccaccactttcctagatttattagcacgtgacacttttaggatacaaggaattgaacatgcatttgttagaaccgttgaataacaattcataaattatttttaagtactacataatttgtttccaatgggaaaagtaattaaaaaaaagaaaaaatagaaaaaggcgccattaaaagtagtaaccaacatatactttaaccgatggctcaaaaacttcgttctcttaacaggtgtgggtttcctcgcaattgtcttgcaaatttgcgagggaaatattcgtcgcaaagtttgcgacggaatagcgagttggtcctgttctttcggagagatctattcgtcggcgaagaagaggtttgtcggagagatctattcgtcggcgaagaagaggtttgtcggagagatctattcgtcggcgaatttgaggtttgtcggagagaacaattcatcggcgaatttgagttttatcggagagaacaattcgtcggtgaaaacgaagaggtttgtcaaaatgaaactgaaaccttaatttttcagtaaggttaagaccgttatttaccacattagaaggggcagttttaaaaatggccatcaggaaagggcattgttgcaaaaggttattagaaaaggcacttttgcaaatctcccttttgattgttatatataagatttcacctgtacaatatcatcccctattaatatcgacctaaatcattctaaccatataaccccgtcctatgaaattaaacattattttgtattagttttatataaacttcaaatatttataataataaaactaacgaatgttactgtaaatgataaccaaaacattaaacaaatagtaaggatatttaaaacgtgttaacctaacccgagaagactcgcaactccgtcgcaaaaattgctacagaataagttatcgtcgcaagtgcgtcgcaatttgcgggggaactcagtttcccgcaaagccctcgcagacttgcgacgttttgcggggaatcatggcttctacgcagtttcctcgcaattgtctcgcaaatttgcgagggatatactcgtcgtaaagttcgcgacggaatagcgagttggtcctgttctgtcggagagatctatttgtcggccaagaagaggtttgttggagagatctattcgttggcgaagttgaggtttgtcggagagaacaatttgtcgacgaatttaagttttattggagagaacaattcgtcggcgaaaacggagaggtttgtcaaaatgaaagtgaaaccctaattattcagtaagggtaagaccgttattttccacattagaaggggcaattttaaaaatggctggcattgttgcaaaaggttattagaaattggcacttttgcaaatctcccttttgattgttatatctaagatttcacctgtagaatatcatcccctattaatatcgacccaaattattctgtccatataaccctgtcctatgaaattaaacatcattttgtcttagttttatataaacttcaaatatttataataagagaactaacgaatgttaccgtaaatgataaccaaaacataaaacaaatagtaaaaaaatttaaattgtgttcacctaacccgcgaagactcgcaactccatcggaaaatttgctagagaataaattatcgtcgcaagtgcgtcacaatttgcgggggaactctgtttcccgcaaagccctcgcaaatttgcgacgtttttgcgggaatcatgacttccacgcagtttccttgcaattgtcttgcaaatttgcgaaggaaatatacgtcgcaaagtttgcgacggaatatcgagttggtcatgttccctcggagagattcgtcggcgaagaagaggtttgtcggagagatctattcgtcggcgaatttgaggtttgtcagggagaaaacaattcgtcggcgaatttgagttttatcagagagaacaatttgtcgacgaatttgagtaggtttgtcaaaatgagagtgaaaccctaattattcagtaagggtaaaaccattattttccacattagaaagggcagttttaaaaatggccatcagaaaagggcattgttgcaaaaggttattacaaaaatggcacttttgcaaatctcccttttgattgttatatctaagatttcacctctacaatatcatcccctattaatatcgacccaaatcattctgaccatataaccccgtcctatgaaattaaacattattttgtcttagttttatataaacttcaaatatttataataattaaactaacgaatgttactgtaaatgataaccaaaacattaaacaaatagtaatgaaatttaaaacgtgttcacctaacctgcgaatactcgcaactccatcggaaaattcgctacaatataagttatcgtcgcaagtgcgtcgcaatttgcagggggtctcagtttcctcgcaattgtctttcaaatttgcgagggaaatattcgtcgcaaagtttgcgacggaatagcgagttggtcctgttccctcgaagagatctattcgctagcgaagaagaggtttgtcggagagatctattcgtcggcgaagaagaggtttgtcggatagatctattcgtcggcgaatttgaggtttgtcgcagagaacaattcgtcggcgaatttgagttttattggagagaacaattcgtcggcgaaaacaaagaggtttgtcaaaatgaaagtgaaaccctaattattcagtaggggtaagaccgttattttccatattcgaagggacagttttagaaatggccatcaggaaagggcattgttgcaaaaggttattaccaaaatggcatttttgcaaatctcccttttgatttttatatctatgatttcacctgtagaatatcatcccgtattaatatcgatccaaatcattctgaccatataaccccgtcctataaaattaaacattattttgtcttagttttatataaacttcaaatatttataataagagaactaacgaatgttactgtaaatgataaccaaaacatagaacaaatagtaaggaaatttaaaacgtgttcacctaacccgcgaagactcgcaactccatcggaaaatttgctacagaataagttatcgtcgcaagtgcgtcgcaatttacggggaaactcagtttcccgcaaagccctcgcaaatttgccaagtttttgcggggaatcattgtctcgcaaatttgcgagggaaatattcgtctcaaagtttgcgatggaatagcgagttagtcatgttccatcggagagatctattcttcggcgaagaagagatttgtcagagagatctattcgtcggcgaagaagaggtttgtcgaagagatctattcgtcggcgaatttgaggtttgtcggagagaacaattcgttggcgaatttgagttttatcggacagaacaattcgtcggcgaatttgagtaggtttgtcaaaataaaagtgaaaccctaattattcagtaaagggtaagaccgttattttccacgttcgaaggggcaattttcaaaaggctatcaggaaagggcattgttgcaaaaggttattagaaaaagggcacttttgcaaatctcccttttgattgttatatcttagatttcacctctagaatatcatctcgtattaatatcgacacaaatcattctaaccacataaccccgtcctatgaaattaaacatcattttgtcttagttttataaacttcaaatatttataataagactcgcatcctagaccctaacccgcgaagactcgcaactccgtcgcaaaaattgctacagaataagttatcgtcgcaagtgcgtcgcaatttgcgggggaactaagtttcccgcaaagccctcataaatttgctacgtttttgcggggaatcatgacttacacacagttttctcgcaattgtctagcaaacgtgcgagggaaatattcgtcgcaaaatttgcgacggaatagcgtgttggtcatgttccctcggagagatctattcatcggcgaagaagaggtttgtcggagagatctattcgtcggcgaagaagaggtttgtcggagagatctattcgtcggcacatttgaggtttgcggagagaacaattcttcgtcgaatttgagttttatcagagagaataattcctcggcgaatttgaataggtttgtcaaaatgaaagtgaaaccctaattattcagtgaggataagaccgttattttccacattagaagggacagttttaaaaatggccatcagaaaatggcattgttgcaaaaggttattagaaaaagggcacctttgcaaatctcccttttgattgttatatctaagatttcacttgtataatatcatcccgtattaatatcgacccaaatcattctgaccatataaccccgtcctataaaattaaacatcagtttgtcttagttttatataaacttcaaatatttataataagagaactaacgaatgttactgtaaatgataatcaaaacatagaacaaatagtaaggaaatttaaaacgtgttcacctaacccgcgaagactcgcaactccatcggaaaatttgctacagaataagttatcgtcgcaagtgcgtcgcaatttacggggaaactcagtttcccgcaaagcccttgcaaatttgccaagtttttgcggggaatcattgtctcgcaaatttgcgagggaaatattcgtctcaaagtttgcgatggaatagcgagttagtcatgttccatcggagagatctattcttcggcgaagaagagatttgtcagagagatctattcgtcggcgaagaagaggtttgtcgaagagatctattcgtcggcgaatttgacgtttgtcggagagaacaattcgttggcgaatttgagttttatcggacagaacaattcgtcggcgaatttgagtaggtttgtcaaaataaaagtgaaaccctaattattcagtaaagggtaagaccgttattttccacgttcgaaggggcaattttcaaaaggctatcaggaaagggcattgttgcaaaaggttattagaaaaagggcacttttgcaaatctcccttttgattgttatatcttagatttcacctctagaatatcatctcgtattaatatcgacacaaatcattctaaccatataaccccgtcctatgaaattaaacatcattttgtcttagttttataaacttcaaatatttataataagactcgcatcctagaccctaacccgcgaagactcgcaactccgtcgcaaaaattgctacagaataagttatcgtcgcaagtgtgtcgcaatttgcgggtgaactcagtttcccgcaaagccctcataaatttgctacgtttttgcggggaatcatgacttacacacagtttcctcgcaattgtctagcaaacgtgcgagggaaatattcgtcgcaaaatttgcgacggaatagcgagttggtcatgttccctcggagagatctattcgtcggcgaagaagaggtttgtcggagagatctattcgtcggcgaagaagaggtttgtcggagagatctattcgtcggcaaatttgaggtttgcggagagaacaattcttcgtcgaatttgagttttatcagagagaataattcgtcggcgaatttgagtaggtttgtcaaaatgaaagtgcaaccctaattattcagtgaggataagaccgttattttccacattagaaggggcagttttaaaaatggccatcagaaaatggcattgttgcaaaaggttattagaaaaatggcacttttgcaaatatcccttttgattgttatatctaagatttcacctgtagaatatcatccagtattaatatcgacccaaatcattctaaccatataaccccgtcctatgaaattaaacatcattttgtcttagttttatataaacttcaaatatttataataagagaattaacgaatgttactgtaaatgataaccaaaacatagaacaaatagtaaggaaatttaaaacgtgttcatctaacccgcgaagactcgcaactccatcaaaaaatttaccacagaataagttatcgtcgcaagtgcgttgcaatttgtaggggaactcagtttcccgcaaagccctcgcaaatttgcgacgtttttgcggggaatcattggctcgcaaatttgcgagagaaatattcgtctcaaagtttgcgatggaatagcgagttagtcatgttccatcggagagatctattcgtcggcaaagaagagatttgtcagagagatctattcgtcggcgaagaagaggtttgtcgaagagatctattcgtcggcgaatttgaggtttgtcggagagaataattcgtcggcgaatttgagttttatcggacagaacaatttgtcagcgaatttgagttttatcagagagaacaattcgtcggcaaatttgagtaggtttgtcaaaatgaaagtgaaaccctaattattcagtaagggtaagaccattattttccacattagaaggggcagttttaaaaatggccatcagaaaagggcattgttgcaaaagcttattacaaaaatggcacttttgcaaatctcccttttgattgttatatctaagatttaatctgtaaaatatcatcccgtatgtatatcgacccaaatcattctgaacatataaccccgtcctatgaaattaaacatcattttgtcttagttttataaacttcaaatatttataataagactcgcaatcctagaccctaacccgcgaaaactcgcaactccgtcgcaaaaattgctacagaataagttatcgtcacaagtgcgtcgcaatttatgggggaactcagtttcccgcaaagccctcgcaaatttgcgacgtctttgcggtgaatcatgacttccacgcagtttcctcgcaattgtctcgcaaacgtgcgagggaaatattcgtcgcaaagtttgcgacggaatagcgagttggtcatgttccttcggagagatctattcatcgaagaaaaggtttgtcagagagatctattcgtcggcgaagaagaggtttgtcggagagatctattcgtcggcgaatttgaggtttgttggagagaacaatttgtcggcgaatttgagttttatcagagagaacaatttgtcggcgaatttgagtaggtttgtcaaaatgaaagtgaaaccctaattattcagtaagggtaagacagttattttccacattagaaggggcagttttataaatggccattcggaaagggcattgttgcaaaatgttattacaaaaatggcacttttgcaaatctcccttttgattgttatatctaagatttcacctgtagaatatcatccagtattaatatcgacccaaatcattctaaccatataaccccgtcctatgaaattaaacatcattttgtcttagttttatataaacttcaaatatttataataagagaattaacgaatgttactgtaaatgataaccaaaacatagaacaaatagtaaggaaatttaaaacgtgttcatctaacccgcgaagactcgcaactccatcaaaaaatttaccacagaataagttatcgtcgcaagtgcgttgcaatttgtaggggaactcagtttcccgcaaagccctcgcaaatttgcgacgtttttgcggggaatcattggctcgcaaatttgtgagggaaatatttgtctcaaagtttgcgacggaataacgagttggtcatgttccctcagagagatctattcgtcggcgaagaagaggtttgtcggagagatctattcgtcgacgaagaagaggtttgtcggagagatctattcgtcggcgaatttgaggtttgtcggagagaacaattcgtcggcgaatttgagttttatcggagagaacaattcgtcggcgaatttgagtaggtttgtcaaaatgaaagtgaaaccctaattattcagtaaagggatagaccgttattttccacattagaagggcaattttcaaaatggctatcaggaaagggcattgttggaaaaggtaattagaaaaagggcacttttgcaaatctcctttttgattgttataccttagatttcacctgtagaatatcatctcgtattaatatcgacccaaatcattctaaccatataaccccgtcctatgaaattaaacatcattttgtcttagttttctaaactttaaatatttataataatagaacaaacgaatgttacaataaatgataaccaaaacatagaacaaatagtaaggaaatttataacgtgttcacctaacccgcgaagactcgcaactctgttgcaaaatttgctacagaataagttatcgtcgcaagtgcgttgcaatttacgggggaactcagtttccgcaaagccctcgcaaatttgcgacgtttttgcggggaatcatgacttccacgcagtttcctcgcaattgtctcgcaaatttgcgagggaaatatttgtcgcaaagtttgcgattggtcctgttccctcggagagatctattcgtcggcgaagaaaaggtttgtcggagagatctattcgtcattaggaaagggcattgttgcaaaagattattagaatatcatcacgtattaatatcgacccaaatcattctgactatataaccgcgtcttatgaaattaaatatcattttgtcttagtttaagaacttcaaatatttataataagactcgcaaccctaaaccctaaccagcgaagactcgcaactccgtcgcaaaaattgctacagaataagttttcgtcgcaagtgcgtcgcaatttgcgtgggaactcagtttcccgcaaatcccttgcaaatttgcgacgtttttgcggggaatcatgacttccacgcagtttccttgcaattgtcttgcaaatttgcgagggaaatattcgtcgcaatgtttgcgacggaatagcgagttggtcctgttccctcgcaaacctctcgcaactctgtaacaatttgcaagggatgttttccatcgcaaatttctctcgcaaatcgcctgttttcttgttgtcaaaaaaaaaaaatctaaactatttgcttcatcatcgctcttcctacaaaccaaactggcttgaaaaaagctgtcattgttttcatcatgtgttatccatcattatctgtccatctatatgtttatattttgataaaacttgtatcttttgatatcatttacattgatttcacttgttggacacatagaagtgtagagaaataatttgcattccttgatttagtggacataatattgtggaactcaatttgcgaggaactcagtttcccgcaaagctctcgcaactctgtagcaatttgcgagggatgttttccatcgcaaatttccctcgcaaatcgcctgttttcttgtagcgaaaaagaaaaaatctaaactatttgcttcatcatcgctcttcctacaaaacaacctggcttgaaaaaaggtgtcattgttttcataatgtgttattttatcattatctgtccatctatatatttatattttgctaaaacttgtatattttgatatcatttacatggatttcacttgttggacccatagaagtgtagagaaataatttgcattccttgatttagtggacatgatattgtggaactcaatttgcgagtgaactcagtttcccgcaaagccctcgctaatttgcgacgtttttgcggggaatcatgacttccacgcagtttcctcgcaattgtctcacaaatttgtgagggaaatattcgtcacaaagtttgcgacggaatatcgacttggtcctgttccctcacaatcctctcgcaactctgtagcaatttgagtgatgttttccattgcaaatttctctcgcaaatcgcctgttttcttgtagtgaaaaagaaaaaatctaaactatttgcttcatcatcgctcttgctacaaaccaaactggcttgaaaaaagatgtcattgttttcataatatgttatccatcattatatgtccatctatatgtttatatttttctaaaacttgtatcttttgatatcatttacatggatttcacttgttgcacacatagaagtgtagagaaataatttgcattccttgatttagtggacatgatattgtggatactatctaacttgcagaaactatttcttatattttttcagaccagtttcttgtttaaaggggatcaagtcaaaccacggcatggactcttctacggtcaatacattctctctctggaacattaaagacataaacaccatttacattatgaagattatttttttacgctacaagtgacaacaaaattgttagcaaataaagaagtaatgacccccaaaaaaagaaagaaaacaatacaacacgtttcatcgagaaacttacagtgttaaagaaacatatagctatttcatcatttgactgattgataatatgagttttgagtgactgagcaatgcaactaacatcaatgtgaaaatgactttttgtttgtcttctttctcttgttaaatatcaatataatacaaaagggcaagtagagctgaacattttgggagaagcatcaattagatagactacaaattctttggaattctttggaagcctctttttcctgttgcaccaaaagattcatcactaaccaatactaatcaatgtttcatttcttttttggctttcactaaaaagtccaagaagaaaaaaaggttaaaactgaaagatatcatttacatcaaacataatcaatataaccggttaagcaattaatgatacagaagactcatcaatggacaactatgatatcatttacatgaatttgacttgttggacacacagaagtggacaacaatagtttgcaatccttgatttagtggacatgatattgtggatactatgtaatttgcataaactatttttttatttgggtggatataaggacaactatgatatcatttacatggatttgacttgttggacacatagaagtggacaacaatagtttgcagtccttgatttagtggacatgatattgtggatactatctaatttgcataaactatttcttctatttttttagatcaatttcttgtttaatggggatcaagtcaaaccacagcatggactctactattgttgataaaaattttcatttttagaaagcaacatgacttttcctttctcaattctagcccattatgatttatgtacatagatatcttatattttttctgctaacgatgcagaatgcagttgaaatggcaacattcatctgattcatggtaaggccacagtctaaattatgtgcatcaatccttaaatcagctatgtaatgttattcagaaaaaactttcatttaatatttcggtggggaataaaagaaattttttgctttatgaagaaccatacgatgatataaagccgactaaagtctgggtgcgttggaagtacacaataatttgcagcaacacactatctctaatcgtcactctcgttagtctaaacttttcagatatctacaagttccataatcttaagcttatcaaagtctatgataaaacatcgctctgccaggtcaatacaaaagagtcggagattccgaatcgacttctatgtcatctttcccatcccactggcggttaaggcgctgtatacacatcgttcccaaaccattgccggttaaggcggaggcaactcaattgaaagagatcgttgaaggagatttttgggatgggagaaagagagcgttgcacagggaatatcaactacttcaaggctcatacccaacccggagattcagaatccacttgccagaagaattccttggctggaagaaatatcagccatcgacatcaatattgtgagataatatcctgtaattgtgaaggtaactccctttctcatctccaaatctcaattgtcgttttattagataccaattcaaacaaaactatgctaaccaattaagcaattgatggtttagtttgaaaaggatataattgtccttttatcctccataaacaagggaaagtgcctcatcctcgaaaagtgcctcaaaaggaataatattctctgaaagtgcataaacgtgtcatattccctttcaaaaataatgacatgtatagctctccttgtggctttgtcatagtatacttgagatacaaacatctaagtgcgaagatcaaagaagaagagaatgccagccagctccgccgctaaccaaatctctttctcccaccgtctccccgtcttcctacgaatgcagcatctatgtcgttcttcatcaccattacattcatgaatcatcaaaagtcgcaacttttgttccgatttcataattgttgtgatcttcatctatgctgagaaatataattaaaaaagctgatgtgattaccacaaaaacattgttatgcacattctcttctcctccaacatactaacgaatcatctctctgctataatattttgtctttttttattattattatcttctacttaaacgttgtgtgtgatttttcttatcatgaaacaatatcacatgcacggttctacaaaccaaccaactgaatttcttttaagaaagctcgccgatgaatttttgatatcgccaccaattttctaacagttttaaaatatagtagcttgatatgagctgaacgaaaaccctcatcaaagtatttttaaggaacaaaaaggcgttataaaatttatggagtttttttttctcgacgatatttatatggaaacaaataatgctatttttatatatacatgtcattatcaacttatatttccttgatttttgtaaatttatggcatgaatacaataacttaaaagcaaatagcttaaatttattatggaaaattttctaaatattttttcatcaaataatataaaaattatcaaaatgaaaatttccactttattaaatttattaaaaaataaataatttattattaatcactctaaatttatcagtacttcaagttattttattcagttattaaagtaaaaattcaattattctattcagtttttattaatgagatggtatatactttaaattaataaaatagaaattttcattttgataatttttatattatttggtcacagaatatttagaaaaattttcatattttcaaatattctcttattttcatatatgagttttttccaatttacaaaaatcaaacaaatagaaaataagaataatttcataaatgttaattagcgagatgtctaatcccgattgattgtttaaagtcctatgtgaacgtctttagaaacaataaaaattaaaacattttaaaactttgtaatgttgaaaattacaacatttataaatatagataaagattataaatatagatatacccgaattaccatgactagataaatttattaatatagataaagattttacatagtttatattacatttctgcaaaatgtatatatttattgtaagtacagtatataaaaattaaaactatagaatatcttattaacttttggtttgtttagtttagatacactaaaattggttcggttcggttcaatttcgatttttgattttctaattcatgaaagtatgaaaccatttttatataagtaaatcttggtttggttttagtgaaatatcagtttggtacaccttagatgtttttgttatgttttttttttttttttgggggccaaattaactccttttgttagtcagtatttaatagttaatacactcatatagtttcatattcacaaatagttaactatggtgcaggttttgtttaaaataactttttcgttacctttatactcttttcttctggaatttttttgccaaattaacctcttacttttaactagtattaaatagctaatacaccaatatatcctcatgttcataaataattaagtatggaccttcggtgcatatttagtgtttactgttagcaatgggtttcataaaataagtttggtagttatttgaataacttacttcattacttttgtattttcttttctttaatttctttgcaaattcatttgaatacaaacagtaaatgtactacaatgaagcttgaaatgaacatatagagggacttaaatcctaatttttctatctatgatatgctcaagattttttattcaacttatttcatagtcataaattgaaatgtattaaacgaataatatttataaacggtgtaaaacgtcaaaagatgtaaattatgtgataactaataaaatattgttggtgagagataaataaagaaagatgttattttcactattaaagagttactaaataataacgttaatgaacattcgacactataaatacacacagaaatcctcattggtaaaacataaacaaagaacccaattaagaataaaagatcaaaatattttaaaatggagaataaaaccatgttcatcctattttcttcgatcatggttttgctatcgttttctcatctaactttggccaaagaaggcgataatgacaagccactcctcatttcagacgacgagtttaatgcgatgattgcaaggtcaccgacagcgaacgattataacgataatgttggtcgtacatattcaaagaaacaaaaaaaatatcttctaaactgcagtaaaaagatggacgtcccagacaaatgtatagaagaagtgttggctgaaattattcagaacaaaagtgcttcaagggattgttgtttagggatagtgaaagctggaaaggaatgtcacatggaatatatgaaattattttttcaaatctatcaacttagacgttttacttctaaaaggttttccaaagctaatgaaatatggaacagatgtttcactgaaattggagctgtttcaccgtattctggttaaaaaagatgtaactaatttcattatatgaatacaatactattatttctgatcgattttgttttctgtgattttagtttttttctttgctaacatggaaccattaattataccaacaatttgatttggttttacttatcaaacatatgacacaaattttgtgtgactaaaaatttttattgaaagttttgaaagatatgtttttatatgtctacttgttgtcaatattataaactctttaaattttaaaattaccatgacaaatagttacaatttaaatacataactaaaaataactttaatacaacttttaggttttacaacatttgaacatttttttggtttataacactttctttagttttagatatttaggataacgacgtgtttttatgtataaaataaattgttgtacggaaaataacttcgacgactttctcattttggtacccacaaatttattatttttttgtttatcttcgctacattagtcaatataactcttctaaaaataatatactatatagaagtatatttataagtttatctacactttcttttaacaactcatattttctcacactcttttcaatatatatatgaatttctgtcttcacaattttttacgaaaagctatcactctcctatttttttgtaagcactcattttatttgtttcattctttcttacagtgtctctttccatcctcttttgattttttctaagcaatatgtgtcataccttttaaactcacatgctccatatttcttcttcgaaaatctcttttttttcttgttagtataaacatttttcaagctcgttaagatgtactctgtttgttttctgttattctaagaaaaagttttcgcttctaaattgttatagttactgaaattccttttccaataagtttaaagttaatattttttattttttattttttttgaaagaatgtaaaattatattcaacaaaaaaaaccattgtttacaataaatgtaacatgaatttagagagttcaaacagagtctgagagatgatcatgtgtcctaactgcgagtttgaaaccaatactgcagcccaccttgaagtcttttgttccccatcttctgaagtgtgctgaatctattccgaatgtttttgtcaatgagcttagttagcttcgaagccggaattgcaggctcaccatgtcgcctaccatttctctctcgccatagactatgaatcaaagcttggaatgtataccgaagggtgaaaacatggagatatggctgagacgagtcaagaaggtgaggagtgattaagctccaactcgaaacgtttctgccattgagaagtccttttgctaaagcgatccaaatttgagaagaatagggacacgagaaaaagaggtggtctcgcgtctccagttcctcgtcgcagaaaacataatttatttaaagttaatatttattattttcctttatatttattttaaaatagaaagtaattactattttcaaatatgttaattacttagatgataaatatgttaattattgatatggctaatctcgattggtgacgcctttaaaagcaaataacttcaacttttatttagtatagatttccttctaatgaaccggtcaagatcatcgatcacagaacgctttagatcgtcgtttcatagccatggtatcaaaagttgactgatgcttgaggatttccctctcgttgttgattattgattttaattagataaaagaaatcttctattaaacttctcattattaaggcaacaaatagtacttcccttatatgtacgtcttttattcctttaattatgtaattaatactaatttcaaaaatgaataaaaaaaaaaaaaaactcacgtgtcattagaaaccctaatggcttcttcttcgtttctttgtttgtagccgaccacggcagtttcttctttctgataaaacaatttcctctgtttttttggattaaagactcatacttccgtcgaatagaatcaatcaatatatcatgatgctcaagttgatcaaatcaatggttcaagcaataactcgtccgatacaatacttgatcatctcttacctccggtatcttgtcggccctccttcgctgactcaccatgataatcaagtcacggttatcatcgaagagacttctgagaacggaaggatcaacgtgatccatggcgccactcaggcttatcttttcgacaaaatcaaccttgacttcgtggaagaacgtgagttcgatgatatataccaaggggccaagctcaagtggaggattttcgtggataaaaataatattggaaacatccctaagcaatgcttcgagctgagatttgacgaaaagcatagagatttggtcttcgactcttacatacctttcgtggagagcaaggcaaaggagatcaagagcaagaagagaatcctcgagatgcatacatactctcactgctgtgacacttgggaaaccaagatccttgaccaccattcaagctttgaaacgattgttatgaaggaagacctcaagcgtagactcatcgacgatattgacctgttcatcagcaaggaagatttctacaaaagagttgggcgacattggatgagatattacttgctgcatggtctaccgggggccgggaagactagtcttgttgctgctattgctaaatatctcaacttcgatgtctataacataactcaaggggtgaaaactgacttcgacactcggagactaattcgcagagtcgaggatagctcgattctcctcgtagaagatatcgacacctccctcgaggttagtgaacttgtgctaataatctatacagtcaagtcaatgggccaaattacacacagttgatgattaattttattagtatatattttcaaactaattaccttttgttttgttttctttggtatgattaacagggctcgaaagtggcattatcgcaactgttaagttccctaacttggccttggtcgaatggcaaggcacgcgtcgtgatattcacgacaaacaacaaggagaggtttgaccaaacattgctatgtcgtatggaaatgaaaatttacatgggacattgctgttttgaggatttcaaaacgttggcttctaactacttgggcatctctcatgacaatgatgccccacaccgtctctacccggacatcaagcgtttgattgatggacaagctgtgacaccaggtcaagtcgtggaggagctaatgaagagccaagatgttgatgtggccctccaaagcttggtgaggactttggagatgacgagtatcatatcaaataagattgatgaagatgacaaagacttatgagttacgtttccttgaaacgagtttatgaaagttgtgctcattttccacaaaacatcgatttcttttattattatacctttaacacctaaataaccaaattgcgtgtgttgattaacctagtaatagtttactaaaagcttgtgattcactaaaacgatggtcacccgatgctcaccgtcctctttttgtgcggtggcttagcccttataagcccaagggcaacacacgagacataaatctcgataagaataaatgatctactcaaaatatatggaaatgatctcccaaaaccaagtttattttcctttatacagaatttcttgtccttgcctacatttcaactaaggtttgtatttctatctacatttcaactaacgtacaataacttgtcttctccattaatgttataacaagaagaacttctaagagcaaagagaaggtagatatctcagtagtcggtcacctagataggctataagccgcaggtaagatatagttcatcgaaggagaatgatcacattgatgatgatctaccacaaattccagaagaaacaagaaaaaactcaaatttggattcaaaacctaggaaaagtcagactattatagttgaagctctgaaccaagttcgatgcaatgagacagagaccggaagtaatatagattactcgagtaacgagaaataagagataagtagctctcaaacttgatttcattggtagaagaataaaacagatctgagagacccaaagtgaggtttaaaggaagtttctaaagaaaatctaacttcttcagttaatctctctctgtggcatgtacttaatacttttgatttaagttataattttcaaattgtataattgaaatagaatttttgccttcataataatttaaaagttttagagctccaaatattatactatttgaagcaaatagcctcgactttttaaaaaaaataaaatttttttttatttctcttaaaagtgactaacctaatttttaatgctatttttattcactttatttattttaaaacagttagaatctgcttcaccgcttctaaatataaatatacttaatgtatactaattcatcttatagtagctttgtttataaataatgatgattatgctgatttaataataataaaaaattaaatctttagcaacatgtctttgagaatgtatcgaactcgaatctaaaaaacataagattatgagaatttggtgaaagccttaattaaaaatgaaggaagaaaaaatatgtcttagtcatattattgtttgttttcaatgatttatatagttacaaaattattttatttaaaaaagattggaaaggcttataatctcaacttcgtcttaaactctgataaatctaggaacggcattgctgaggagaacttaagtttccatgaagacaatttatgctaactaaaaacttacttttttactcgttaagagcattccaagattattcccggatttgacaacatataatctttatgaatataggttttcaaaaagaaaaaaaaaatcttatgtatatattatcttaacttggatgcactaaacacttttgtaaggtatgatatccagattaactatattttttctgaactttctggatataccttatatttagattgattgataattgaaacaacccgactcattttttaaaaatataattaaatattcccataaatatctaattaaaccaaccaataaaataacaattaaaccgcaagtcaaaaatactattttatgaataaataaataattcgaccagcaaaaccaagaataactaacaatcctaaccgggttccaataaccaaaaacacaaaaataaaacaaccgagttcctaaatcatcctttcttccttgccatgattccacgatcacactttatctttacctgcatcaacaacacaaagagatgcgtaagtattatcacaaatacttagtgagacgatcctcccatctacgagctatacacacaagcaaataaaagggtataataacaaatacaacataaacaaaccagtcattgaacaattcacccaaacacacattcaccacacctacatatcatcacataaaacaaatcatacaacccaatcgctcagataagctcgtggtcacgcactcaccttaacaaattgatcctaacaataattaaaccaggagagactctccttgcgtctgaaacagtccagaaccgccctacaacaagtccacaaccaaaaaaaccttgaagcaaactggacaggaaaaatcagaaacaagcagtctcaaagacgaaaccctaaaatacaaactaaccgttaactattcaatcgccccggtgaaaccctagctgccgacgtaaaaacgcctcccacaaaatctagtgccgatcggaaaacaggcgagaccacgatctcagtttcaatctccgctggtcctaattcgcgtctgagaaaacgtgtctcacaaaactgcgaataactcaaccaattttaatccaaatcaagttctgtaaactggagcataacgataaacgacttgggaataactctaccaaatttcgttacctttgaccatgatttgatatgacgaaactgatttcttccaaaccctaacgattctgctccttctccttttctctttttttctcttttataaaacgaaaagtggttaacgattctgccctaatttcgagtttccttcttttataggcacactttagggtttccaattaacccaaccaattaaaccagatgatttaaaaacaaaccctaaccgattttccggttcacgggcgttacaatagtttagtttgaatgaagctttgttttagagattttaactatgaagatttaaatgtaaattagatttcaaatttattgagtgataattacacatgtatatatactttggcaattcagaaaagtgtgagattttaatattatatatagtatagttaaaattgtgatatttgacgaacataaagcaattacatgttttctattataacgtatacgaaattacgaaactgtactataatcagatttcagtctttagaattttatatccactgttttttatagggctcggcgtttgttttttcggtttggttttggtttggttttttcggttttatagttttttggttttaagaaaagtgaaaccatataaaaaccatatgaaattcggtttggttacggttcggttttaacggttttacggtttttcggttttagaaaaattaaaaccaattaaaaaccatatgtattttggttcggatcggttccggtttggttccgattttttcatgtttttaccaaaaaaaaattataagtttgatgcataaataaaatcaaaatctagtttgtatacccaaatcctaaatgacagcatgtaatttatattgaattttagtttaggttagggttagggttttgtttttcgatagtttggtaaatataatatatcaaatggatattatatttatatatatacaattatttttaattttaatcaaaaaccaaaaaaaacattcgattttacggtttttaaccaaaccaaacctaaaccaaaacttaaataaaaattacaaccaaaaggatttttatacaaaaccataaccaaaccaaaccatttgtttcggttcggtacggttcggttttccggttttcgttttttttcccacccctagacttgatacagtgtatgaaatgaaagatatttaaaatgtattatgtggaaactatttgaaaggatgattaaagatcacactgattaatgtagagaaccaaagatatggcccggttttggcctaattcatgaattcgaagcccatattatgaaatatatgtgggttgtggcgacgaggtaattttattgtggtatgcggtgaccctttttccgtgacaaacaaatgaaaacttacaaaacttaaggttctagattcggatggacccagcaaatagacaaacgttgccgtctttttctcgagacaactgtaccttgcaaatagattagtagctgttgatgaaagtcactaaattaaattattcatttttgcagattaataaaaaaatattttgttgtaactcttgtcttcgttttcgctttattttattcagtttatttggtcccttgaaaattacctttggtttaataaaatttattttaaataaactgactaattaaaaaaaaaagaaaaatgtcaatcctaacttttaaattatggctacatatataaaatattcacatgtgaagctgatttataaagatcataatttgaaaattgagatattaaataacattttctcaataaaaaatcatcataatacttgataatagtttttattgttttggatagaagtggatattcagttattcggttcaatttggttctgactattcaaattttttgttttcaataacaaaaattgatctatttgaaatataattttattttggtttgatcgatttgagttttgattcggttttttattaaaaaaaacttatagctaactagtttgagataagggaaaaaccccgaaaaaaccgttatctaattttttttggccgtttaatacgtgtagtattaaatttagaataaaaatactttatttaatttcgcttgtctttaaaaaccttcatttttaaaaaattggtaaaatcgtatctccgacttaacgattgttaactatgccaacggaaatattaactgcggttaaaacttaacccatgcggtttatgtttatatatacaatctattttcaaaattttacgattaaataaagtatttttttcaaatttaatagtaaacgtattaaacagcaaaaaaaatttagatggcagcttttttgggttttttccttttaagataatattaccgatttttagtcaatatcagttaaacagttcgcctttcaatatttgattaagactaggggtgtcaaaatgagtcaaaattcatgggtcaactcaactcaatccatgaaccctaatgagttgaaaattttgactgaaatgagttgatgggtcaaatgggttgatgagtcaattggtttgatgagtaaaatgagttgggttgtaatggttaatggtttcaatggtttacccaattaacccatcaaattttgtaaaattgaattaaaccaactaaaatctctaaatcaatgccaatttaagtttaaccaacacatctaaaccaatttaataaaattaatatttttccaaatttcttaaatatacaagcgatgaaattgagaaaaaataaactcgtaatttttccaccaaaaaacataaacccatgatttttccaccaaaaacgtaaacccgtgattttcccgccaaaaacgtatatccataattttcccgccaaaaacgtaaacccgtaatttttccaccaaaaacgtaaacccgtgattttcccgccaaaaacgtaaacccgtgattttcccgccaaaaacgtaaacccgtgatttttccgccaaaaacgtaaacccgtgattttcccgccaaaaacgtaaacccgtgattttcccgccaaaaacgtaaacccgtaattttcccgcgaaaaacgtaaatccataattttcccgccaaaaacgtaaacccgtgattttcccgccaaaaacgtaaacccgtgattttcccgccaaaaacgtaaacccgagattttcccgccaaaaacgtaaatccgttatttttcgccaaaaacgtaaacccgagatttttccgccaaaaagcttaaacccgaaattttccagccaaaaaatgtaaacccattattttccggccaaaaacgtaaaaacctataattttcccgccaaaaacgtaaatccgtgattttctataccaaaaacgtaaacctgtaaaaagtggaatccgtaaatattttaagtttgatgataatgaattaataatgataattatttattattgttttataataataattaattaaattattacttaatgggttaactcatttaacaactcaacccatcaaattaaatgagttatgggttgacccaacccattttgttaaatgggttgggtcaactcataactcatttaatcctaaactcatttgattatgagttgagttgagttgggttacccattttgacacccctaattaagaccatgtttagcttatttactgtaaaaatttatatactatttggattgttttaatatttattttagcttgggtaaaacaaaatcttctgttcagtttagtgacttctgttcaatttttaattttagtcatcagccaaaagtcactgcttcacataccataatattttctttatatatatatttttaattattgatgtaaatattgtctttaaatcagcagattttcctattattaatttatcatatcttcaaatattttaagcgtaacttgaccggctctaccttcaaatttagactaaaagtctaaacacaaattctgaaatatttatttgcgatacagctagattaatatatatacttttggtttgtccacaagattaatgtaacgtctgcttcttcaaactaaataaaaatagtaaatacatttcttgtcttggttgtaattatctacaaatgtacaaaacgtaaactaataaaacactgattaaaacgagtaacttttggctttaagtgcttctaagtcttaaaagttaactaaagccagttctgtgtctctcttctctttcctctctctcacacacatcttcgagaagtttccgccggcgggagagatcaaagacaactgctgatcagaaatcagagatcagagatatgaacattctcttctccagattctcctttttgcttctgtttctctgttcttggaccagtttcactttcaccacaacaggtttgcttcaatgttctgtctgaaagaaaaagaaaattgttttttacacttttgtctctttttcatctgtgataattatcattgatatttgtaactctttctgaatttgtgatggtgaatgatgatgatgattctgtggggtttctctgaattttaacgttgtctattatcttaaccaattgataggaaaaagtcttaattttgtgtttgttctgttttctggttatgagctcacatgtttgagattatctttctaacacagaagcttatgatgcacttgatccatatggaaacattactataaaatgggatattatgagctggactggtgatggttatgtggtaagaaatttaaaaacttcactttaaatgttgtggttatcacaatgttatataataaatcttgtttcaaatgtgtctttagtgattactactattaacaaattattggcttcaggctgttgtaacaatctttaatttccaacaataccgtcacattgaggcgccggggtggcaattaggatggagttggatgaagaaggaagtaatttggagtatggttggtggtcaagcaacagaacaaggagattgttctaagtttaagggtaacattcctcattgctgcaagaaaactccggctatcgttgatttgttaccgggaactccttataaccaacagatatcaaactgttgtagaggcggtgtgattagcgcgtgggcgcaagaccccgcaaccgcgatttcttcgtttcagattagtgttggccagtctggaacaactaatactacggttagagcacctaggaatataactttgaaggctccaggacctggttacacttgcgggcctgcaaaactcgttaagccgagtagattcatttccgcggataaacgaagaaagactcagtctttgcgtaagtttagcttttgtgttagcatctataagttatattttcttgtttctaatcccacttctcttgatgttttcttatggcagttacatggaacattacttgcacatattcgcagtttctagcacggaaaactccgacttgttgtgtctcactctcagccttctacaatgaaactatagtaccatgtccaacttgttcttgtggatgtcaaaatagttctcaagctggtacatgtgttgagtaagttcctatactcttagaaactccatcttggttttgttttcttatctcttttctgattcatttcttgtgacagccctaaaatagcttcagtagtaccagccttagggaagaacaacctcgaacctctcttgcaatgtacgcaacatatgtgtcccattcgagttcattggcatgtaaaaactagctacaaagagtactggagagtgaaggttgccatcacaaactttaactacaatatgaactactctcagtggaacttagtcgttcagcatcccaacttcgacaatctcactaagcttttcagtttcaactacaaaccgcttaatccttacttgaacataagtaagtttctcattcagattctttctcttgttcttaagaaatgtttggtttctaataatataatgttttggatcatatattgaagatgacacggccatgctatggggaatcaagttctacaatgattttttaagccaagctggtccagtaggcaatgtacagtcagagcttctcttccaaaagaacccattggagttcacattcgagaaaggatgggcgtttccgaggcgcatatacttcaacggtgataactgcgttatgccacctccagactcttatccatggcttccaaacgctagtccaaacattgcaacctcgccatttgtcatacttctcatcactttcttatctgttttgattcttatgtaaatggatatctatatactgtcatggacatgtttggtgatgtttacattataagtgagtgtgttattaggaaatcattctttgtatctgaaatatattattatctatacgttaattgacaagcatgctatgtatgtattgtgacttaactagttatcttcttgaaggttaacactttgttataataaaaccactgacattgtttttaagaaatttgaattttatttgttcactatgactttgaatgaatatgtgttttagagttgtttttggttttagtttttctgatatcctattttagtcattcaagatgttgacaaaaaaaattttccctagagagaaggaaatccagatttttattaatttttgcaaatttctaaagaaaatcaaaaatcctattttttatgagtttttaggaatttttttcccagatattttttgttgttaaaaaacacacacataaaacaaaaactaaaaaattagaatttgtcatgaggttaactacattataatcttttctatttagtccattatactgtcacaaatatattttcttttggagtccaaaaatatctctagtatgatcaagaagaatgtgaacaattcacatggcatccaatgtaggggattgattgacaaggttgcattcaatatataagtacatttttgttagtttggatatagaattttaaacaatgttcggataacaaaagacccctttttttttaatatcattaagagattctaggctttggccttacatccatataatgtttgtatgatattttttctactaatatcatacaaacttacagaagttttgggttgtaatgaccaactaatggactaaattgaatggattataatttgatttaattttatgactcattttactctttagaaagttgattgtctacttagaaaaaagttgacacgtcaacattattgtgaataatgtttttttattatatataactttattggtgatttctatcaattctcactagtttggtaatgttgaatatttagatttactgaataataaagttctatactaatgatgtttccattttttatgagcaatatatgatgattttaatttttattataaatttcttccattaaaaaaacaatgattcaatatgccataagaagaaagaaatctcattcacctcctccttgaccaatttttaaacaaaaagagaaagatatctaagacagattactggcctaaactggactacaatataatacttaacttaccttttatttacttagaaagattactctgactttgagtcatcaaaaaatcaagacattaacattattcattgaatctaaagattcaagagggaggattgatactgatttcatactacaaaattcttagacaaaaacaactcgtgagatcttgacgattcagaagcgtgggtggtgtcaaactttcaggtgcgttggttgttcttttagaaaattaagaaatcgttttggcttttcgtgttgtctacttggttttctagcctcttttatcgttggaacaatcacagatttaataaactcaatttttttttatgtttgatatatgtaacatactagaaataggattggttctttacttttttcatttccaaccatactttgataaaaacaaaaccattcattgattgataaactaatttagtggaaaataataaaaagaaaaatctcaaaaatctagagattcttttacttatgtacgtcacttccacaatttaaaattggttttcaaaattgaattcaactttgtatcagttatggattcttatatatatagctgataaaaatttgattcttttcaccaatatgtgcgtgtgtatatttgaattaccacaccaaatcttttcagtaaatttttaatactgaaaacagataaaccacaaaagatgggaaagttcataccgatttttctttctaacatgagtgataaagttagatcaaaagttcttcggtatcattcttttcgggcagagttattacaaagaatttcttgatagctcaagaaatattccatagtttatgtatgaagaagtttttttgattattacgattgatatcagtaaagcatatgacaagatagaatgaatctgtttagaggttgttctgactcgttttaggctataattttgtttggatttctttgatcatgtaaagcattaattaagtttcttaccatgtgttgttggatgggaaacctaaaagacattgttttctacgatattattggaaaatatggaatagctttaggtcaaaaatcaacttcaatatattatgggttatgggttatgttcggtaagaaaatattaattacaccgaacaaagtaccaactaaataattatttagagttaccatacatatgttcttatgtgctttaatgttctttaagagcttagtgctaagctaacaagtgttattttgaactattgatggagtttaaaggaaagtacgtgtgcctacaatgactggcatcggagaaattgtgtaaattaacacatggaagggatggggtttcgatctttcgaaaaaatcagtgaatttggatggatttagtgaatatcttaacaaggggtttcaacacccttgctaaacattattggtgatggatttaattctcaacttcactagtatatatagcaggggtgttgaaagtgagatactacatgaatgttcacattatggaggcaaaaacccctaactctctgtcatttggatggaagtgtataatttagacaataaaaacacgtcttaaaaggataataaatcggcttggcgctatatagatgatcctaggataccaaattttaatctccgacaaggaaatagcagagaaaagtttctccatccaaacttaatggtaacaaatttttggcactaatatatccttcgagagtttatggttctagaagatattccattttgggtgtggatgtaatccaaaattagaaactagataagctaattaggtatcatacaaaatgtgagagacatacagttaagtcaaactattgattaactaacatatgtttgaggaggtagagtggaaccttagttgttagttgaacattaaacacgaaagcaggaaaattagagctctttcggagacactttctttgggcaatctagtctctgggcaagagtggtgagaagtaagtacaagatgggtgatatccatgatgccaaatgggtcactgtgaaaagcaactggtcatcaacatggagaagtattggtgatgggctgcgtgatgttattattcatggacatagcgggtttgggcgacggaaaagatatcagattttggatagatagatggttatcgaataattccattatgaagtctccaaatgcaccgttagctgcggggatggagatgcaatcaactcgagatttatggagagactgtaggggctcagatatgagtaagttgataccttttatttccaaaaatacaagactgtaactgtgagctgtggttctagataatgttactggtgcgaaggataagatatcttgaggagatagtgcagatgggaactttattgtgaggtcagcttatgctatgttgacactagatgatacactgagacagaacttggagcagcttttccgtctagtgtggagggttttagtaccaaaaagaatacgagtgtttttgtggctggtttgtaatcaggtgataatggtcaatgcggagaggaagcgaaggcacatttccaacacagatgtatgttctgtctgtaaaggaggggtggaaataatcattcatgtactacaagattgtcctgccaagattgtcctaccaagattgtcctgccataacatgtatttggaccagaatagtaccaaggcaaaaacaacatgtgttttttactcaatcactgcatgaatgggtttatgctaacctagatgaaggagcggttgttgagggcagttccttggctactttctttacaatatcggtttcgtggggatggaaatggtggtgtggtaatgtctttgggcagaatggggtgtgccgggatagagtaaagtttcttaaagatgcagttaaagaggtggccttagctaagctcgcaaatatggggaatgagaggatgatcagccgagaggagaggatgattggttggtcggcaccacaagtaggctggattaaggtaaatacaaatggtgcttctagaggaaacctgggcttagccacttcagcgggggtttgcgagatagtgatggagcttggtgtgggggctttgggctgaatataggtaaatgttcggcaccgttagcagagctgtggggtgtgtactatgggctgtatttggcttgggagaggatggccacccaagtggaattagagattgattcaaacatggtggttgggtttcttacgacagggatatgtgactatcatccgctgtcctggtgtgattgtgccatggctttatcacaagggactggatagtccgtatctctcacgtgtataggaaagctaattgtcttgctgacggattagccaactatgcgtttactttaccgttaggttttcattcttttctttctgtaccagaggctgttgctccgctttggttagaggataatcatgggtctacaagaccaagatgagtacagatgtagtttgattttattttttctaataaatcacgggaggcgtttgactcctggtcgcacacaaaaaaagacactttctttggtaaattgcatcggcatccttagtagttacttcaagtatgctcatacatttcagatcacatgagacaaatttaaagatatgtcactccaatattttttttttaggtttcttcttttaagaaaagtatttggtgcccatttggtataataaaaaaaaattgtgccccttttatatagacaattttttttgtgccctttttgtatatacaatttttttttgtgccctaaaaatttatgtatatggggcggtcgtactaccaacacctatagttaagccgacactaagtctataacgacgcgaaaaaagttgtgacataacctgtcaaagtctgggacataagaagaaaccattaatcatgctccttttatgtctccatcctccttgcaaacttgagagttgtcaccatttctattaattcttggatttcttacaagtttggtgcccacgaatctgaattttctagtttggagagtaccatcttaccataaggagcaggaaatcactttagttgtttcatgtggattttatggttcttacggaatgataggataactaatattttgcagataaagtcatgcactgcatgatcatgcccgctttttaattttttttttgtgtggaataaacaaaatagtaaccaaagaaaacaattccttactcctcacaaactcctctaaaagtcaattcatctctaccaaatcggaagagtctgttgaaaatgctaccctcttctttagctggtctatcatacagtaaacataacccatttgagttattctaatttggaatgtagtagagagagacttactgtatatttcgagctcccataatggatcctactacatcatcttgatatcaaaaccatgtcaaaccaaataagttttgctccttccaaagctatatatatatatatggaatggtatcttgcaaaacctaagttttctaataattgaaacctgtttttagtataatcaagattcataagaatttattcgagcaagtttttgcaatttgtaactgaattacaattttaatagtctaattagaccaaatatcatattagtactaatatagagaaacatactttcctatgttgttatccatttactacaattactacgctagtgcttgtgaagagttgtgtcccttccttcgagtgaaatcattccgtaagaaccataaaagccacggaaaacaactagagagatttggtgctctttatggtgagatagtactctccaaaatagaaaattcaaatttgtgggtaccaaacttgtaaaaaatccaagtgttaaatgaattgttgccaactcccaagtttttaatgaggatggatcataaaacgagcatgattagtagtttcttagatgccccatacttttgacaggttatatcacaacttatttcaagtctttgtagacttgaaataactgctacggatcccgatgcaagttaccaaagaaagtgtatgagtttagaaagagctctagttttccattcttaagcgtttaaagctctacaactcaggctccactctacctcctcaaacatatctcagttaaccagtagcttaaccatatatctctgacatttcgcatgataccaaattagcctatctagtttgtgattttggattatagtcattcccaaaataaaaggaatatcatctagaaccacaaacccttgaaggatacgttagtgccaaaattttgttggcagattcatcaaatgatttaccattaagtttagatggagaaaacgaccatgattctaggaaaatctatgacacttttacaatgaaagataaaaaaattaccattatattaaaaaataacataactgaactaaacatgtattgagataatttaagtaaaacatagaaatattttactaatggtgaagaaaagtgtgagctaaatctataaagtaaaatattttgatgtctgctttgtttcccactaactcattttatttaaagatgttttgagcatctttgttgcttttggttttgcaatggcttatggcttcatattttttcttaagaaattatagatacaaaagagtatatttcattgtccattttcattttgtccatcgctaattgttttcttcttctatcgcagttatttccaagtggtaagaattcaaggagaatggattcagtcaaccaacgagacagaatatcaagtctaccagatgtagttctagttatgatcctctctttcttgtccttcaaggataatgtaaagacgagcattctctcaaagcgttggaggaatatttgctatgaagcaaagaacatttcctttaaggaatcagagtatgtggacatctctgtgtttgactatgtctccaaacgggtatcatttgttcggtatatgctcaactgggtctctagagttcccattaaggttatcgaaagttttgaaatttgtctcggttttccggtgggcttcgaggtagagatcaagtcattgattgagttttccatctctagacaagtaaagaagttagttcttgatttctcaagccctttttgggataacacatgggatgggttgagaaatgatgactttgttattgaattgcccgcactcatttacggtctacaaaccctcgaatcattgacgatttacgcatgcatgtttgacccttcgagattcacaaacgtaggactaagaacgctctctattggttggtttagacttgaaaagatcgaatctttgttatcaaagtttcctttgcttgagagtctgagtattatctcttgttaccttgatgaggttaagttagctgggcaaattagagtcagagaactgatcatcgataactgcattatccctaccatgtattgtttgttaaacctacctaacatagaaatcttcaagtactccggaaatgtcatcgtcttcgattttcagaaagtgaatatgatattgttgaaagaggtttacttagatttttttatagagcatgaaaatgacgaaccaacctattcacctaaagaagctggagatattctttcccatcttcttaatgatcttcgatcttctaggactttgaccgtctgctcttatctccttgaggtatgtttttaacaaataattctttgccatataaacaaatttttacatattttgttttttccagtatttaaacgggatcgagactgattttactctattttacgttagtttctagaacaaaatatttgcgtaatcttctaatatataattatggcctagaggattataaatatcttgaacacgtaaatgagatctgtccattttgttaaagtaaagtagatatatcacccttaaattattaggttgaattgttgcacaaaataatataattgatcgaaccatttgtgtgcgtgtgttttattttcttatgataggtgatttcagaatgtaacgatccggttgatatgcttcgtgatgtccaagcacaacatttggtgctagaaaccctcatgcatccgaacgagtttacgggtatgaggctccttcttgatcattgcccgaacttagagaccctcacgttccagcttctttgtctaaaacctttccctgtaagattacaatatattgaatagtcacattactctatataaatgattattattattagtattactaagactcatgttgatcttctccagatggcttcacatggtggctccagttcacatacattatggctggaaaacatctcatcaaggtgtttgagaaggactctcaagatccttgtggttaggggtttttgtaatagctggaacgagttctatttattgaactatttggttctgccggagcatgggtttgcattggaaagagttgaactttacttgcctccgttgcaagaaatgccaaggcagtgggcctatcatggagccgcgatgttacaaaaaacttcaaatcgagtacaagttattttgcacagcgcttgaaaagttccttttcatgacttctcaattatggggtttagcccattcgttgatgttttcaagtttgatttatcgacaataaggttggtacttttggtaccttggattgttatttatgaataagagcctcgggatatcgaggactttgttttggttctgtcagcacaccaaaaacaatattaaatatttgagtattaccattatgatatcatctactgttaaaaattattgttaaaagataatataattaagaatcttttcattttatttctttgttcttttcttttttctactcgattttaattttagtaggttttatatttttgtttctttggtactagaattagattgaattctacttaattttttcacttcaatctatctaattactttccattaaatgcatgtacatgtgcataaactaataaggtaagtatgcaaaaatatttatttggaacataaatttttaaaataaggagacgccaaagctgcccaaaagaaaagagtctaaagaaggtgaactcaaattggtctatccacattgaaattcacctccatttttgtgggtcccatgtcctttcttgaggaacggcttcctactgctgaattgctatattttagtctttcacaacatgtttaccaattatgcaatcaccacgtaatctttctttgtgtttgtccttgcacaatacctaaaatcacttaaatgtttgttaactgatcttgaaatcacttctggtcaatcatgcttatttgtgaaacttttttcatgatgtatgattgaaaatataaaaaacaattatgacattgatatccaaatgaattattttaagatatcttcatgcaccactatatttgctgatattaggttgttacaatctatttactaacacatcacatcatcctagttgtttacgaagaccatcacccccgaccgagtcaacccttttgtctttacactcgtttgggtttggctctgatatcaccagtgattttatggctgccacctttagtggataatgttctctctcgacacatgtgtccaccttcttctaatggccaattcgttacttttagaagatgtaaagacttgtttaccgatctacatatcactagtgatcttttccggtattttgtccttacttgtactgataattacttccatataggtcacaaatcctaaaagcgctctaaactctcttcatacaccactatctcctgaagttggggtgtttcaatcttgtaatgttacgaccgccacctttggtggaccccatgtcttttctcggtctgtgtgccaccctttttcgatggcatgctcactatttcttgaggctttaaagagttatctaccgatcctacaaatcactatgtgatctttcctcatgttttgtcttcgctcgcatggtaacaacaaccacttcagctcaagcatgcttaactgtagataagttcactttaaagatatagatgatcaaattaattattttaatctcttctcatgcaacatcatatttcctaaaattgggtcttacaaactcaaaaaagaccaacaattctaacatgtggacactcgcaaaccagcattaacttttgatataaataaagttggttgtgtcctagccaaataataattaaagatctaaaatctgcattataacataattcgaatctcaaaagagcttcctaaaagaggaagtcaatgccttaatagcagaataccatgcgaatgacgacctcaatagaaaagtttttgatcgaaactttctccttacttgcctaaataaattgtttgtgagatctcggttcttacagttagctgctaattattgtgagtttaaagcctattttatttgtaaattagaaatatggaaataaattagggtgattgcaatgcctaatttattgttttaacttttcacattcatcttttcacctcttcttaacttggataacagaatgtaagtttattttatcttttcttctatttattttattttaaaccaaaacagaattaattggtaagtatcttttccattataactagttaaaattctatgtcatgcacggataaaccttattctatttaatattatgaatagttttattataatataatatagggataatacagtctaacctctataaattaatattctataaattaataatctctataaattaatgaatgttttcggtgccgagttgggaccaatgtaaaaagtgacataaatcgataaattaataagataataattgttttgaaaatcctatgtaaatatatggttccataatatcataaattaataattgtataaatgtatcaactatatatatatatattatatgtaagaaattctttaaaatatatttataatatttttttgcctaaaattcattttttttttgtttgactacagttctcatattttactgtatcaaaattgttggtgttgttttctagacattattactaatgttttaattgtaagggagatttgcaaaactaccctttttttaactacccttttgcaacaatatccttttatgttgtccatttttaaaaataccccttcccttgaacaaaatgaccaaattaacctcatttaatagaaacatgtaattgaaaactgaactttttccgccaattttttggcgccaaaattttttttcccgccaaaaaaaacattttccgccaaatttttcctcaagaaaaaaaaagattttaaaaatccttgtaaatattttttggcggcaaatagatttacaagggattttaaaagggttttaaaagatttacaagagattttaaaagagttttaaaagatttacaagagattttaaaagggttttaaaaaatttacaagtaattttaaaaggttttaaaatcccttgtaaatctttcaaaacacttttaaccctttaaaaagctttacaaatcttttgtaaatcttttaaagccctttaaaatcccttgtaaatattgtaaaacccttttaaaatcccttctaaatattttaaaatcctttaaaaacaattttaaactctttaaaaatctttaaatgacctttgtaaatcttttaaatctctttaaaattccttgtaaatcttttaaaaaccttttaaaatcctttgtaaatcacccttttaaaatcccttgtaaatcttataaaacccctttaaaatctcttgtaaatattttaaaactcttttaaaatcccttgtaaatctatttcccttcaaaaaaacaaattggcgggaaaaatatttttgaaaacaaaatttggcgggaatttttttttcgaaattttttggcgggaaagttttggccggaaattttttttgaaatactttaggcgacaaaatattaatattttattttgttaacttaaaacaatttctaaataagggtaaaatggtcattaaaaatttaaagagggtagaaataaaaatggataaaacaaaagggtagaattgaaaaggggcatcatgaaaacggcagtagaaagaatttttctaattgtaactggttcaagaaagatattttctataatgaaagaaatcttataatttttttaaaaaagttacctaattaagaaaatctctctataaattaataaatattaatttattgataaattaatacctctttaaattaataaaattttgcaatcccaacattattaatttatagaggttttactgtatatgcttctataaatttgttatgaattattattgcctgaagaaactacatagtacttatgtttggctttataataggttttaaacacaactcgaaaatcaaatgggactatcttcgaggtctgtggatcaaactggtctaattattggtcaacgactttttagttttttattacaacttacataaatatatttacatatatatatatatatatatatatataatacatctaattctttataaataagttatatatatatataattctacgtaaaatgtaaatatatcgtatattaaaaagcattccaaaaataatttatttttgttgccaaatccaagaaataaagttagttttcttataagaaattagaaacgatgatttgttctaaacagaacgggttttaaaacaataaaaaaaaattatctttcaacctggagaggttaaaagttaaaacaaaattttctaggtacattaaacatttaaaattcaacataattatatataaataaataaatatgctttaatctataataagcttacaattttaatttcaaataatttaatgatttatattatacaaataaagttgcaattagtcatttacaaaattaagcatatatatttgcagtttcaatttaaaaacttataatatatgagaattggttagtgatgaaatgtgataacacgtcatttcacccgttttacctattgtttttttttatgttttagggagaatttggtgccattttagagctaaggagatgataaacaagtattttgggagtcaagaaagttttaagagttttagagtaaaaaagacgaaaagacgaacaattcttgtttcaagacaatttatgtacttcagaattttgtcatttgttggagacctccacgtgcatcaaatttacatatcagtgtttatggaaatttagtagagtcaagatttacttctatttggaacgaataaatctataaaggtgttcggaataatacgacccggagaatgaagacatatgcgagactggctgtagtgcgaagcaaccgttctggagcctcaaggtcagctcggttatgaaggcccgtacccgggcagtccctcacacttcccacatgtcacttgaccttgccacaagtccagaactcggccaatcacttacccaatcaacgaaattgacgtttttacccctaaactgactccttggtgtgctttcttcttgtcttcatcacaagcgaacctagctgctgccgtgagcctcccagctgccgccacacctctccaagcctggaaagacaccaaatctctatttttctcttgttttgtctaaaatctactaaggtgaagtcttaccttttatattttacattcaaagaagtaatctctaaactctatttaagtcttattcatctctttcttatggtattatcaaagcaacctttgatgagttacttaaccatgctagagtaatcctctacttgggtttagagggctaatcaaagggggatcgatgatcgtttgtctctaatgcagattagagaaatcgccatagagaaaatatatggttcttcatgcttgacaaataatagtatagtagtatcagggtcggcttagagaaaagtggaatcctgtagccattttaaaaaatatatttatctcgtatactatatatactatatgtatagatttgggcattttcgtataatttcttataccctagtttcttaaagaaatctgactaaaaaatactggactatgtgcaaaaacaccctttgcacaccctctcagccggccgtaagtatgttgtattagatttctactattttttagtgtttaatcctcgaaaaataattttggatctattatattttattttttcatttttaatgggctttttgtatcagaattctgtttaaaacaaatggacttatgatccgcagacttctgctccaccaatttggactaggcctataactgtagcaaaattaatgttatagtatcatcccaccccaaggtttgattgaagctgatagaatttcaaaacaacggaaatattgattgactttgtcaaattttgaataaaatgatacgtcaaacagaagaaatgtaaatttgagaaggctgaaccacccacagatttaggatagcggtaagaaatcaaaaactttgaaagcaattaaacatgtaaagaaataaatatattttaaaatactgtagaatcctagttacgtaggtataacaacattaaataaatgaggtttcatcaaaggtgcaataatctcagattatctcaataatttttgtaattatcgtcaaagctaaatatgttgtatatatatgcatatttttaatagatttattacttcattaaacagctcaccataagagggaaatagtacttgagcaaaaataaaaaataagagagaaagagtatgtaacatatggtaaagcctctactagacagaaataaaaatatataatagtaacaaattataattaacgttacaaattacatattgaaccaataagcagaatcaagaagatcagcccacaggaacaagtccgtgggtttttaagtttcaaattatgagggcatggacttttctatcagcatgtcatatctctacactatatataccatatacgtattgattctcttttcttacacataacaaaaccaaaagaaaaaaaaattcatattgaatagtaccctgaagattttatatatagagagtagaaaggatcaactgaaatggggcgttgggtgagacctgaggttaggaaaattttatttttatgaagaattgcaaactttctatgataaaacagttatcataactaaggtgagaaataaataaattaattttatcttagtttagttttaacagaagattaaatgaatcagttatggatttgccatttttctggatagcatttgtggattttgccattttttgaatagtttatggattttgtcttttttcaaattacagaaatatgatttaacatgcgttttattcgttatgtttaggtttagtcggttttggttgttattagggtttaatatttatataaagtacatatttttaccaaaaaaatcctaaatacgtatattttaatgttaaacatgacatatttgtaagattatagtaaaaatgggaaattcaaaaaattttgatgaaaaatagcaaaatcaacaataatcccaaataaaatagttacaactgttttaatattatgaccgaattgttaaattagcatatttttctagaactagatgaatttgcttgtattacttttgtaaggttttcttttttgggacaaccgatcattgatgtgttatttcaaaagtgtgatgaataaaaaaaagagtataatcaaatatataagaatagtaaaataccgataccttaatttatgttaatataaattaaacgaaacaatttaggtgtaccctcttcttggagcaatgggatttgtgacatctatggttgtgtttcaactcacaagaaatgcattcttaaaccctgactgcaggttagtcttcatcaaatctattattttttcttaatatgtggtttagtaaaacttaggacatgtcatgaaagatgcttatttacattgtcaaaaatgggataacaatttttcttaaatattttcaaactttactaatatatgtcggttatatagttttccaaatataactaacttatgactaaattaactattttttttgtatttctatattttactaatgcttttttacatttaaaacatttgacagaataaataaagagcatagaaaaatgggaattctagaaaataaagacgaaggagaaaaatatgcacaacacaattttcgcaagtatctaaggacccgtcaacctcaagttatgccttcactcaaccgtttcttctctcaagaggacaactaaatcttattttattatgaattgttatcagatcctcgtttatatgtatctctcaataataataaaaagttgaatcctgtgtcccgagtctcaaaaacaccaaagtcttaagctcattacaaccatcgaccaaatacatagatgagaaacataaatcctaagataaataacaaaagaggcattacatctccattaaacccgttattaaagaaccaaaaaacctaataatccaattacttcttcttagatagtttcagcaatcacagaaaccacctccctcaaaacatctatcttctcccacaacaactcaagttccttagcctccaccaacttcatcttctcttcaatcttcttcttattctccttagggtatctccaactcatttctatttttgtctcaacactctatttttgcctctatttcactccaacacatctctattttttatcctctatttttcttctaacaaatagagatctctatttttgaataaccattggagtgaaaatagagatccctaattttttctctatatttagaagaaaaaatagaagcaaccattggagatggtcttagacaccttactccatttccacttcacaatacactcatccacatcgagactcgcaacaacccgaactaaaaacgacttctcaaaccaattcactacttccttatcttttttaaccaaaggttcaaagactccaccttcttctccttcccattagccttaactacaacagattcaacaacaccaataccatcaagtccccaaatagacttagctaataccatcaagtccccaaatagacttagccaataccaaacatttcttatcatgaattcatgatccagttctacacctttcttcttccttataccaaaatacttcttcttcaaacctctaatcttatcaccgaatttggattttactaacatcaaagcttatatatttcttagcgatatcgaaaaaaccattcatatcatcataagcacttgtacttgtctcagattttgaaatcaatcataccttgtaatagagagatctcatcttcttcagtccatgatctctgaaaatagggctttttgttatcctttgaggtagttccttcactagctcgcttcgtccctgatttcatcgctggtgaatcagtagcttctttcttcttatgcttgaggatgattggcttgtctaagttagatccagaatcgagagctggagcagcggcggaagtagaagttagggttttagtggagggaattatggagggatctttgggtttcttttcagaagaagaagaagaagaattgtagatcccgccacaattccgtcaactaaaaccctaacttctcatgaaatctcttcgtcgtcttcgtcatcgatttcgttaatttggttaggttatatgtctaaaatccatacaaaaacttggttttgttttaaaaaaaatggaaatttgcaaatataacaaaaaaatattaataatttggaaactataacttcaaaaactagaagatgatattgtgtgtattatatgtaataaatacaattctactatttctctcttcctttttcttttcctccactaccaccacaaccaccactacttttaaagccactatcaccggaaaatcgtatccggagccactatcgtcggaaaattgtcaccaaagctatcatcaccattgtactattctattctactgctattgtactattaagtattaattatgattgaaaagtttaataattaaaaaaatttggatttaagatgtaaaataatcttaatatagaagacacagagatgatttcattttttcaaatttctgaaaactgaaacttgaaattattttattttgtttaatgagttttgtttgggttccatgtatagtatcttagggtttagtttttttagatcaacatgtgtttgttataattagaatggattgagatataagaattattttttctggaaaaaattcttggattgaaaactgaaacttgagatgataacatttcgtttaatgatttttgtttgggttccacgtatagtatcttagggtttagttatcttagatcaataggtgtttgtaattaaaatgaattgggataaagaattattttttctggaaaaaataattggattgaggagaagacaagaaccgggaagaaggtgaaggaaggagtgtgttgtattttcacacctcatatgtgctcctcaatgaattatgcatattatagtgttagatatttaataactttatgtagattggctattcaccaaattcaccctttaaaaaacaaatcattctatgttggttagaaaataataataataataaatgagtcggttcaataaaacaaaccaaaaaccaaacctacttcaataagttgttgatcctattactacaagaaaaaaccatttttcctactaccaaaatcgtaagaattttgtaggaaatagatttttcctacgaaaaatgtttgtagggaatgttccgtaaaaaatcgaaattgataagattttcttaagaaaagtcgtaagtaattttgtaagaaaatggaaaaaacttttgaccattttctaccagaattttcgaaggaaataggtttctaccatttttctacaatcaatcagaaactttaccagtttcctacgactttcctaagaacttaatacattaatcaaattaattaatttgttttcaataattatattaattttgaatattaaaattgaaacagttaaaaatcattattattaatctaaatcatatatataatcaaattattaaaaaaacaaataatttgaatgtctaaaattaaaataagacaaaaaaaatctattgtctaaaatcataaccctaatctaaagaacaaatcgaataaacacagaaacaatgtccgtccgttcattctctcatgcctttatattttcatgagcttcatcaccttaagattacaagctcgagttatactattgcaagagtttatacatatcaacaacaagtctctcttctcactctttttcaagagtttcatttgcagccttgaaaatgaaagaaaacaagttactcttaatagaactagtgtttcatgacaattgaaaaagaaaacaagttattctaaaatcttaactcataccaaactagacctatcacctatggattaataagagcaatcaaacggataaagtaacaagagaagctaatctattacctgcaacagatgatattgatcacatgagcaggtttaagggcctttggtccatttcttatccttgtgtttagaaatctgcatgatagaaagaattttaatcttatatcctagaacccaaacttagaaatatttagatgagataatgatttagcccttcccaagcagccaattttattattaaattagaggaatatggacaaagatgtaagtatgtaacacacattcatacgaccaaaaacatcttaatatctgaatagattataacaccaaaagacaatctcaatcacgatcatctttttttttcgagaagtcaaactatcataattaacatctttgattccatatccataacatagaatctataaaccaacgatgtgaagttatcatggtgagaatcttagtccctaaatccagattttgaaacttatagatccaaatcgtggtgggaatgttttgtaatttttcccatgacatttttacgaatttcgtacaacttttcctacgacgatatattttgtaagattttcataggaaattccctacaaacttttgacgaatattttcgtaggaaattttgcttcgaattttctacgaaatgtatatttcgtagcaatatcgttaaaatttagtagaaaatttctcctaccaaaactttgatagaaaattaggtaaaaaaaaactatattttcttgtagctgaagcctgaaattaataaccaagttagatgggatataattgaattaagttccgctaattctatctcattttaatttgcttcgcttctatttaaagaaataaagaaggaaaaaaaaataaatatatatatatatatacatatttatctattaaagtaaagtacgatttattctctaaaatctttttaatttatgccatattaaaaaatttgaacgtgtattaatatttgtctttaaattttataaaaatatttttgaattatataaccttagtaaacaattataataaattccaaataagtaaaaatattttaaaagaaaatggttggatcactatagcttttgtatacaaactctcatctttatcaataaacttaaaattcaaccacaaacaaaacgttgacttgttttttatttatttaaaatcttttatgtcaaatttttaagtcggaaaataaatatattatgtaggtgattggttcgtctgtagctatagatatatcgttgtaaaatttttgatataggtctgtagatcttattgctgtaaaaattaagatgtagattttattaataaaatattattacctaaataaattgattgttgaataagattttggtagtatgttttcttaagcaaaacaaaaaagaaatattattggtaaattgttcttatgtgttatataatattattcacaagtatcaatttaatatatatatatatatattaaaaaataatgtgagttgcatatatgtcataagtaaatgtttacctactatttctgtccataaactatatatatatatatatatatatatatatatatatatatatatatatatatatataaactatagtaatatttgtaaagaaaataaaaaaataaagtgaaaggaaaaagagaaaaaatgtaccgaccttctaaagaccataaagttgtggtgtagaaaagcttgtacttacagccaaaataattaaaaaattattaattggaatgtgagagaaaatagaaaaactatattgtgattgtttcaattttggggcagtaactttttagtggctttataaatctcctatagctcaaccaatcatgctatgtatatcaataggttactttagagacgtatcttttagagaggatcaagctctaatccaaatcagatattaatttcagttttcttattttctggttaatgagatctaaaaattttgcttcgacgattattaaggatgatttagttttatgggcttgagcttcaatttctataattctattttttatatttatatattccagccttttgggctttataaatggaacttaaatatttaatgccatgagccatgaatatgtttcatgcctaaatatttcatgccataaatggaacctaaatctgttttgaaacaattatagaataatttcttgttaaaatatatacaataagaagccatgagccacatcatacaaataaatgtttattctatctcaaaggaaataagaaaacctaacttgggctataaggtttcccacctaaaaacttctatccacgtctgtgcaaaatctcacgaccttatctggaacggtgagtgagaaaggaagtattagtcctcatgaagctcgtagaaccgtttcccaagcaccatacttggagctgaaagtgcctccaccatgtctctctgcgtactcaaccattgtcgctctcacacaatcagtccacgtttgagctatttctttcagagaccctggttctgaaatttccctcatggacaaactgaaccttgatcttgttctcgcggatagatcctcatacttgtgtacactgaaacatgtgaatataaatccttaagatcatatatgtttagtccaaccgttgttacttgatttctatgtaaagtttcatacctagtgtcaaaggagatttcatctagaaccatcggggaactatacggataatccaaaggaactagtaagcgtaaaggttgaatctgtgcctgcatcaaacattggagacatcaaaaagctgagcacagtgaggaaaaagaagaagtttggagagacttacgatttttccagacttgtaatgatctttgaatgtgacactgagagccacaggagcataagtacacgtgactattgttcctgaagtatcttcatcacatatctccaccactgtctctacaagtctcccatttgtttctttgatttcttgcaaaatggcatcaccaggctacaagattgaaaaaaagaatttatttcgatgtttcatttgctttcgtagttcgataaaacagagtagatcttaccgcaatattgttaactttcaagccagatgatgctgtggaatcaacttcagattcaaggctactgaactgttcataactatcaatatgtgatgacatatctcgcgacacaatgctgaatgatcgcttcattctcttagacggatttgtttcttcgtgtgtcgtaaagtttcttgtcctctcactcaaatcctcgcctaaaccatctctcgatcctccactagggtggaacgatcctgcagtcctgtctaccatactgatcaccgagctaatctcacttacagattctgccaatgattttggtgatgctgcttgaaactagaaagtacagacattaaacattaggtcagtaaataggagaaggtaatgaaagtaaacttggataagctatagagtttatgatttctttacttaccgcttttataagtcgatcaataggccgctcggtgattggctcgggcggaggaacagataacagaggagtttcttgtgtgcccagtttactagaagaatctaaagttgagtttatttcaacaccagaaactggagactcaacagatataggcatttcagaatctccaggaactggagatggagctggagcaacaaaaggcgagccactagacttcaatggggtgccggttttgttaaccgtcgcaggaagaatctgctggtcaactaactgaggagaagagtggttctgtatctgaggggatgaaactttagacacttgctttggaacctggagctgactcgatgagactagtttctcaagcaacctctgcctaatcctcacatcattcatctcatttgtctggtttgatctctgcatttgatgctgatgattcccttgttgtggttgttgttgttgcatttgtcggtgacggaatcgcttctgctgctgcaacgactgaaccggactgatatttgtgtttacggcctgaggattctgtttagcagaaggtaacatgacatttcctgaggaagccataatgttgttctcatctcttggttccaacctaggccttgtctgcaacgaagacgaggcctcattttggcaacttggcatcaaccgtgatctcatttgctccttatcaagagactgtgacacatggacttgaggactttgggattgcattgctgtttgagaaggaggaaattgtccttgttgttgctgcgttgacctctgaaccatggtctgactcttggtaaatttcaatatgtggtgctcatatagactaaacttgtctctatgtttctctgatacattgctcctttgaacacttaagaaaaacataaggtgttccattgacaattttcccgcctttagcttttcaatcgactgagcttgcatcggttgcggcggaagagattcagtctgtaaacattaggtttattaaaccaaaaacaacacaaaattgaaaaacaaatgcttaagaaaaccattagaacaaatccttgttccagaagcaaaaaaattaggttataaaatgaagtacctgccgcaatttttccgcaattcttttgtgcattaaactcagaacaggaaaatgcatctctttcagttttataatctgcaggaaacaggaaaatgttgagatgtttgaaaacaaaatcaaaacctaattgtgatgttaagaagcgaagagcaaggcaagtgaagataccttctgataggtctcctcctgccagtccccgggattggcatttaccgtctttcccgtagaatcttgagaagctacaaagatattcattattagaactaaaaacaatatcacatctacaagttagtaagagaggaaacatactagatggatttgctctctgtaattgttgtggctgattctgttgatctgttatgttttgtgtttggcgcaacgaatatgctgcttgaaacagattggtattgtttctgttctgaggctgctgctgctgcatgggatattgctggcggtattgttgtgacatcattggttgagattgttgacctctagtcatactttggaggttattcttctgttgagccattgcatgtaagccaacagtattgttctgctgagacgatgatacccgaaaagctccttgttggtctctgttgttaggtcgtgatgttggaacattcatcagttgattaatgacttgctcttgttcttgtctttgggacggcagaaccatctgtttttgatgactagaactgacccgttgtgtcggaaactgatttcttggcagtgattgagagttttgttggcttgaacttgattgtggaaaggactgttgaataggttgtttcaacagactttgcggatgatgctgcggctgcggtggctgagcttgttgctgcatgtgcgaaggtcgtagattcccatggcggatttgattcatttgaggctgttgaggctgttgctgctgaggaagaagctgttgcctaccatgtacctgacttggcaaagaagatgacacaggaatgttgagatttctctgtgtattttgctgtatccattgttggtttgttgtagtctgcgtatatggcaacgaggtgggaagagattgagcttgattcataactacttgagaagctgatgtttagtttagataaagacatcgaaaaaaaaaagttagtaagtaatttgtttgttattaagctaaaatagtgtaattttgaaaccaaaaacttattacctggaactcgagtgtaagttctcagtatataatgcagcttttcactgagtttccgaaggtaatcattctgagacatagcaaggagacaatgagtaagatatcaaattcagattctgaagttaatagatggagaaagaatttgtattttagcaccttatcggttgctatgtcaaaaaacttctcttcaaatttggaagcaatgtcgttaatcttgtattcttcatctgtaggaaacttttccttgaacttttcaactctacacatagatgagaacaaaaatatcagtgacagtttgaataataatcggctaaacaaaataatactatgaagaatttggatacaactgatactctagaggaagttaatgttctgtctgacaggttcctcaaaacttttaatctcttctattttatcccacaagactcgctagttaaaaaattattagtaatggaagatatgtttcattgtttctgaaatacatgacgcgtaataaatcagagctatcaaagacgatggcaacagtaaaccagagctacacttttttacaagtcccttttcacctagagctacaaaacaagtccttgagtcgctttttacaagtccctttcgcttatatacacatgaaaccatacaacaaggcgctacgtttagcgaacaaatactgaaacaaatgtacatatgtgccaaatattaccaatagaagcgagagtaaaacaagattcttctagtgaggaagagcataaatgcagctaatgaggttaaaagaatatgcaaaacttaaagtacaaaaggttgaagttaggttttgtcaactataataaacatttatgcacaactcttatgctttaactgttgcaatctttatcatgtggaagctacaaggatcacatcgaaagcatgaccaagaaaacctcctatctctctttcatgaatgtcaataatcaaataagaacaatgagtccaacaaaagaaacatgaaagaatggcttacatttttgaaagaaccttttgccgtaattcaggctcaagttgtgatctccaatcaatacaattattcgcagcagcgcggtctccgccttgttcattaggcttccagttagtatttccctccattagatgtatgggctttgaccaagaaccgccttcgataaaccttaacaaacaaacaaaagaatgattagagaaatcactcaagagggtaacacaaaacagataaatatatagtacaagaaaacgacaaaagagtattcaaaaatcatagatataatctatatagatccatcactcaaactaattacattagagttgttaatactgcaattaactagtaattataagccctcataatgccctaacaaaaacaaagtggcagtttggttctgtaaacgatattaaacctaagtttcacaaaaccaaagtaatatacaactgaaacatatgtcttgatacgatgtttgtgtaagaaaaccctaaaaccatcaatatctaagaagattatagaccaaaatcgaaacagagatcatattaaacgaaaagacgatcacacatcgcacacaaccaaaagccagaatccgaaaccccaaataatttcgacagagatatgctagaaactcacagatcgcagaaggaggatcgagaaattgaggaatcgagaattggaggaatcagaggagaagaagagaaacctagacgcaaaaaaggaaaaagagcggacaaattgaagaagactacacgtaggaagacttatatatggtgtcaatcgggcctcaagtccgcgggcctggtccgtttagggatgtggcggggcgggtacgggcccatgtaaggaagcccaaaataatgcgggcgttgcggtcctggtccgtttggtttgcggaggataaaaggctgactcatttttcgccgacgaggagctttagtcaagtactgaatctgatggaccagttcatggagatcctctgttatcagctactcgtggcattggagcttcaggagctcgtcgtggttgggatataaaagttgtatgggaatgtgttgagattgaactctccgattgatccggcaaagaagaagaagaacatcagtgagaaggaaacaacaatgatgaagaacaagaagattggaaactagaagaagaagacgacgtaagagagagacgtgagaagaagaagaaaattcaacaagtgaagtgggtttttaggttttatcttattgggctgatgaagttgtttaggcccaaagtggtgaagtatgttttgttgtgacccattcgtagaagtagcttattctagctaagtacttgaggtagagtagttggggttgttagtggctaaggtaaggttgtgtaaggttgcttgtatccctaagtctaatgtctagaagtaaggttaaatagtgactaagtttaaggtctaagagagtgggtatggtgagtagaagaaatctcctatatgtatgtgtaatgtgtgtaaacttatggatgtgtgaaagtatgaaagtttaagagagaaacaaaacaaaattgtgacctaaggagaaaaacaacagaatggcaaggtacgaacatggaaaagttctttattctctttgactcgtcgatttacatccaaaagttgtttactcatccatgattcagtcgaaggttcactaaattgaagaaacagcaagagacgcagaagaaagatagaaaaagtataggctgaagcacatgcttgcaagaaagttacaacagaagaattgccggttagaagcttataaccttttggtaattgagtcaaatagacattgttttaagattgatctttctctggttttgttacagagacaaattcttagtacatgtacagaagaacaatatagaagcttgttatgattcttcacgtaatgtttgaagatccaaggaatgtaagaaatcttttttttagaggtgctcaattcggtttttggttcagctttagttttagttcaaaagatttagtttatgtttcagtattagtttggatttggtttatgtttcagattttcagttttggatttatttttcagtttcagttctctttttgttttagttcatctctttttgttgatgtgttctcttttgctagaagtaatatcggaatactgtgtaaagattttatttaaaccattttaaaaacaatgaatgtcattctaaagtcctttcggagtttagtaataaaagacgtttcaagtaaacataagtagaaactctcttgagacaatcatgtcaacatctctaaactaatggtcaggatcatctttgtctaaagaagaagataagaagcttagagatgaaaccatctaagtctccttcaagaaccgagtcaggatcagagacctcgtagtttgttctcagatccttcaccattctgtattgctacaaaagcaaagaataattactcagatcattgtcatgtaaaccaaattgcaacggaaaatgtgtggattcggtatctacatacatggagaacataagttcgtatctggtttccccagctgatctctgttagtgatcgtgtatgttgagcgttcactgatgtctgacgtgccatctctagttggtctaaccatgattgaagtaccgccattgctgaagccttgttcatatgcgtatttaccgttcactttgattgtagcacgctgttcaagacattggatcaatcgttagccaatggttcaatattatagatttgaccaattgcactaaacagaacatgagattttagcagtgaataatggataaactacacattttgatcaatatgtgagcctatcagccaacgcttatggatgtcattttgataattttttgtttagtctagtgcagaggagcattgaaattagcctaacttgtttacaatgggaagaaactcatttcaatggtggaagcgtgtaacaatgggaagcttgtaagttcaatttatttgtaaccttctcttgatgacaacaaatagtatagatcatgtaaactcagtattgtacgttcagtttatctatgtaacgtatacaatagccaaagtatatgcctatatatctaaatcatgaatagtgtactgcatatgtagctaaagcaatggcaaatgataattcttgtactttgaaccaggcatcaagatctcactacccagtagacgaagacgcagcagcagctattcaccaatgtacattctcttcttcttcaagaagagaataatataaatcattcatccaaattcagttatgctaatacggtatcagagcatttcttctaatatttactttaattctagttcaatcttccatctattagctcattttcacttattcgagttctgactcatatcgtacaaaaaccattgcatataccgaatagctaatgtccacaagtaagagcatttcaatggaaacacataccagatcaagttcagcatcatcagccattcgaacggcttcgtctttagacactaaaccaagctatagagagcaaaacaaactggaaatttatgagtcctattgtgcagaatcaaagctacacttccaagaatttgagtcacatttaccatgttttgttggccatcgataagcctaacagtagctgacctactcaaacatagacatcatcatcaccaaatcgaatcagctcctttctttcgtgtaccaaatggagggttcattacaacagtatcaacaattgtacctaaaaaaattcatagagccacaaaaaagttacgagtaggattgtaccaaaaatgaaaggaggatagtaccttttaactctagctttgtactgtcacactgaacgaaatctatctgcacctacaaaacaaaccaattatagcaatggtgtttgctatacaaccaaaagaaaactcatttcatttcaaaaaaaacctcaagttcctctgcatttagtgttgctgtttcaagagattcagggtcgatatcgaatccaataacagacatgttctgaagcaataaagagattaaataaccacagagtaagcagccaaggccaagagcaagcaggagtagaatgaatagaagagtgaggtaaatagtcgttactaaatgaaagagtcttgaagataggtacctggcatgtatcttataacacttgagctggaatttgtgtctctgtttcaccaaaaacattagagaaacagcacaccataagaacatcaagatgacactaccatattgaacttatacaaacagaaccacaaaaacttaatcaatcaaagaacaataaaaaagaggaaattagaagaagagaaagcttacagattaatggacaaaggtgtggaggagctatgattaatggtgtaaagacgctctgtaatgtaaaccaagatagataacacaaagaaacttgtttagtctaagaatgcccaagaatctatgtcttcttactccgttgagaactctcgagttctagccgcaataagggtttttagagtttaaaagctctttgattaaattaataatgttgtgtccttacaaagcttaggctatcaactatatataataaaacatcaaacctaatctttcaaggaattggaaactaaataaaggaaaaatactaaactctagataatgttaaacttctagaaaaaaagaatagaaaactattaagaagaggaaatatgccctgcatcactctgcctcctcagcttgctcaatgatggcgtcgatgtcactgacctcggtcacagattcgagaactttcttctgaagattcttgtagtacttgcctttatcttccgattcttgtatcatagggttaatgaaatattaatgacaacaatcgatgggtaaatgacgcttatacccttaattgtttttttgttcctggaccacgaaaaacgaaaacggctcaaatggttcatatatttcattctctgttaatagtatagatttattattaatttcaaattatgataactcttacataaataatatcttctgatctttattagatctacgacatatgatatttcttttttctattttggaaactttcaacgatctacgacctacgacatttctctttatacgtataatcacaatgaagggttctaattatagatcgatggagatttcttgtacgtttgtctccattaatctgtaatattaaaaatcattgaagaacgattttgttagtcgttgctcattgagtggagaaaaaaaaatcatttcgatgttggtgaaaaacggtgagtatttagatctacatttttttttgaaaaattgtaagtaaaggagttttagttttaaaacctatttttattatatgaattacttttagtcattcaaaacgagattaaaacatatataaaaattatactttaacaaatgtctgttttccaaactttttgtgtttttcaatttttttttgtaaataaatgttttcttattttaaaaaatattattactaagatatagatttgatatgaatatacatattttttttatataaaaaattagtacttatccattaatatgaaatgggtagaatcaaagtccaatatattatgataaaataaacagttataatatattgcaaaataacatatataagattaaaatttgttttaaaaaaaatatactaaattaaaattaaaaaatgtggaggttactgtatagaattaaaatatcaacaatttagatattaatttggtttaagataatatgactaagttaaatattaaaaaggtatgaattactatttagaattcaaatattattaataaatatttatatttatttgttacatccttctatttaggcaggctttatccaataaatataataatattaactttagttatatgttgtgaatcatgtgggtggagataatctttgtcacatatagtatcttaatcttgtttctcaatttagtttgcgtttgaacaaagttccaaagagaatgatgagaacacaatttcgatagggttttgtgggctttaaacaaagttctcaattttgtatgctctatatatgtttgcaaatgtttcacaggaattggatactactttgtattagcttactaggattggatctgcgctacaacgggggagaatgtttttgtttccgaatttatttgacgtttacggaacgtgtttttatagtattaaaaggatacgtatttggaaatttctgaaaaaaatatatttggacatatatatatatatacatttttggtagggtttttggccaaaaatctcttacctttttattattgtcaatattagtccttacagatttaaactcaaccaaatattatatgtctaaatacttacaaattgttagttttcattaaatacttcaattaactctttcctaaacttttatccttaattaaatcttttttttgaactatattcgattaaggctaattttctaaaatttctatatcgacattagatataaatatattattttatgttactatatttgttcttatatctaatttattttgaatttatttataaaatacatatagttaataaaatatttaatttttctgcatatgatgcaattcaaattttaaaaaacagacatataatactcaatctatggaaaaaaataagtgtacaatatttcacattgcttaaaattaggaattcgtttagagtcatactataaaaaagactaaaatatttttgaatatgaatgagcaggaaccttgatatatcagacatccaaaattaaaagtgttattcggtttactccggttctttattttaaataactaaaaacttaaaaagtttaaaatattatatatatttaaactttattaaaatttaagtattaaaatttttaagaccataaaaacttttaagtattaataattttaattttttttgaagttttaaattttgtaaatatttaaactttattagaagtttaaacatataaatattaaaaaaatataaatacgggcaatatactacgggtgaaatcttagatgtaacaatcaatatgcaattatgaaatttggatcgaattaaaacttttttgaagtttctaatattataaatattcaaacttcataaaaatgacaaaattatgactaatttcatggaactaggttatatggtgggacgggtttgaattgatattaatacgggatggtatactatgaatgaaatcctaaaattaacaatcaaaatacaattatacaattttaaacactaaaaaaaaatattaaccaaacaaatatataacttaaaatttcaaaaaacaaattagttaataaaatcgtcctaaggtgtatcatagtatcatacataaaaaaatagcatgtacctgtagatcatcttaaaaacaagaattcaattttttatttaataaaaatataggcttatgatgtaccccttgaatatgttatttacatataaataatattaaataaaagaaaaatctctaattttcgaacaaaaatattaacatgcggtataccgcgggtcaacctctagataatacaagttttaaatctttattacctcttaaaaactcgaaccacaaaaaaaaaaggagatttacaaaactaccctttttttactacccttttgcaacaatacccttttatattgttcatttttaaaaatttctcttcccttgaacagaatgaccaaattaccctcatctaataagaacatgtaattagaaactaaaagttttctgccaaattttttttcgcgccaaaaaaatatttccgccaaactttttttcccgccaaaaaataattttcccgctaaaattttttctcgtaaattttttttcccagccaaaaaaatgcttttaaaaatccttgtaaatttttttaaaactcttttaaaaaaccttgtaaatcattttaaaacctcttaaaatctttataaagtctttaaaaacataggtaaatactttaaaacccctttttaaacctttgtaaatcattttaaaactttttacaatagttttataagaattacaatcgttttttaagcataagtaagtagcattgaatgattacaaggaattttaaaagcttataaaagggtaaaacattatttacaatcgtttttaaagcataagtaagtggcatagaatgatttacaaggatttttaaaaagggttagcatggtttacaatgtttttttaagtataagtaagtggtattggaatgatttacaagggattttaaaagcttataaaagggtaaaacatgatttacgatcgtttttaaagcataagtaagtggcatagaatgatttacaagggattttaaaagtgtttgtatggtttacaatcgttttaaagcataaagaagtggcattgaatgatttacaagggattttaaaagaggttaacatgatttacaatcgtttttaaagcataagtaagtgtcaaaaaataatttacaagggattttaaaaaaggtttgcatggtttacaatcgtttttaaaagataagtaagtggtatagaatgatttacaaggattgtaaaagctt

SEQ ID NO: 1054 - DNA, 84157 bp, Arabidopsis thaliana
gatcttgatcaaaaaattcaacggctaagatgaactcctctttttctcatgaggtattaattgatttacgatatgaaatgactaatcaatgcaacggttagatcctcttcaaaaaaattcaatggctaagatgaactcatctttttctcatgaggtgaccattgatagaagacataaaatgactaaacagtgcaacggttagattttggtcaaaaaagtttaacggttaaaatcaatttatcttttcctgataagatgaatatcacaattccatgctcttctatataatgcgcaatatgtttagaactaaaaggaatatcactatcttcttctatttcttctcataaaagatgagttttaactaaggtagttcatcttcttcttcatcttcttcatcttcttcttcttcatcttcttcatcttcttcatcttcttcatcttcatcttcttcttcttcaacttcttcttcttcatcttcttcttcattttcttcttattttgtcgtgccattgttgaggtatttgcatgtcgttatcttcgatcacctgacgctaatgatgttgcacgcctactctacattagcgaatcccgaggatttccaggtatgttgggtagattagattgtatgcattggaaatggaaaaactgcccaacaacttggagaggacaaaatgctggtcgtagtaaatctcctactattattctagaggctgtagctgattatgatatgtggatttggcatgcatattttgggttaccaggatctaataatgatattaatgtgttagaggcatatcatctttttgctaatctagctgaagatactgctccacccgctagttatgttagcaatggaaaaccctataatatgggttattacctagctgatggtatatattcaaaatggtccactcttgttcaaacaattcatgatccacgtggtcccaaaaagaaattatttgccatgaaactagaaacttgtagaaaagatgtggaacctgctttcgaagttttgcactcgaggtttgcaatcgtggcagagccatcacgattatggaataaaatgacatcttgtatcataatgcataatatgatcatcgaagatgagcgtgatattgatgcaccaattgaagaacaagttaaagttccaattgaagaagttgagatgacgggtgatgatgatgcttgatttcaagaatttttggcttggcacagacaaattaaagaccgagaagctcatattgaacttagaaatgctttaattgaacatttgtgctcacaatatactaattctgagaattagtacgatgtaatttatgtttattatgtttggtttatcgattgtaatattatattaattaatgaagaaaaatttgtttaatataataatatgttgtgtttttttattttgtattaaatttgttcaatataataatttgttgtctaacatttgttttcaatattttttttttttttttaagtatcaatattttaggttaataatataataatagagaatagtatttttagtgtgatatttggtgttgtggttggagatgaaaaaacatttagtgtgaaaattacattaaatatagtgtcatttcaccaccattttagtgttgtggttggagaaaaaatgtgtaagcctgccataaaaaatctgtaagtctacggatcaagaaaaaatgtgctataattaaacgatagacttttgtaaaatcacaatatttttaaagggtatttttgtatttattatattttacagaaatgagaaaatagtattttaaaaaagaaaataaccaatttaaacccaacttttataagacattttagtaattaatctcattatttgagttaatcaagacatatcgttattagtaagtatcatttccatagtttccttgtttactttgtgtattgaaccatgagtgcacactcttaacttggattttccattctcttttgaaaggcttgatttcggaaagcctagagatgggtaactgtgcggccattttatgatgtggaaggggaagagtaattttgctcgatttttgaaggtgagtgtatgattctaggaattattggacatatatttatagtaaatcaatttcgtgaagcaataagttaggttttgcgaatattttcagttcattaggatatgacctaataatctttgataaggtatatattctttctgcaaaaggatcaaaataattaattgtattagttttagtaagtcatcatattatcgaatgataattagtttagaagaagattgctagtaataattgaataggatactctcatcctattattcttataaatgtttaaagtacgtgattcagttattataagtttggtatgaagatattcggatatcttaatagttttgagatttatttgttatctatactatttaaggaaaatataggttgtgtaatttcacttaatttcaaaattaaggtgattttcaagaattatgggataatgatcttttggaagttacgattttattgttgaaggccttatagaatatatgtgttaatatgatttcgaatataaattcttgccatttctttgtgttcacgcacacaatttatgggatagtaatattttcaaagttataattttattgttgattgccttatatcatatactagattctgacccgcacatacttgcaagatttcatattttaagaaatgtattggaatacatttttagtaaaagatattgtagtgtataaattataatgtgcataaaaaaagtgtatagtgttaattatgatacaatagctaaattttttattaatttatattatttatattttatttgtattttgcatagtaaatcgaatgttagatttgtttcgaattgcggaataatatagagatatttggaaaatctgtgtatttttgttagtttgatatatatatacaaattaattgttttgtttgaaatttgatcaaattagatgatataatgtaaaatttactccgcggtacaccgttggtcgatttttttttaactaaaaattcgaattttaagttttagttgttttgtaaatattgtttttttttttgtttagtgtttaagattgtataattgtgttaaaattattaattctaagatttaactcgtagattatcgtcccgtatgaatagcaatccaaactagttccaccagataattttattctgtaaaattaaatattatttttgtaatttttaaatattcttattgtaatatattaaaaaatcgagggattgacctgtggtagatcttggattaatatatttaaaaataattatgatattgtagtatataaaactgatttttagtgtatacctttcaataattgtataaagtatattttaaaagtcaaaatttgtataaattaatattgcaacctcatgaaatcgtagtgatttacctgtagggtaccacatgctaatttttattttatttttatataaactaataaatttgttgattttagttaaaaataaaaaaataaattaagttatatttgttttgtttattgtttcagattgtataactctattttgattgttaattccatgattttatctgtggtataatattgaccaacacccagctagtttcttgtaatctagtgttgaccctgaaagaaaaatccataagaatatgcataaatgaatagtaaaattaggagataaacatcattagaacatgaagtaatttacttatgaatctctatctatttttttaaagaatcaatattctagattgattgtgaggcaaaatgtgaatgtatgtataacatttataagagatagattgcacgcaaaattagattttaatttggattcaatcttagattgtctgaaaaaaactaatctgaattacatattttaaatttaggatgaaaaaaatattttttttttagaagctaaattttccaatgatctcaacgattttggtattttttaaattaaacttatctttatgcattattgtaaatatggtagtcattattgttcaaatacagttaatgatctgtcaaaaaaatcatattactgtttgttccaaagaaaagtcattcaaatttcaaagaaaaaataagaatattggtgtgaatcaatattttctcatttgaatatttgcattaaaaattttaaacattggtatttaaactttgttttactgtttaaaaaaaaagaaataatcgaatctagaagaatgaatattccaaaagcttgtaactattataatacgtttaaaaatatattttcttttatataattcaaatttagcttagtgatgtatttttaaaataatgaaaattacctgttttagaaaaatactttaagagtttatatcatttaaattctaattaaaatgttaaatattttaatatatactgaaactattttctagataattacaaatctaaaatccaaaatttctcttttgaatatgctaaatcataatttaaaatcatttttatgtgtactaatcgaaaacaattaacatagttttgttaagggaattgtataaaatctaaactaaatgataatttgttattaaattagattgaagtttccgaattatctaatattatattaccaaaataaataagtttacatatatataatttgaattaaaatagcctgatatgttatggaaatgtttttaaatgatttccgaaaatattgggtatttattaatttattgatttaattcgatcttgtttaaacaaaatccaagatatttatttagttgtagtagttgttaatttactaaattacccatgcaaaaattcatttagttagttttaaactaccattacaatgttgtagttcacacaatgcttcccaattaatagtatagatattgaaatatgattttgaatctaaatacttgctatttctttgcgtgcagattagtggtgatgttagtgggccatatagtcacgaaacccatatagcctcgtgcataaatcctttaaatatttgacctgataatagacccgacaatcgaataaggatccgggcatttttattattttaaatgacaagattacatatgaacgaatacttaatttagtcttagacattataaaactacccttcaaaggttgtaaagtttcccaatgattcccaattaataatataaatgtgtcaatatggatttgaatataaatttttgctattttttgtgtttactcacgcaaactatgggatagtgatatttttgaagttacgattttattgttgattgccttatatcatatatattaaatataatttcgaatctaaatacttgctatttctttacgtagagattagtggtcatgttagtgggccatatagtcacaaggcccatataacccagtgcataaaatcttttatatatttgaccagaaactaatttactcttggcttagttaattttatttgcgtcatttcgagatatgaataaggatcaaaggcaaaagtggttttatttgataagcaaaatgttttgggttatttgatttttgagatgataaatgtgaaaaatagtcacacatatgtaaacaatatccttcgggattggctcttttgagttataattaaaatcggttaacaaaaaaaaatgtgaagaaaatacaacaagtatttttcaaacttatttcacgaattataatagatacactacaaaaaaagttcattttaaatcacttatatcgaatatttgtattacttataattgatgtaaagaaattttacatcacttaaataaacgattcgtatcttgttgatgaaaataatttacatcgatttattaacaactgatgcaacttcacataatatttgcatcgcttgttataactgatgtttactttgagtcggttataaaaactgatgtgatatttacatcattttctataagtgatgatattatttacatcactttgtctaaacgatgttagtatttgtaacggttaaaaaaacctgatgtgatatttacataattttctataagtgatggtataatttacatcactttgcctaagcgatgttagtatttgtaacggttataataattgatatcaatatttatatcacttacaaataaatgatactaaaactagtgtcaattttcataactgattttaattgttgtatcatgtctggtaaacgatgttagtacatgaatcatttataataattgatttaaaacattacatcacttctacgaaattgatgttatatttatgtcaattttcaaaactgattttagttgtagcatcatttttagaaattgatgagaatattattttatataattgacaaaaacatgtattgaaataatttcacatcatttataaagtggagctaatgaaaataataactaacggcttttagtttttttttttaaatccaacaaaaattaattaatgaaaaacaaaaaagcaaacttaattaataattaaaaaaactgaaaacaaactacataatcaatccattgtgtgcaaattaaaagtaactaaaaagttttgctaaacaaactttgattatactaattaactagcattgccttcaactctagcttaaacgtttatccactagctagctagcaccaccatccctttcctgaaaaaaatcattcaatgtataagttaattatctaaatttttagtatatatgaaattaatatgtaaatactctttacctgaggattaggcagatttgaaatgtttacaaatgctggatttgggatgtttgcaaaagctgttgcaaaatttgcagcccacgcacttgcctgaatattttgtttaaacattagtatttgcctctatatatataaaattataataatgcaattgaacttacaaagtattattatattattacttgttcaccggttgaattaccaagtatttgtccaaggaacgtagacattgcattaacttgatcacctaatgtctttacttgtgtcttcagctgggcaactaattcagaattttctatatcttttcttctagttgcattggaatgtctcactaatcttgaaggtgtgggcccacgaccaacacaatgtactcggcctggacgctctggaccgaacacctgactatattcgtcatccaagctagcagtaccgttgtatgtgacttgcggatttagattcaataacgtcgtaagtgcttcctaaaacgagcaaagaaagataaatattctacatagttaactagtaaatccaacagagactttaataaaaccaatcgcgcgtaattttgcctcatctgatacgaaacttccatcatgtttcttgcgactctcaataaaaaactccactcgacatggcgttttcccagtcttgattttctacgttaaacaatatacaaattcaacagaataaactaggtttctatatatcataactaaataactcacaatctcgtctctttttcttgaaaaactcttccttccacataagtgaggcatgatatgatttttctggttctttgtattccgttcttgcattttctgaaagctcacatgttgaaaaagattaattgcatttgatatagaaactatactacatataaatatccaacaaataaactataccctccacttatcggtgaatctcaagtgaaccaaatgagaccattgatcttcaggaactttttcgggtcgattctccaacgtttcattcagattgttacgtttgtgttctctccaaaaacgtaatttaacatccttgcatctgctacctagtgcacccatcacataatctttcctcatcattggatcatcaaatctgaatttggactgcaatgaaaataataataaaaaaaagtctatttcaaactcttcggctatttataaaatcattagtaatgtttagcaaacgttatccactaagattcgaagtcaatgaggtagaataaaaaattgagtcaaaaatctatagacagatattcttcaacgttctataaaaatctatagtcaaaaattgagtcaaggaggtagaataaaatctgtaaaaaaaagagtcaaaaatcaaaaatcatcaacgtccttcgcactatgtactgaaatttatatattataattataaattacgttttgaaaaaaacttgcaaattaaccgagtcatcatacctaactataatcttaaaacatcccattgtacaaaaatctatagacaaatgttacctgaattactgcccatgctctgtcttttatgtgtggactaaccaacctccaatcagtgtagttgatgggtagcaacatgacatcattgcttaactgacctaaccatgatccaagtaaacctccagaatcaccaattggctgattggtatattcatcaaaatgcacaataactcggtggttttgcattatctagacatcttttgatgtcatcattttgccttctatgtttccatcaacatcttgttgataaaccacatatacatcaaacccccaaaatcgaattagtctataataaatcaaattaacagatatactaaagcaaataagttataaaggagtgaatatttgactttgaatatatcaaaaaccaacgcagattatagaattacctatcacttctattttccatttgaagcttttacattctggggcaagtggaggaggcatagtgtaatctgtttccagatttggtagatcatcaggttgttgtgtttctgagtcggtaaagtccatgatcctaatcaatgtaaaagaaaaaaggattagcaacaaataattccattacagagaaaggaatatgatccttgattttcagcttttatctatgattcctaagattcttttgtataagcctaattgacatgcaattgcagactacgtactatcattgtaagaaaataggacatccagtttaaaagattgactctttcaaattcaatgaatcttaaacaaagtgtttttaacgtgacaggttgcaattgtttccaagggaatctcttgcatataaaacaaagcaacaaatcttgactttctaatctcaaatcattacacggtgtgatggaaaactgcgcaaaaaattgtgattttctatgactcaaatgtacttaaactattagataaataacaaatctctttatagcaatatagaaacattcatctaacttggaaaaaatcggagaaagagtaaaaaacagaaggagaagatggaagataaattcatatgactttgaaaaaacaaataatagagaaccaaagagctcaaatatcaatcttctaatggaggtactaaatgataaagatattagtatgtttagatgatgagaatgcaaacagtctacacaaacaacataaatagaacacaaaactcactttgtgtctgctggttgaattctaaatcgtgacctgagagattggattacgctctgtgacggttcctcctcagagaatatttagaaaccctaaatcaaacaatttattagtggtctatatttataaggaaaatattattactaattacacttaaatttaattcccgctgggttaaaatttagcgggatctgaaaattttagtgatttattattttaaccaaatgcatatgtataaattaactttttaataagtttgtttagtctatgcggtaatctatactaaaaaaaattaagcccaccttttttggaacctccatcaaaaattcaaggaaatgttacacgtgcaataacttagataaaaatgtcaaggctcacaactctaaaacttagcaaaattaaaacaggaagttaactatttgactaagaaatttaaacaccaagaaagttctcataccaccgtatctatttcatccagcaaggatattaatcatgcagatgattaaacaagaaagccgaaagttaattaatggaggacatgcatctaccacgcaactaaacaaagtactacctttgcagatggtgatccatcaaccgtaacaccggaatcttcagaatttctctgtgctgcttttggagtactgtcattaaatgaaccagaagctgaaagagatcgtggattctctgcattatccgccgcataaacaaggtacgagtttgcagaaggcgtaggagcaggaacttcataatgtgcaagatcaagctccaaactttctaaaggacactgctttatatgagacatcaaagtccataagatttatttctccccatgggaattctagattgatatggaagttgcagtcaaaactttgaaattacgggaggcatagaaaatcattcctgttgttttagttcacataactaacacattacagatagatagaatggcggtagaaacaaaaaagtagaagaacaaagtacctcaacagattttggatcaggattaatgctgacatcaggaattccacgtacagtagaaggctggaggttctccctataagctctccaactagtagcaagatcaattggagaaactctgtcggcgttgatgaagacacgaaattcttaaatcaccttaaaaaccaaataaaaaaatgtataatttgtaggctttaaaaattcacaaacaaacattaaaatttctaaaaaaaaatagaatccatacatataaatctttcgttcatcatacaaatatgctttagcaaacatattgaatctaagtgatgaacaaaaacaaaagactgaaaaaacaaaacaaaagattgaatcagagtataaaaagatataaatctaattattcaggtagtcttcataagttttgtggtttggagttagatacaatatcatcagtatttataattctaccatgatcaaagttttatagacttttataattgccgactatctaaacaataattgatcagaggaaacttacgtgtgatggtgatgcctaaatccagaagaaaaacttgccggtaaaaaccagaattcttgaacaatacttaacctgaataaatattacaccatacttcaatttaaaaaaattggagtaaagaagatgaaatagatatcataatttacaataacttacgtgcaacaactcgatctttgtttaaaaccagaaaaaaatggagctaagttgagaagaatctgattaaggaagatgataatctatcttatttataacaattaattctgtcgagataatataggataggtaggtgattaattatcaatctgattttttttaacgttactttttattttttttattttataatattaataatagaattcattttacatcagttttttttgatgtaaattttgaatatttttacaaatgatgttaccaaaaattaataaatacatcagttatctaagtgatataaatttctattttatatcgattattgtaaagtgatacaaataaatagaaattgcatcagttttatttaaatgatgttaaactaattaattatcacatcagttaatataaacggtactaaatcatatatatttacttcatttataaataagtaatgttaaataacatcacttttatttgtgattcaaaataagtgattcaatccgtccctttttttgtagtgatacgagatagatgtacatatcaaccaatcctctagaatagtttgatggtcaacgttacaaagtaaaataaaaggtacaattcttaaaacatcgaaagtatgagtcttgagactcttgaaaaacatacattcataaagttcaaccgcgatgatatttccagaacaattgatcttttccagaacatgaaatctcctcaacgatcagcttgctatgatgagccatagttttacaaacatccttgattttctctgttagttctattactttctccttgattgaggagaggacgagtttcatgttcacctcttttccttcattctcaatatcatcatccacatatatcaaaagatatgagatcaaaaatctttacttatgtacgcttaaacttatatacacataaaaagtggtcggaaaaatacaaaggaaaactctcccaggcactattaccaagacaccaaaattcattatttttttcaacgctggtgaagcttcggcttgccgacgttggaaccgttcttctcctctcagttacctcaacaatttgtatttcatcccaaacttttttcccatttacaagctttgacaacctcgtgaacgtttatgagagaaagcatggaagatgtctggagaccttcttccgatttcaccctcaaacctccctgtcgaagctaataccattggaaccgcctcaattcttccaatttaggcttacccagaaatctctctcgaaagaaatcacaatggacaaaatccgacgcagtaaggccacctcctcttcgctatggatttagagtgcactctaaccaaggcgaagtcatcccgtccggtgaagagatcaactttgatttgtcatttgtgtagttcctttgcacactcactgctacaagaaaactaacaacacatacacaggaaaattagggtttcacctaatgggcctatttgtcattttggtccatcaccactaaggctttattcattaatagagggaatggctctaatctccaatctgttaggcccaggttcatttgctcctttactttgctcaatccaattcaatcgatttctcgagttcctgatctgtgtggtcgaggacaccgccagaggtggaatttaatttctttgcattggtatagctatctttgtctaagaaaccttgtctaattccaattaatggccatgctttatgaagtcataagcttgacgatccttactcggttgattgacttttgtcacgactctctcatgtttttaaattatactctggtaagcttccaaccgatctcaagcctcgtcccacctcgaacagctctttgaagaatgttcaatatgcttccccaaccttacttaggttgtggctgaaacattgctctcggattgaaactttagaatgttatacacatgtttttaccttcatcgatttcaaggataaacagtcctcaatcgcctccacatctcagattcgattctagctctgacataaaggatgttaatatgttatatgaggtatcattgccaagaaggaccttttccacggatttcgtcggcgatgaccgttgcttgcgtcttgtccgatgagtttatcgaggacgaacgacattgccttcttctgtgtaggatcgtatggatttatcccttttgtttaagactttctcaatctttctagctacctttgttgtaaatttgctctaattttgtcttatgcatcaaaccattagagttgatgttttgtactctatatccttctttggttaaatgaaaggataaatgttttgaccaaataaaataaaaagcttatatacacaaggctaaattacaacattaaaccaagatcaggttaatccaagataaccagtcaacccatttattctaataagatgcatactgaaaatcgtacttaaataaagtaaaatttataaattaaaaaagtaatatatataatatatatatatatatatatatatatatatcaatcaaatgattagtcgaataacaatgtttaaacattaacataaataaacagtcaaaaacattaacataattacaactccctcaccccatcagtgactttcatggatgcgtgtataagtatatgatggagcacttcaaatatgatttgcatccagaagtacataaacattatttttcattaactaatcctttttaaaaactcgaatagatgcagcccgtaaaaacagtttttttttggttgggttttaataaattgtatattcaattaaaaaaaaatgagagtgaaagacacatcaatgattcaaatgtacaaaaaccttgtgaaatgtaaaaaaaaacccggagccttgccttgttcacacactaaataacattctcttgtttaacaattttaatgttttatatactttaatagtagttggggcattagactggataattatattgtttaagaaaagactaaataattaatgaatatttcttttagtaatagtaaggtagctggacttatatatacacgttagcaacaagttttcaaacttctttcaatgggtctttgctctatctcgatcctcaagtcttttaatctattttagtcaaaatgtagtatttcatttttcttactttataccactactgtatttaattaacttgtggtccttctcgtatggaatatgagagaaacatctaattgtttaaacgtgtgaggtgtcgaccagctctacaatcacatgatgtaacaataattatttaagtcttattcctctgtttcaatatatttgtagcttaaatgtgttttttacaaattaagtgttgtttttatttttttatacaaaattaaatatatttaatatcttttaatcaattagattttatagcatattttttactagtttaatttgaaccatttttattttagttgataaaaatcataaattttcgatttattttgtacttgactggtcgtctaccgacttgtaaattttagaaaacttaagaatacaccggataaatgtatgaaagaataatttgaaaagtttttagtcatcgatcgacttgtgattgaacattgaaaattagaaacaagttaaatagtaagaaaaagtaaagtagtaaactatgtaatattttgattacgtatggaaaccatcagaaacaaatatactcatcctcctaatcatctcgtcatccgcatgattgacaagacaatctgaaacatgcataatatcataaatgggtatagctctcatgatcttttccttatattgattcattctttgccggtttttctttgcaaatattcttttttgttataaataaattatttataattacatttcaagaattttctttttaaattacgaattcgaatatccacacgaaaattgatttatatagcatattttgatatgaagaaattgtggaccaacagactgtaatatattttaaagaaaccaaactaataataaaaatgttgctaacaattatagtcggagaagtttaataatctacacataaatagagtgctaaaatagtaagcaatctaagtgacgaactactaaatgggtccagcaccatgtaccataataatcattctagaagctttataatcttaaacaaaatttacatattttaattttattataaagtatatctggggcatatatcttattgtaagacaacctggcaatttcatttagttttcaaggagtgtttgttttcaagattcgtagttcaaataattttctcgagttgtggatcttgtattcttgttcgaaacaaactcgtacatacatacatacacatataaatatacattcataaatactaaaggttcaacaatttaatgatacactagcgaaaatctattacaaaaattaataatgcagtaaaaactgactgagagaagtaagaacttgcgtaactccggtattcatcctcataccactgcgtttaaactttaaaccatttcaacctttgtatggctgatgtcagcagacaccttctctttttcaatatgaatatgtattggtttggttacttatcttaacttaattatagtaagacatgcgcaacaaatttagagtgcttttgtttcccccaaataattgatgtgcataaatggttaaatagcaaaaatgttgtccatacgtgtagagtctttgtcagaatagaacttttatatttttctctttaatagcaaaaattatcatacttctaacgtcattaaagattttgtctttgatgcttatctgatagcatcgaccaaaaactctacttcgaaatgtaaagtgaaagatttcttattaaacaaattcttaaatacaaattaccaaaaccacaagaaagatttaaaaaaaaagtatataagaaacaaagaaaagagtcataattctgataatttaacatgtcttcaaagatcatttttaaatttcatttccaaagttgaaatgttcagggttaagagaacttttttctctatcttatgtaagaaatattaattaacatttttttccctattatatgattttatagttatctgttttctatgaataatattattatttaacatatttggtaattatttaaattggtaataaagaagttttttctaatcaatctctatcgtaatggattgatgagatctaattttaaaaaaatcctaatgaggaataggtcctctctccacctataaatatatatatttaaaccatcataagaatataaaaaacacaacacgttaaaaactaagtttatagacaaggtaagagaaatctgctaacctaaaaattcaggtaatccgttcacaaaaaaactatctgcaacaatgaatagaggtaatcttataaacctcctaatgaatctattatgtgattaacttaaatatttaaaaattttaggggttcatgtaaagttacacgtacatcttaatctagttttcaagtacgaatcttgaacgtaaaaatgtttaaacattcagattaaaaaaagacagaagatcgtataatctttggttacttggtttaactaattcaagaaaaccctaacattgccataaatgttgatacgtacagccgaaaggccacatggatacaaggtgagtcatcgttactttattgtatggaaggcattttctgatttgtttattgcccgatttagtatacacttcattaggcccattagttagagcataattatatttttatatttgtaaactaatcacaaattactcttaaagcatgcctcttttttcgttattttattacacagatgttgagattctagtggctcataagttcctttcgagaatttaaagacaacccactaatatattttataatatatattttccgccgagaactgaatccagaacaaagttatgcctctgtgatgatgtctataagaaactttttaagtgtccaaagacaaaaccttgttgttcaagaatattttctttttggtgatgacgaataaattcatggtacggatctatgtatagatttggtaatagggtacttgtagaatcctaattgggtaagaaaataatgagctggttctcattatggtatcgacacttgttcgaagaatagtggcttctcaagattgtttccgtgattgaggaagtctagctagtaaaaaaaaattatgattgacgaggctaatgataatgcatatgctacatggttaactatagagtctataagtacatgaaataaaatatttagaatcaaaacacccacaaaaagtaagaagtgactgttgtcaagcatataatagagatccacatactatttatatccacacgcacatgttcaagcagagacaaagatatagaaaacataaacatagaagagcaaattaagcaacagtcttacacagacagaagttgtagaattgatttgtgagtgaaaaactatttaagactgaacaagtatgcttgattggggagttcaaggtcatcatcaaaagcatgatcatgatatttatcaacaacaacatcaacaacaaggatgtaggaagggaccatggacacttgaagaagacaagcttctcgcagagtatgttacttcgcatggtgaaggaagatggagcactgtagctaagtgtgcaggtaactattttgattcaatcatggcttctaaaaacacataagttttactaatctaatctttataatctcgtagacatattagtaagcgaatcaccaaattataccaaagatcttgatcttctttctgtttgagtctttttttcaatgaaagtaagatttaattataatagttatatatacatctatataattaaataacacatgcttttatgacgattaatatagataagtgtgagatcatataagtgtatatggggtatagttgacctgattaagctctttcattctttttctttgtctcttttttatttatttataatctagaagcagtctcaaactttcacaaacagaaagaggacaatgtcatggtggaaaggttttacggtttattgtttttcgaataatcaaaagatgatcttttatgattccttgttttctgttttcaggagttgactttcataagttttgggaacatttttacatatattataccctttttattcgagcattttcgtcgagataatgttaaaatttaagagattcatactcatatattatatagataaagatcatcaagttgcattattttttttatatccatgttatatgtcaaacccatttatagtgctccatttcctttcatggaatttaaaaattagggttgaatagaagtggtaaaagctgtagactaaggtgggtgaactacttgaggccagggcttaagagaggacaaatcactcctcaagaagaaggaatcatccttgaacttcattccctttggggtaacaagtaagctactcttttttttcttcttgatattctctagtaaatggtaagctcaaacctacataatagattgatattatatatcaatgaaagaaagagatacaattactccaaagtttaactaaaatatcatagtctaaactattcttcatgagtctcaactctttattatcatacatttgtactagtgtatacctatgtttagtttttgtaatcaatcctttcatgagaacttacatattttcacaaaatatatataggtggtctacaatcgcaagatatttaccaggacgaaccgataatgaaataaaaaactactggagaacacattacaagaaaaaccaaaaatcttcttcgaagcaagacaaagtaaaaaaatctctatcccggaaacaacaacaagtggatcttaaaccacaaccacaagcacaatctgagaatcatcagtctcagctagtgtcccaagatcacatgaatatcgacaacgatcataacatagcttcatccttgtattacccgacaagtgtcttcgatgacaaattatatatgcctcaaagtgtagcaacaacctcatccgaccactctatgatcgatgaaggtcacttgtggggcagcttgtggaatctagacgaggatgatccgcatagctttggtggtggctcaggacagggaacagctgcggatattgatgagaagtttccagacagcggaattgaggccccgtcgtgtggctcaggggattatagttatactggagtttacatgggaggctatattttttgattagtatgctcgaagatatcaagaagttgtgtcttcgtaggttgagaaaaaaattaaaacacctcattgtgtaatttataactttagtagtgatctaaaactagagtggagtgaggctaataagatggtttggaatatatatgtctattctaccattgtttgtataagttttatggaataaatagtttcaaaataatctttccatttttttattccatgaacccttaatagtggtagacatcatgcattgtactatttcagtgaaaccttgactctgtcacatataattcatgttgagtaatctttcaagttaacttaaggcctacaatagctttaataagtcggttaaagtataagataaggcttaaggaaatatattagttttaagagttatctaaacctaattgtaataggattagcaaagttgtgtcttctataaatacatcttttggttaagttgtaaccataagagaagtgatagagcttgtttagttttgagagagtttctaaagatcaaaaacgagagtaattctttatataagtttgttcgaatcttctttgtttggtatcagagcggtttcgatcaacttgaaggagtcaagtatggaatcttgaagaacacagcagagacgtaatcgagccatggacgacatcgactaaccaccacaacagaaggatcttgtccagacagccatctaatgccctatgctaaccttgccaaactatacagtttgtgccatgaggatgaaggtcttactacgggttaataagttgtggggcatgggcatagttgaacgcggtttagcagactccacaaaacgatatcgcaatttctttgttgttccaatccatctcgaagattctaatcttacaaataggtgaacaagtttcttctaaagggatttgggactcaatcaaatctagaaatctcggagttgatcgagttgaagaagcaaggctgcaaacactaatgtatgaattcaaacaagtaaagatgaaggactcgtagatggtgggtacctttgcatgaaggatatcagaactagcatcaaagtccgcagtcctaatgacgcaatcagaatctctaagaatagcaagcgtcgaacttgaagggttaaaactctagaaatccactacattagaaaaactctctacttttattaattagaatgataaaaaacgtgtctaacaaataacttagggtctctatatagagaacaaaccaaaacataaaataaaaaacttgaaataggaattatcaaaagaaatgtaaaactgctaaatctctcctctctaaagaacttgtccccgtctgcacaatactcatgaatgtcagctacattgaagatattggaaatgttcatcgattccgagagagccacaatataagcattatcattgatcttccgcgacaacttgaacatgccatacttgcgaggcttcagcttgttgtagtaccaactggaaatctctctttacggaggaacaccatcacatcatcaccgtatttgaaaactttgaatctccgacgtttatcagcagggaccttgttctttttccttgtagtctctaacttagtcttgacaacttccttaacaactaaaatctcttcagccataatttcagctgatgcacttaccccatgagcctttggtaatttaaccaaatcaaccacatgcttaggaacagaagtatacactagagagaaagatgatttccctatcatagaatgttcagcactattgtaagcaaattctatttgaggcaaagctaaatcccattgctttggtttatccccgcagatacttcaaaccatatttctcaaggttctatttgttacttcggtttgcccgtcggtttgcggatgagctatagaactttggttaagagctgttctaaacatcctccatagagtaattaagaaatgacttagaaactttatgtccctatccaaagtgatcgactaggaaccccttgaaggcgcaacacttccttgaaaaacagcttggccatgttggatgcatcagcggtcttcttgcatgcaataaaatgtgtcatcttggaaaatctgttaactaccacaaatagagaatccacacgccgttgtgtacatggcaatcctaacacaaaatccatagctaaatcttgccaaataccatcaagaagaggtaaaagcatacagagaccaatattttgagattgacgttttgacttcagacatgtataacaccttttgacaatagctccatcgtctcttctcaaatgtagccaaaatatatctctcccatattagcaatgtttctacgtaaatgcccactaataccacccccatgagaatcttggatcaacttctctcttagtgatgagcaagaaatgcacaatcgatctcctttgaacaagtagccttctcggacatgaaactatgcagaaggatgcttctcgttgcacttggcccaaagttccttgaattcaacatcattttcatacaactccttcataaactcaaagcccaaaatctcttgtgttaaagtaagtagcaatgacgctctcctactcaatgcatgtgtcaccttattaggtgcgcctgacttatgctcgattataaaagggaatttctgcagaaaacttatccaacgagcgtgcattttgtttatcaccttttggctgtgaaaaaacttcaaagcttggtggtcagtgaagaaaatgaactctctctgaatcaaataatgctcccactgccttagagctctaaatactgtatagaagttttgatcataggtactccatttctgtcaagcttcactcaatttctcactgaaaaaagccactagtcatttttcttagggcaggacaacccgtactcccactccactagcatcacattcaacttgaaacactttatcaaaatcgtgtaatgctagaactggtgaagtacaaagcttcttttaaataaatcaaaacttttctcttacttgaaaccccaatgagacgttcctttcttcaaacactcagtaataggagaagtaatagtactaaaatctcttataaatctcctatagaaggtagcaaaaccatgaaagctgtgtacctcacagactgatttttgggcaggccaatccctaattgcttttactttatcttttccaacaacaaagcccaaaaataataacttattagtgaatgtacacttttcggattgatgtacaatttattcccttctaaaacctttaacacatgtctcacatgctccaaatattcttctttggttttacaataaatcagagatcatcgaaataaaccattacaaaagaacctgtaaacggacaaagaatttgattcataagtcgcatgaaggtattaggggcttttgacagtccaaagggcattaccagccactcgtacagtccatcttttctcttgcaagctgtcttctattcatccccatgtctaattcgtatatgattgtatccattgtgaagatctatcttggaaaagaccttagaaccacttaactcgtcaagttgtagtccaatcgaggaattgggaaatgatacttgatagttattttgtttatggctctactatctacacacatccgccattgattacctttcttaggaacaaggtggactagtactggcccaaggattcatactctcatgaatgaaccatttcttcagcagatctttaatttattccctcaatatctcttttgcccttaggactcatacggtaacgaagaagattcggtaatcttgatctcggaataagatcaatatgatgctcaatgttgcacataggaggcaattcctatggtagctcatctgcaatcaattccttgaaatcttttaggacttctagtatatctgttggaattgttttgtcttcttttatagcactcatcagcctttaatcaccactagacatatacattgagtttccttaattgcttcatcaagctctttttcactttgtgtcacaatcaagaagttagaatttttcttcactagattctgatcaaagtgtgaaacaggagccatagtgatcttttgtccattccatgtaaacattaaaacgttgtcctttcctcgatacgtaatatcattatcgtattgccaaggacgaccaaatatgatgtgacaaacatccaagttgagaacatcacaaagaacctcttctatgtaatgcttaccaatggagattggaactttataagacagtgatacacgaaattgagagcctttactaacccatcctaaggaatatggcttttcatgtaacgttgttggtaacttcatgaattccaccagtttctgagaaactaagttttcactgctaccattatccacaatcaagttacacactttgtcgttaatatattatcgtgttctaaacaaattcttccttagatgataataagatcctttgaagtacaaaatttatcatctcatttgattcttcttcaccaaattcaacccatgcatactcatctgcctcttcaagttcttcttctccctctagaaaagctacagttctcctactaggacaaacattcgatttgcgtccttgtccttgacaacggaaacacttatcgatggatggtctcacataagtgttattttgcttctagattgatgtttttttttttcttctgagcattattataaccattgttagaactatcagatcctttgttaccaatgttagcatcccttgtcactatagtcttctccttatctcttgttgcttcacaattattttgggggtgagtatcttctaaactaagtaaaattacgggacgatttttccattaactcaactttcaaagctagaacagaagtttcttgcagagtccacacaatttgcaagcccatcttcttctgtatagaactctttaatccactgatgtaccttgccactttctgattttctgtctcccctagatcattaggctaagaaaatcgcaggaactccacagtatactttttcacggtcctttttccttgaacatattcagtatacatattatagagaatctgttcatagtcctccaacaagaacctttccattatgagctgtttcatacgcctccatgtcctcaccgccccttttatttgtctttgtatctgaacaacaagtttatcccaccacatagcagcaatattctttaatctgattgctaccatcttaacttgcttgttttcagggacgcccataacttcaaataacctataaacgttgatttgccaatgtagaaaatcctaaactccaatagtaccatagaacaatggaatgtcagcctatacacggtaatcatgattattctgtcaattccttcgctcaactctaatcatggaatcaccatatgattggtcatagcagttagagccatggtaacagccttgatcaagtcctgaaggtctgctttcgtcaatgattgatctgccatagttgatcaagcttgaaaagagactatagaaagcatgctctgataccacttgatgcagttggaatcccttggaatagcaagcactatgcctagatagaaatcaagttcggaagcatcaaacttgaagggttgaaactttaaaaatccaccagattagagaaaaaatctatgactttattaattagaatgataaaacgtgtctagaaaataacttagggtctctctatatatagagtagaaaccaaaacataaattagaaaactctatgcaaagtagtaagtttgaaataaggaagtataaaaaaaattaaaactgctaaatctctcctacatcacctagggaagtcaatcgatgaaacaaagttagtgaagaagctccttaatagtctaccacgagccaagtatattcaaatcatagcatcacttgaataaatcttagatctcaacaaagccatttcaaagatatagtgggacgaataaaaacttacgaggagcgtatacttgacgaggaaggtaacattgagactttgggaaacctacttttctcaagtatgaattcacaagataggctacaaagaaagccgtggcagattcaacatacaagatcgatcaaaggaaaagacggatcaacccgatgtgttgtgtttttgatgtgttaaaatgggacactttgcttcggtgtgtcttgagagaaaacataaatttcaagaggtaaacaaggttgaaacacaagaatcggatgcggatctctacatgcatgaatttttgtttcctaatgaaaaaaatatattgccaaaagagtacaagaaagaaaaagcagaagatgaaatatagtactaagataatggtgagctaaacgaagttagaccattcttctcggagctaaacaaaaacgtcaaacagaaggtgaaatttggagatggaccttgtgttaacatcgacggtaaaaggtcaattctcttcaaaggaaaaattagagaacaaaaaactcttaaccgatatctacttcatccagagctaaagagtaacacactaagcttgggaaaaacaacttaacaggttaggatgttagaataagacacaaccacctaacattacgagaaccaaagatcaatctcaacattggaaagtcggtttgcttgcactcaacgatcgaagaagaaacatggagatggcatgcaagacttggttatataagcttcagaacagtcaagactatgtcaactcgtgagatagttcacggcatacccaagattaattgtgagaagaaactctgcaggtcatgtttggttgaaaaacaaactcatcaatcgttttcgaaagctacacaataccggtccacacgaacgttggaactactttatgcggacttgtgcggccctataacactagttaccttacttttatcaggtatatctttgtaatcattgacgattacacaagatacatgaggacgattctactaaaaagagaaaagtgaggcgtttgaaaaacgaaagtcgtttaaagctcttgtcgaaaaggatcttgaaaacgaaatcatgacaatgcgtacagatagaggaggggagttcacctcacaagagttccaaggattctgtgacaagaatgggatcaagcggtacttgacgactcttatattaatcatctccttggttgagttgtaataataagaaaaaagagaaaacttgtttagttttgagagaactctcaaaacatcaataaagagagttatcttatataataaagagaggtttattttctctaaaaataatttatctttcaaccgaagatcaaataatttttctctaaaataacttcgagatataaaaaatgtatgagtagattatagtatgtgtatgttgacaatatgataatttgtttatttgttttaaaaaaatttggctctcacataatcgattaaatgtttatttgtgtaaaaaacatttttgtaaaaagttacgtatatcttgaaagaaaacaaacaatataactgaccatataacttaagtcataaatatcatttacaatataataaattgaatgaaaaaacaatataataaagtaaggtttcttcaaacttgtgctctaaaaatctgacaagtggcgctctataaattcgacatgtgtcattcttctgaattaaagaatgaaataatttttctctaaaactaatttatctttcaaccaaagatcaaataatttttctctaaaataacttcaagatataaaaaatgtatgagtagattatagtatgtgtatgttgacaatatgataatttgtttatttgttttaaaaaaatttggctctcacataatcgattaaatgtttatttgtgtaaaaaaactttttgtaaaaagttacgtatatcttgaaagaaaacaaacaacataactgaccatataacttaagtcataaatatcatttacaatataataaattgaatgaaaaaaacaatgaattactcacactacatttcagttatgttgtgaggttaatattctatttaatgacacaggtgatatcacgttttattttatttattatgtctaactattgcagttttttttttagtcaactaaactgttctatttcataaatcaaagcaggtacattacacaaacataattatcatttatgtaattatgatcatgatttcagtatttagtatcatattaaatatcatttttaatgtaacccttcaccttataaaatgcaagacgctgcatgtcagtttttttaagcgggtttctctgcatgtcagttaattaacgcttgaggttgaagcttcattctttctataggaagaaaataaaaacgtgcatggtaaattttatatttttcctgatacctgaaacatcgaaataatattttgtggtctgttaagtctttccacataattaaattgaaagtagagagaaaaagagacaaaacacgaaccatatgagtatgatggattggagaaaccaaagaatggtaatctcaaaggtttgcttcgtcctctgtattatgttgttttttatttttctcattttcaccaaataaatgaactaaaatcaagttaattttcctctctcatttttataatttttaatatctgttttatgtagcctttgaatcgtccaaatgtggtgatactgattcacactttgttacttctcttcattatagcatgtttcatgtgtttttgcttatacatccttttataggtgcaatggtagatacaaagtggcttaagaattattacactaagaatttcttagcaactattacactgagaatttctgttcatgatgaaggtagtaggtaggcaaatcatatatgtgttgctcgatgctcatatgtggtctatatcttatttaattattaatgtcatgattctaatttttttctccgactatttgtgttttaactattctagtcacaaccatagttaaagtttcaaagtttagtaaatggtttcaaaggcttttaacttcactttagttgttcgacatgcgaacccgttgtcttatacctctcttcaacctgctattttttgaacatgtacaatattttaatagaggatataaacatagtattaatggatatatatatatatatatatatatatatatatatatatatatatatatatatatttaactaaatatctttttaaaaattcttttatgtgacatttttgtaggttttaaaataaataggttgagtcaaattttggagtatatacataagtgaatatgtgaaaggtggatttcctttataaatgacttgatgaaaaatgtctaaggtaccttctcacttttacatgagaaacaaggtattgtttaccttcattttctacttattcttcatgttttgaagttgacaaatggtttataatgtttattttgtcaagttgctaaaattcatattattctttaaaattattttagtttttaaatgaaaaataccaaaagtgagtactcaaccaaatgataaacatatatagccaaatgtttattagatccatatgatatttcctggttggtcctgcttaatatattcacttttttattttaatatgtggttacttctttaatttccgtctttttcattttatttttttttgtcaaacaaacttgcattaaactaaaacctcaaaagaggaaggttcatacaaattgaaatagagattacataaagggacataggataaaagctccatgagttttccaaagaggtgctagacttgaagaagcttgtaaagtttgaaaaatctgttgaagccaagatggattcgaccatggagacgtactccgcgaaatcctcgaccattgaatggtcataaacggcatgagcaaaaaacgcatacttgcctttgataaagtgttccacaaaggaggctgagacttggataaaacctcttaaacttataaagtgttccgtctctttcatttaatttatagttttaatatacaaacattgttcctatttgtacacatttaatttattattggtcatgtcataaaaagtttgatctttgcaaatttagataaaatcttatgtactaaatagtaacttataactcattttactaaccatagtagttgaaagaatgcttatcttttacttatcatgctaaatttacactatattttatttcttaagttttatagtgaccataataattcctcttttgatgcatttgttggcaaatgaggtaatctataaagatattacatggatgaagataatatagagcctaggagatttgatgaatgatgaaactatacaaaatatataatcttcattgagatcattggtgggaaattctgttaattgaaattaatttctatgttgttacattgtactttcaaatttaaatttactttatttttcaaccgaattatagtgtctttccttcaatatttgattatgtgcatcgaaataattttgaactttttaattaaaaatcatgtgtatatagtaaatcattagtaaataaattcaatactttcttaccatattgttcaatgatggaagaaatagtaaataatttgaatattaattgtataaagcacttagagttcttttgattaatatcaattagtatcaatatatcaatatttatatatgttaattttactaattaatcaagactttatcaatctcacaacttcaaatctattaactattttacaatttacagacatactataatcaatatgatataaacaattatgaattcttttagtcagagaaatattgcatatcattttcatatatatttaaataaagcacaaggcttatcttgtatatcaatattataatttatttcttttgatcaatttgataattttaaattttaaaataccaaaaataattttagattaaaattcataaactaaataattagtttaaaactaaaatatcatagtcacaatatttatgataatttttattaaatgtattataaaataatttaatattatatcaatatatatattagttatagacatatatttcactacattcatttcacccacacatcgcgtgggtcattttctagttctttatataagcttgttcgattcttctttagttcatatcaaaacacatttggttaatatttctcaatactattaccggtgaatgtcgactaacaaacatgtgaatatatgtatttgctgtaaaaacactgaagttttggagtactgaagttacgagcgaagaatgacattgctaaaaacatgttacttactgtaaaacgtcataaactcataccaaaagtttaccatattatttttaaattacattagaagtctacaattcaatttttgttgaaaaggttatagagtgtccatgataatttttcaaagtagtttgagaaacatatgtatttgagaaaaaaatatatgtacatatataaactgtatggttgtgatacagtgtctcgatcgtcttctcttatacgttgggctttgcgtttctgcgttgttagttggacatttggttttaaaaaaaaaatagagaccagagaaaggtgatttgcaaaaataaccatgtttacaaaatggtgtcatatagatttgatctgatatagataatatttttgatgtaaattattatcacttaagatgatatgtgtagaagtaaaatcaaatttattatgatgaaaatatgtaccatcccggtttcagaaatacggtgatgtatgtggagaggtttaaaagaattgatttggccacatttcaccaaagtgcacttttctttttggttaaacgtcgttagaaaactccacagttaaacgtgtttgggcaccaataatttcagaatgggtgtgcttctggaatgtaattgtcggaaccatgtgagtgaggacaaagcatagggaaagatcatgtggtagtttgtaggatcggtaaacaagttttccaagcctcctggacatagcagactgaccgtcggacaagggtgggctcacatgcccgagagagaacgagggcacattagtaaggacggtcgggatgttacaagtggtatcagagctaaactaagacaagtatgggatcaagagggctcacactgtcggggtgacaatcttggtgtgcaatgaggatgttgcgtttggttagtgggatgaattgtaacaccacagtctcagaaatatggtaccgcacgcatatatatttaaaagaattgatttacctacttgtattaccaaactgctcttatcattttggctaaacgcgctgaaagaaatccattgttaaaggtgcttgggctggagtaattttaggatgtgtgaccttccgacaagtgattgtcggaaccatgcgagtgaggacaaagcatggagaaagatcatgtggtgatttgtagagtcggtaaacaaatattaaagtctgctggacgtagcagaccgaccatcgggcaaggatggacagagtgtccaaaagaggacctgggaccctagtaaggactgtcgggcgttacaaaatagatagttaaactgtattgcaaaattgaatgtataagatagaaaactgtatttttctaaatactatattaaatatagaaaaagcgtatgggctattatttagaattcaaaaatcattaaaagaatgtgtgtgtagaattaaaatgtataaaaaatataatacataagacttaagttttgtttaaaacaaaaattattcaattaaatatctagaaaaatttatagattactattttactattctcaattcaaatactatccataaacatttacatttatatcttacacctgtctatttaggttggcattatctagtatgatataaaattatgttgtaggatatttgaggttttcatcctttttaatatatagattttattattattattatgagcgttgatatacctctattttttactgcttttagctatgattgaggtataggttataaagtctatttgttattcctaaagtcttttctagtcattttcaggtttttacatgtttgggatgcatttggagtttatggatcattatggaggaaaacagagaacttatgctgcagaagaaatccggagaccaaaaaatcacgaaggtgtcgagcgacaccaatacctgacgacaattaaaatacgcaacttgttgaagttttgaagatttctaaatttgtcccagaacgtttccttatttttaaagaaatccctgcacgttttaggacatatatattaatatatatatatatatatatatatatatatatatatatatatatatagattttaaagtaattgttaaaacctaagcttttggaggctattctctttctctgttgttctttgaagcaaagcgctgtggagactccctttagagaagatcttcctaaactctaatctcttgatatattcattattgatttctattctaatcatgttgtttgcttcattcatcatgtgtgagtagtcttcttgttaggtttagggtttctcattagggttatagatgatttagtagatcgtccaccttttaggatatctttagagttcttcatcttgattattcttaatgctagttctagattggccacctagaacttgatcttaaataataggtatacccaccataagtacctgttaccagaactatcatagatggacctaagtatttaagaaacaaacaggtaggctcatagaagggctacggtttagatacttatgtgaactaatcaaacttgataataatgtatgtttagaattagggattcacggacacatcactgggaatctttagctctaggcatagtgagtagcacggcacatcactggttactttatattagtgacttgagttctagaacggttcggtaagaatcctaatcatagctagatctgttagtcatctgtttcctgagaatatcctaagcctaacgcttttattatcttattttacttccatctaatctattgctattgcttacttttgtttctttttattttctttagtattttacttagcttaattcgatagccattagtctactgtgtgatccgagaactttgtgaatttgatccctaagtgctgcaattgacctctttatttgagagagtggtcttaggattaatttgaccaatatcaaatttggcgccgttgccgaagttctctttgattcaccattagactaggtgtagaatttatactaagttttttctttcttttgttactcacgcgtttcctttcttcttttttcctctgacagggaaactaaaagatggaacgcaacaaattgattgctgatatcgacgacagtgtcaaacgacaccaacaggatgtcgatcgacaccatctacagaacaaaccagctaccataggtgacttcaacaatgttgatcttttctactcaaatcggtcatcgatctagctacctccttttgcaagtgaaaaatttgctattctcactgccaattatgatcttgtttcagaaggaaagtttagaggtgctcttgatgaatcaccactagatcatttggaaatcttcaaagacttagtgtcctcaatctatgcagatgatgtaccaactgattatcttctttgcaaactctttccccactctctaacgggaagaggaacatcatggctctgacagctagacgatggttcattgacaaaatggacggacacgaagaacgcattcatgaaccacttccttgatgattcagtgacagaattactgcgagaaaatatttcttcattttctcaagatccaacagaaagtttgaaggcaacttggatcagattcaaatcctatcagaaggactgcccataacatgttttccaagaaagccatctcatcaacatattcttccgcggaatcgatgagtagtataagatgtgtttcgatggtgcaagtgatggcaatttcatgaaaaggtgtcatagcgaagcactggtacttatcaacaatgctgtcagaagtctcacaacaaagaggataaacagtaggtagagaacattggttgaagcttccaccgttagtagagaggatcacgattctacacagattacttctctagctgtcacttcttccatcaaagcccacccaccacctgttgttaagagtaaaactgaagccatgttagaggaattacttggagagctctttgaaatatgaatagacattaggaaactccatcagtatgttttaacgaaggaatctatcaatgcagttaaactgttgagtggacaacaacaacacctcttcgagaaaacctctccgagatggactgagagcagccttacaattgcttatcatgttgttttgctggattgtgaagatgagttggtgcaagttgaaaagaatcaggttcattttgacactgtagaggtagtgtcggccgataccaaccactggtatcgctcgacaccaacaactatataggagaagtcacgctgtgaaaaagtcatatctaccagactcgacctcgacagtgtcgaccgacagcacctgggtgttgatggacaccagcacgaaacaaacgagctagtgttgacgtttgacagtgtaggatcggtgccagacaatagtgtcgaccaacactcacctagtgtcgatcgacactggactcacactacacatatcttccttgaatctccaccagttactggacaagtcttcacaccaaaagttctttgtccaatatctcgatagtcaaaacaggatattcatgaggagtattgcatgggtataatggataagattctacttcaattgcctcctgttgataaagagaagttgtcaccatcgcttccaaatgctattacactagatgaagctccagagaagcaggatgagaagggaaggacagtacttgtctcagaacagggcagtgacataaatccaagtaggatttcctgagaagctatctgttcaaggaagctttgtactcgatttttcaatctctacagacaggtttcctcgttctctttgtgatcttggttcttgtatcaatttgatgcctcattctgttgatgtaagacttgggatgacaaatttcatggctactaagattactcttctcctagctgatcgctcaaagagaatccctgaaggtatcttagatgatattcctgtgaaaattggagaatgcttgattccaactgacttcttggttttggaatatgaagaagaacctccagatcctcttattttgggaagatcattcttagcttctgctggtgctcagattgatgtgaagcttggccgaattgctttgaatgtgtgtgatgtggttatgacttttgacattgacaactagaggaaaccacctatgattatggccaagcattctctatagagacctctatagacacagttgtttatcctggcaaggtattcagtaacagcaagcgtccacatgaagaaagtttgaaattcgttgttgagaatcgatcatgcagagatggtgtcgattgacaccatcacttgtgtcgatcgacaccccacacgggctgcacaagagttgttccctaaagatagttttcgagttgacatcactgctgatattccaaggactgttgtaataacaaccaccacacctctaccactacacccacctccgaaaaggctacggtactcatctcttccacctaaacctcaggatatcatcaatacgactttaaagttttcaaaacactgttttacggtttagcaagccacgagttttttgtcgagcgcttgttctttcttttgatgattgtgcaggaaataagagtattgcacccatacctgagtcatgccctgctgatgttcctcacttcctaggtcaacctcacacgccaactgcctatacgccactttggatgatgagacgtgttgttaataagcatttactgtcaccttcttatccacttaatgtgtaaaccctacaaagtcaaactattgactataaataagcgcttagtgggaggtaactcactggtatgattttctttttaattatccagtattttacgtttttcttttatttttctcgcttactttgtatttgaatgccactagggacaatgttgtttaagtgtaggggacgcagttactaactacgtttttctttttgagtcttattattactcttatttttctttttgactcgttttattgagtcaagatttagttagaaattatgatctgtatttcttaagaatattgcctggttgattaatgctgcaggttcgactattgaaaaatcaaaatggcaaatcgacagattttaggatatcctggtttacaatacaatccattgaggctggcgctaatctcattgctcttccttacccttggtcaaaacggttaatattcatataacttgactccttgttcatacctgatatatgagaccatatagaattattatcttcccctctgtgataaaaaaaaagagagagtgtttcctgtagtataaagggttaataatgtttcctttcatcccataattttatattctcaggaatgatcaattgcaaaggttggaaatatgcggaggatatctatctgatgaagcgagtactcctttgtcctatctctgaaaagaataagtctggggagagaaagaatataaaaatatatatatatatatatatatatatataatgtatgatttatcatggtatagtagaggaatgagtctagaaggttcttgaatattagtttgcttgatgagacccagcaatgaaagcctgttggatatagttgtggaatttaggtatggaatctagaatgttgtgtaagcttgcaaagaattacatgttgcttagtgatataaccctatttttactgttttagctatgttttagatatgggtttttgagtctttttgttatttctagagtccttttagagtcttttcaggtattttattgaaagggacaacaatggagataataagacattttggagcataagctgaggaaaataagccaaatgacgaattcactgccagatcaactcgagagtgtcaatcgacacaccctttgtatcgatcaacaccaattgcggcccagagaagtccatcacgctttagagtttgaagataaggaaatttgcctcagaagactttttattttcattattagtctatgcacgttttttaggtcatagatatagttttaatggtcattgtttagacctaagttcttttctagcaacaaagtcttttgcaacttgctacaaaatactttcataagctattcatcccctgttttcagagattttcaataacagtgcagagatcttttctaactcttttctctattgatttgtttatgttttcttactcatatatgctgtttgttttatccatcatgtctgagtagtctacttgttagggttagggtttctcactagggatttatatgatttagtagattgccccttcctaggttattagtaagattcttcatctttggttattcttaatgctagttctagaataattaactggaacttgatattagataataggtatacccaccataggtacctgttaccaaaaccactatttgatgggccaaagtttataggcgtctcgaataagatcggtctattcacttaggtgaacttatcaaatttgtttagatcggtctattcacttaggtgagtagcacgacacatcaccgattatgcaataattacggttggagttcgagaacggttcgataacaacctatctaattctagatctactaatcatatgtttcctgagaataacctaaacctgacgttttattatcttatgttacaaccaaccaatatgctatttgcttaatttgctttcttttaatttacttattacctatctagcttaatcttcacacttaagtttattgtgtgaacaaaagaactttgaggaattcaacccttaaatactatcgacgatctcttatttgagagattggttttaaggtaacttgaataatataagttaggatttgattaaacttgctaggcatatggatttggttaaaatgatcaaggcaataggctagagaatattgggagttcctgcgttttcaaacctcttccacgggatcggcttttttgttttgcttgagggcaagcaaaagctaagtttgagagagttgatatacctctatttttactacttttagctatgatttaggtataggttttagagtctatttgttatttctatagtcttttgtagttcttttcaggtttttacatgtttgtcatgcatttcgaaattattgagcattctggaggaaaaagagaacttatgctgcagaagaaatctagagaccaaaaaaccacgtaggtgtcgaccgacaccaccaccgctggtgtcgagtgacactaatacctgacgacaattcaaatacgcaaaattattgaagttttgaagatttccaaattcgtccttgaaatcttccttatttttaaagaagttcctgcacgttttaggacatctaatatatatatatatatatatatatatatatattttaaagtcattgtttagacctaagcttttggaggctattctctttctctattgttcttgggagtaaaaccctatggagactgtaactgacctctttatttgagagagtgctcttaggattaatttgacctacatcaagagtaaagagtagtcctgtcacacccgtctacctcaacattgagacagtgtgctttcaccttacttatatctttgctctattccactttcttaattcaaatacaaaattgtcttaaaaataatcttaaatcactgaaaactatttaataaatcgtataagaaaataacaagacagacttgagcgactacacacaattctcaccgtgacctggggaaaaagggaaaagaaagggatgagtaaagaattactcagtgagaggatcctttccgcccactggaaatacgatacacgattctacctttaaacaacaatcaataatcacatagaaacagacacaacactcatatagtttgcatcaatattcaaaactataacacacaactcattcttgcttaagcaagatctccacatcaataccaggttcgatcatttccctgacctttgaaccaatcttattccactggactcgtcagtcttttattgagctacaaagaacccgtcaattcaatgtagaccattttccactattccacttttccacttttccactgtgattccactttctcatataactcataatttacttgttatcacaagtacaataattcaatcatcctattttactagaccaatcatcatatcatcaatcctaattaacaattcattattactaagcaaacagatctattcctatgcaatgaatcatgaagcataaaaatagaaacatgtaatcgaatctccgcagatcacaccctcactgaatttgggataaaagaaaaaggttgtaaactccttgacaatatctgaaacttgcagcacaagaaaacaacacaaagaaaaattagggtttctgcagttttcacaaaacagctgattcttgctcaacaagcaatcgacatggcagctagggtatacttttccaagtaaagacaaaaagttccgtgtcttccctaacactttctctaccggtatccaccgtcgctccgagatgaccagaaacgcctcctaaaaaccttaagatgaaactgcaatgttcctgacacttagtatttttctgggttcagggaaactgttatttttcactaacttgtaagtcattttgcgaatggagcttaccttggatcgtaaaaacgaaacttgctacttcttgctctcctcaagatctttccaacgacaccaaattcacgatctgattccttcagatccgatgggaaatagatctttaaaacctctaccggaaactgcaaagtttcagatacttagaaaaaatggctctaaaaattgtgagtaatcaccaattttaaacgcaatttcccgatcgatcttacctccgattttggatccgaaaactgttctgaaaacttgggaacgagatctactcagaaccgttaagaactcgcccaaactcctccggacgtgacgggaaacggatcaccaattccattacttgaactgttttcttctttcacatattcacacaaaaatccaatagttgaagttatgatccatgaatccacttgctaagtgaaccaatttcagtagtataattcataaccatgataggttttccttacctaacaatccggtgatgaacgacaacgaaaccaaccacgtagaataatcacgaccacaatgtgacgtcaactccggtgtcacaacgatgatgatgatgatggctgagattgagatgagagataaagaagagatggtgatgaagaagacgtaaatggctgctgcttggttgatgaggaagactatatatacacatgtatgtattaggtttttgtttctagtggaattgggcctttgttgggcctaagtggggtttgggtctcacaagtcctctgacttattatctaggatccaggatccgagatccgatctgtgatgatgtccaatcctctcaggaaaacaaaaataccatgcaaggcccaatcctgatctggataataaatattgaagaagtgtggttgttactattaaaaatttaaattactatccaataactaaaaaataagatggagggagtaaaattattattttttagcttttatccattaagatgaagtgaatagatataaaaatcagtttcttgtcgtgaaataaatagagtaattgcattacaaaaatgaaatatataagattgaaatttagttttaaaattatttagataaaatgaataaagattaccattacaattcaaataatatattgataaaatctatttatttttcacacccagctatttaaattcgcctttatctagttgaatataaaagtatgttaaagtgaaaatataattagtaaaagtttgtaattaagctcattatggatccaacaaaacaaatgcaaaaacttgatgtgtgtagtgtgtgtatataagcccctaaatttttttctcgtcaagccattttatataataaagaagggttcctctcaaaaagggaaaaatgtcatttaatcccccaacttttaaaaaatggtcattttatacatcaacttcgtatgttatacatcaagttcagtcattaacggaacttctaacgtttcctgattttcatttagaaaacaatcctgattttcttttgattattctcaaaacaaagtcgttttagagatactaatagagtcgttaacaagtaataatgaatgttataagttcttttaatgaatgatgacaacatgtttattttggcttggtcaacgaatttctcatgttttaaatggtagtcaacgcttagtttatgtttaaaatggccacatataaagtcgatgtttaaaatggccacaatttaaaacttgactaataaagtcgttaacggatgataacgaacgttagaagttccgttaatgactgaacttaatgacaacatacgaagttgatgtataaaatgaccattttttgaaagttgggggattaattgacatttctcccctctcaaaaaacacacttccaaaagctgacatgtgacacttatagcaagggcagacctattaagtcaaaaggtggttcacttgacccaccattcattttaatttttccttaagatgtatctgggcttgctaataatgcacctaatttattttcgtttttgacaccctattaattgtggcccaatgtttttgtttatttggagaaattaaaaatccaccagaaataaatatatagattttacctaattaaaaaagcccatcattaaccaattaagtctaataacctaaactacaataaatctaactaattaattctctacggaacttcaaaagtcaattccaaaaacttcatcataaatcagcatcgtgagagaaaaggagagtgcacaacaatcaatatataactaggtgagtacccacgctatgtgtgggttgttgtttaaaatttgttttaaaataattatgtttaactctttttattgctaatttatgttattttcgtgtatgttattatgtagttaataaagttatattcattttatgtaattatatttgtatatttagattcacttttgattcaaatatcaattatatttttttcatgtataaatctttttatctatatacctaagtttctaaatttttttaactatcatgaaatacttacatcaacaatatgatacaattcgatgcaattatgctacttatttgatttgaaagttgcctaacttgattctaagcaaataatttcttgttccatggattctctcctaatctaatattccaatcacatcatgataggctcatggctaaatattggattgatataatttgaataacaaatatataaactactcatttgctttaaaagttttcacatgaaaaaaaaataaatcataaattaaatagtcttttgattcaacacttttagatttctctctttgcatttgcatatatccatattagataaagggtcgtatattgaactttttggtatatctaacatctcaaaagatcactatttaacaaaagatgcatgtcagtattaatgttatcaatttatcataaaaacacaaaaagacaatatcatataaacaaaaaaatataataaaaagaaaagagtaagttaaaattactaaactaaggaaggttaagtaacaaacagttaagttgtaatacacgaaaatttctagtcattatcaaataatgactattataaaaataacaaaaataagaaaagtaaaatgagagtagtgtttgatacattaacatgattttttatattttttcttttaaatgaagatattttgttaagagtgagattaatggatgatttaatccaatgtgaaacttttaaaattttatcactaaattttgttataatttactaatattaatttacaatgacatgtggcactcactggtgtgatgatttgtcactcatatggagagagttggccaactttcatatatataatttctcttcaattgtattttgttttttttatcatcaacatctccaattgtatctatcacctagatatatttgattatcctactttaaaaaaaatctatatacccaaatttatgatttaaccaaaacatgaagtatgatctataaagctttagatatttggttcttggatcttggtatgtagtttgttggatattaaactagttaataacttaaatttttattttgatggaatgagaaacgtgagcttcacttcactaggcgattaatttatttttatttgtattatgtagtaactttttatgaattttttttttgtttgacatgataatttgttaacttttgttatttcagacctaattacagaaaagtttttgaagaggaaagctacgtcctcatctcacactgatttggatagtctacctagtaatccagctgaccgaatttttttcagaatatcatcctaatgaaagaaatgaggtaactcgtagatatttgattagacgtccttttcaacctcgtggtcatatttttaagtagacacaaatagaaggcttatggagacaatttaatcctgcttggtttgataagtatcctatcttgttagagtatagtgtgaagaaggacacaacgttttgcatttactgttacttgttcagagatagtgccggtaaaggtggaagaaatgatgcatggaccactgacggtttctctagctggaataagtttaagaacatattcgaacatgcaagaggtgttaataattttcataacaatgcagcaatgagatgtgaaaacttgatgagacaagagcagtctatcaaacaagctttgcataaacaagattgttggtgtcggatcccgcaccagagtccgagacctaccaaagattcccacgtagatgaaaagtaagcccacaaggagtaacacccgtaagattcctgggagaaaggcaaattacgggcaaagtgatcacaccgcgaagtgggggcaaagtcaaagtcaaggacggattgggctttatcggttaaagggcgaggcccatgaaggtcagagtcaatccaaattcgaacgtttgagcaataaattcaaagaccgaaacagacacatttaagagagaataattgtgtgtaattaaatgtcatttgtgagtataagtagtagggcgaagagccatgaaagacacacacattgttttgcaaacttacatacgcatttttcatcaattcacagcttttggcaatccatagctttttatacttaatttttgtcctcaagaataatctttctcactaaataaataaatatttgagtgtgcgaatccgacatccacattttggcgtcgtctgtggggacggaggattcttgagtcgtcagattttttatacaacattttcaagacaagcagcaatggccgtagaagacgtcatcattgcatcattggccaaaattctcaaaatcatgcagcaaaccatgtcggacatgtcacgtaagttctcggatgtggaaaaagccgttgatacactacaaccaacccaggtatcttttagacaaaatgttagtactatagaatctcgtgtttgttctatgaatgcaggaaatcctgttggagttcgaaagactattttcaattcgccaagctcccttgcgcgagatggaaccagcggacaaacaactccagatgccgctaacatggtagttcagccgggagacggggaaacacagctcggggacaaagaccaattcgcagatcagcacgagcaagaaagtctcgaccagttcgagaccatgagaaggttagtcgggacctgaaagaaataagatcaaagttccatcaggccactagttcggagccggatatcaatcaggtcattgaagaagctcggcgaacacctttcatcccacaaatcgcaagtttgagaatcagagattctcggaagctcaatctagaaccttacaacggtttggaggatccaaaaagttatctcgcagcttttctaattatactacaagaataccttcattttgggactctttgttgtgactaaactttcagtcgcaaaataaaccgacatttttgtgatccttttgcgactaactaacgactgtcgctaacatgaaggcaaattagtcgctaacatgaaggcaaattagtcgctacttaatgacgaaaacaaatagtcgcaaaaaagtctcaggtctgcgactatttaccaacccgttagcgagaaaaaaatataatcgcaaaaacatcgcacttttgcgacctttaagctacgtttaaccggcgctcgcgttttgcatttcaaaatttgtattatgaggtgtgtttgcaagttttcttatatgtttatagtttgatttgatcgatattagttataagaatataataaatctcttcaattccaatgtttacaaactaaacattcaaaaatgcctaatctatatcaagtgttacatgttctttaacatacaaataatctttttcaaacaattataaaataagttaagaaagcaaaacatttacaaacctaacacttatttatgtactctatactactaaatcagtgcttctcaatgatttatggatcaaactcaatggatttcaaacattttattatacagtgtcacaaaacaatcgcacttttgcgacttttaagttacgtttaaccgacgctcgcgttttgcatttcaaaatttgtattgtggggtgtgtttgcaatttttcttatacgtttaatagtttgatttgatcgatattatttataagaatataatcaatctcttcaattccaatgtttacaaactaaatattcaaaaatccctaatttatatcaagtgttacatgttctttaacatacaaataatctttttcaaacaattataaaataagctaagaaagcaaaacatttacaaacctaacacttatgtatgtaatctatactactaaatcattgcttctcaataatttatggatcaaactcaatggaattactgaatttaataatgtagagtcacaacacagtcgccgttttgcgaccaataagctacgtttaacctatattcgacttattttgtgactaattgctgacctgtttgtgattaaagaccgactagtagtgcaactaagttgcgactgtttttaatttcaatcattttctccaattttttgtctaagtgtttaggcgctcaatatttcccccaaacaatttagtgtgcaacggttttgcgactaaatatagactctttttttaatcaataatttataaagtctcgatttcttgtttttatcgtttcttcttcttctctttcaatctctttacagttctgcggttaaacgctctcacctctctcctcttcttcaactcgatttcttgtttttattgtgtagatctagggtttctagatttagattctcttctctgtttcaattcaaccccttcgctttctaatttcaccatttctagatctagggtttcttcattcgttatggctgctagtggtaagggaaaatcaggtagagatagaggtagaggtagaggtcgaggccgcgaatcgtcaactgaagtccgagtcttccagggtaaaaatccagtgttaggttcgagttgtcacggagcctcttctcactcgtcgaccctaatttggcgacacattctgctacagaataccataggagcctatcttcatagtatctgccggctattgtaccaaagacaacgccaccccaaacaacactaaccccgactaattcttgttaacccttgatctctggttctcaacaaccgcctcccgttcatcgcaatctgcctcctactcgtcaacgtcaggctcctacgagccaacaacagcctcctactcgtcaacaaaaggctcctgctcggcaacatcaatcttcgggtcttcaacaacagcctcgtcaaacggagcaacaaaacactaataatcatgaagaggaagatggggtagaagattgggaagaagatggggaagaagacaaggaagaagaagaagaccctaattcccccgaagaagaagaccctaatgtcgactatcaagatctgttggattctttactagcccttccaggtcgacaacagcttccacttctgtctgaaaagcctatccctggggtcgagactctctggtaatctctatcttttcaccttttttagatatcattttgagttggtgattgagcttagtaaccggttgtgtttttatagatatcattttgagtttgtgattgagcttagtaaccggttgtgtttgtatggatattattttgagttggtgattgagcttagtaagcggttgtgtttgtgaatgaccatctgttttgagagcgtttttaattaagttgttaattctctgttggttgctgataacgttcaaattaccctaagaactactctctcaaataagagatcagttgcagtatttaaggatcgaattcacaaagttcttttgttcaaacaatgagttgaatgtcgagattaagctagtaggtgatgattgaaataaaatgagagcaaagtaaaaagacagcagattgattgtgtggtaaatgattaaataaagagctaggaacagggtattctcaggatactattggttagtagatctaatgaaagctaggttgttatcgaaccattcttaaactcaaactctaattatggaataaccggtggtgttccgcgaaactccctatatctatagctaagaataaccggagaagccgagagattattaacctaaatatgcattcttatcaagtttgattgttcaccttagtagataagccgatttttattacacacctataaaccaggctcatcaaataatagatccaactacaaatacctatggtgggcatatctattgtctggattcaaaatctagttaattactctagatctaccattaaacataatcaaagatgaagaattctaccgataacctagcaaaggggcaatctactaaaccatatgaatccctaatgagaaactatattcctaacaagcagagtactcaaacatattgaatgaaacaaacaacatgattgaataagaaagcataaacacagcaatacatataagggaaagaaaggatcccttcactgtattaagaactgaattcaatctctgaagaacaaatgatgaatagcttatgtctctgaaaatagggatttgcaaaaagcttgataataagaaactaaagtctaaaacaatgtatataaaccctataaaacgtccagggactaataatgcaaatagggaagtcctctggggcaaatttcttcttctataaacttgaaagcgtcttggactttgctgggccaaaactggtgtcgatcgacaccaagagtgtgtcgatcgacactcctttgaatttgggactgaaaatcgtccttagcttccttttccttagcttttgctccaaaatgtctccttatctccattgttgtcccactgtataatacacctgaaaagacactaaaaagactcgagaaataacataaagactcaaaatcatatacctaaaacatagatcaaattagtgaaaatagggatatatcagttgcatcaactaaagtctttgtagtttgtatacttacgagttatttttccattgtctaatgtgatatcaacttaatattgtgtcttttgttacaggtttaaccggcacaaggggaagctgtctagagtgattgctggaatatttcggaggaagtttgatgggccttacttcagttggaaggttacaccaatacacattcaagagagatactttaggaattttgcggtactatcttataaacctttcattatgttattgtatatatgaagtatctttgctaacttaactacttgttttgtagcggaagtataattgggatagtgggattactgagcttgttaaagaaggattcttggttatagccaagaagcgtatgaaagggattgtcagtcaagcaaagaagagtggttcacaaccaccgtggattcgagataaactttggggtcggatgtgggagcattggaacactggagatgctattgagagaagtgagaatgcttcacattgtagaaactctactcgtggaggtcttggagtgcacaaacatgtagctggtcagaaatcatttgtgcaagttcatcaagagatggtaatatttctctttttatccaaatgattcacttaacagattatctaatgttgcttatatgattttaatctcttttattttcattgtaggaggaacgtttgaagtgacctgtcacatttggagaagtgtttattgcaacacatactagggctgatggatcttttgtggatcaaaaatctcaacaagttggtgaggcgtatgcgcagagccttgaagagaggatgtctgaaatagatcgggatggtcctcaaacttctgacaattcctctcagcattcaactcagcgtacactcagccttgaagagaagaatgagatctttcttaaggttattaatttctgtttttatttacttagaatgcttgtctttgtttgcttggaaattatgattgtcttactctttgtttgatgagtgataaatgcttagagtaatgatgattctctttttttggttctcatgatttaattcattttatttgtgcctttgtcttcttgttttagtgtactcatatagatggcaaaggcaacccttatggccttggatcgcttgtggagacgctgaacaaaagaaaaaagaacgagtgttatgcgagctcttctacatcaaccattgtggatcttcaagatcagctgcagaagaagatatcagaacatgaagctcaaaatgcaaaacgtgatgaggatcactagcaatatcaatctcggatggagaagcttctcctcttcatgaaggaaaaagatcctaagttggctgcatttttgcctactgattctatagaacccgaaccacccctcccaccaaccaccacaggcacccagctaaacaagccagctccaagcacattttcaaccaccacatgcaccccagaagacaccggattaggcaccactccattagcctccacttcagctactttgtctgatacttcttctaaccattgaacttgattttctaatgaatttttgaaaaactttgtcttttgttgaaaactatttaggatgataatataatgtatgagtgaatgattttatgaatgttaacttgtttcatgtttttaatcctctttatttactactaatagcttctcaattcaaaatctaatcaggtttaggagattggtaacagacagtagaacaaagagtcccaaatcacttgagaccgacaatttttgtctcaaaactgtcttaagtaagcggcgttgctttttagtcggatatctacaactttctaaagtagtcacataccggtcgcttatgtgcgactgaaaactgctttcagataatagtcgtaaataagcgaccctgttgtgactaatttatttagcgaccgttttttagcgacaattttttcagtcgttatatagtcgtaaaaccttggtttgcgactgatttgagactaatttgggggttgaaaatgacgggttaatcgccgcaggaggagttgacttggatgaagctgaggaagacgcggggtactccaagctcttttctgagaatctttgtggacaagcgctgatgtggttcacctaattagagccacgttcaatcagtaacttcaacgaattgtcagccgtgtttttgaaacaatacttcattcttatggataagagcatttcggacaccgatgtttggaatttgtcacaagggccgaatgagtcattttggatttttatgaccaaattcaagggtgtactttcaaagcttccaaggatttcgcaacaatcggctttgtctgccctacgaaaaggcttgtggcatgattcaaaattttaaaaggatctaatactacacaagccggacacaattcaagatgcactttttcgagcaaacaactggacggaagtagaagacgaaaaagaaagttttgcaaaatggaatgagccagcaaaaccggcggttacttttcctgccaagaaattcgagcccagggaaaaccaagggccaaggaagtttggattgcaaccttttaacaataacgtctggaagcagttccaaggaaaaggaaagtcaaacacctgggtccgagatgaaagtctatactgcgacatacatatggtaatcagacctctaaccaaagattgtagtgtcctcaaaaggcatctcgctgaactatgggccagcgaagatctttccaaattcaacatagacgatttcgtgaagaaatatcacgaagctagggataactccgaagttcaaaattcaaaaaggccaaggttgaccaatgaagaagaaccaaggagttcgaaggggaagatcaatgtaatccttggaggctccaaactttgccgagattctattagtgcaatcaaaaagcataggcgaaatgttctacttaaatcaagtttgagtgaagaagttaactaccaaggcgcttcaatatcatttgacgggaaagaaacgcgacaccttgaaagacctcatgatgacgctctagtcattacactggacgtggctaactttgaagtctcaagaattctcgtcgatacggttagttcggttgatttaatctttctaggtactttggaaagaatgggaattagtcgggtagacatagtgggacctccatcccctttggtggctttcacaagcggttcaaccatgtctcttagaacaatcaagctaccagttctagctggaaaaatgtcgaagattgtggactttgtcgtttttgataaaccggcagcttacaacatcatcctcgggactccttggatttatcaaatgaaggcgatcccctttacgtatcatcaatgcatcaaatttccaactccaagcggagtagaaacaattcgaggagatcaagaagcttcgcggacatgttatatggctagccaccgtttgaagatccaatagcaattaacaaagcccgcgaagaaaggaataatcccaagattttctagtgggtagaaagtggatgatctcgtgatcgaagttatgttagaggaggacaaacaagattggaatcttcgaattggagctactctaaccggggaaataaaagaggccataatagagcttttgaagaaaaataaagcgtcgctttcgtggtcagcaacggatatgcttggcatagatccaagcataatctgccacgagctaaacgtgaatccaagcttcaaacctgtaaaacaaaaaagaagaaaactcagagtggaacgagcaaaggtggtaaatgacaaagtggacaagcttttacagataggatctataagggaggtgcaatacccgaattgggtggcaaacactgtcgtggtaaaaaaaaagaatggaaaggacagggtatgcatcaacttcacaaacctcaataaatctttcccgaaggacagtttcccgcttccgcatgtagatcgccttgtggaatcaaccactttggacgagttactaactttcatggacgctttctcaggttataatcaaataatgatgaatcccgaagatcaagataagacgtcatttatcacggatagaggtatttattgttacaaggtaatgccttttggtttaaaaaatgcaggagctacttatcaacaattggtcaacaaaatgttccacgagcatcttgggaagacgatggaagtttacatagatgatatgtcagtcaagtcgttaaagaaagaggaccacgttaagcatttagaagaatgttttgagattctcaatcaataccaaatgaagctaaagccgacgaagtgcacgttcggagtcccatccggagagttccttggttgtattgtgaccaaaagggaaattgaagccaatccgaaccaaatcaatgccttgaagtacatcggttaactggccggattgcagctttgaaccgttttatttcaagatcaacagataaatctttgcctttttaccaaattctaaaaagaaacaaagaatttctttgggatgagaaatgtgaagaagcatttggacagcttaaggcgtacctaatcactccacccgtattgtccaaaccggaagtggatgaaaagctctatttatatgttttggtgtcaaaccatgcagttagcggagtcttgatacagggggatcgtggcgaataaaaaccgatttactacataagtaagtctaagacagatccagagaccaagtacacaatgatagaaaaactcgcacttgcggtggtaacctatgcccggaagctgcgtccatatttccagtctcatccaatcgaagtgttaaccaaccagccacttcgaacaattcttcatactccaagtcagtccggaagattggcgaagtggacagtggagttaagtgagtatgatatagagtacaagagccgagtcgccatgaaggcccaagttttggcagatttcttgaccgaattaccagtgcttagcacactagaacaaccagataatcaaacttggaagttgcatgtatatggattttaaatcaaaacaaggatccggagtgggaataaagttggaatctccaacattggaaattcttgaacaatcattccgtttattatttagtgcttctaacaacgaggcagagtatgaagctctaatcaccggactgaggctagcacaaggaattggagccgaagaagtgattgcttattgtgattcgcaactagttgttaacaagttcaatggagattatgaagccaaatattcaagaatggaagtatacctcaaagtagtgaaagatttggctaagaacttcaaaaaatttgaactcattcgcataccgcgaagagaaaatacgattgggatgcacttgctgcgcaagcatcaacgtcggatcctgaggtaaaaagagtcatcccggtggaatgtatttcagaacggagcattaaagaggagaaagaaacacccgtcattacaaggtcccgagctacggcacgtgatcatggagaacctgagatagaattgccacctgtcaaacgaagaaagtcaaagggttcaaccatacccgagcccaacgtgtcaaaagaaaacagtagcgcagagcatgtcaatctgacagtagacgtagttccagaaacagttatagaaaccgagccactaatctaggaggatattcttgaaccaaatgagcatcccaaaccggaaccacggatattctacgagatcgaccaaatttcggctaaagattggggggctgattggagggagccaataaaacattacattgtgacaggcgagctcccaaaaataagtggcaaaccagaaaaatgagaatcgttagcgcgaaattttgtttatcaaaagacgcgttgtatagacgaggtgtcagcgacccttacctattatgcatctatggacccgaagtcgaaattgtcatgagcgaagtgcatgaaggtttgtgtggtagttatttgtcaggaagggccatggcttttaagattaaaagaatgggaaattattggcccactctgatcacggattgtgttaagtactcccagcggtgtaaacgttgccaacttcatgcacctctaaccaccaaccgtcggagttattctcctccatttctgccccatacctgtttatgaggtggtcgatggatatcattggaccattgcacaggtcaacccgaggtgtgcaatatcttttggtcttaactgactacttctcgaaatggattaaggccgaagcatacgtgagcatcaaggactcgatggtaaaaactttcatttggaaaaacattatatgtcgacacggtgtcccatacgagatagttacagacaatagaccacaattaatttcacacgaattcgaagctttctattcagattggggaatcaaagttagttactctactccacggtaccggcaaggaaatggtcaagccgaagccgcgaacaagacaatcctaaacaatctaaaaaagcgacgagctccaacccgttttatgggcttaccgcacaactactaggcgttctactggggaaactccattttctttggtatacatgatggaggcattggttccgactgagctcaaaatgcctggactttgccgaatagaggaaaactctgcaatgctcgatgattcgatagatactatcaatgaaaggcgagatcaagcctcaatctgaatttaaaattaccagcaagcagcacctcggtattacaatacctaagtcaaaagcaggcctttctttgtaggcgattttgtgctaaaccgtgtttttgacaataagaaggaaaaaggagcaggcaagctcggtattaattgggaaggaccttacattgttaccgaagtggttcacaatggtgtttacaggttaaaagatttagaagacaggccagtccaatgtccatggaatgtggtgaatttaaagaagttttatgtttaagtaacacgcattttttgttatgtacatgaactacggtatggcttgatcccgaaatgggtacgtacgcagcttggaaacgagttcagcttctaatcaaatttgtttgattcattaaaagggaaaggagtttgattgtgcgaacaaacaaagcaaagaaaagttcgactatgcgaacatgcaagtacaggaaacaaaacgatgtttattcaagcaataagcaaaaaagacaagtttcaccacgcccgcatttcgagataggaaacctttctcgacgtagagaacacttggactccttgaccagcgaggtcaaggatcaacatcatacaattcgggatgcgagcgaattcggagatttcgagctcgatccagtcactggggtgagagttgagggtgtgaagctcccttgatatcgcggtgaccctacgtaacattcgattaatcttttttcgaagcttccttttttccaacgaacgcttttggtgctgaactgcaagagctttgatgaaagccatcgcgatttcttgatttcaatctgaaaggcctttgatcagtgcacatggagctcggatttaggaccggaagaagccacgaggtggagaaggccctctccccagcacgtttgggatgtcttcgtccatcattctgaccatgcaaaagtctggcatgtactccgagcatcgaaggttaaactccatagttgcaaaaggaaaagaaagttgtgatgaaaaataaggtaaatttggagtcataatttatagggactttgtatcccttgaggatcgcaattccatttgagaccggagtgattcacggaaagaggggttgtaatttatagggactttgtatcccttgaggattgcaattccatttgagaccagagtgtttcacggaaagacttaagccttccagtcagccctgcatttaaaacatatctccaaaacgaatatttcgagattaaggaaagtagcaaagtttccataaaataatatgggccggagcccatagcaggttcaaataaaataaaataaaataataagtaacgagttcgggaacatttatggaagagactcaagaataggctacttcatcgccggatcagcgttcgaagtggatgcttcatttttatcatccacctcgggttcattcttgacacgcttccagtggttgctatcctcttcctcgtcgtcctcctcgctgtcggacgggaccacctcgacgggagcgtttacgggaccttggacttgaccacgggcatggaggtaaatccgaagcatagtcgggatcctggccacgcaccttcctccaattcgattggaaatgatcactctccatggccctcaccttcctctccactcgagcgatgcgggcctcaagaggcaaactcttgaggcctaaacgctgcctctcatcgcacaagcggtgatgtttgtcgacaacgtagcccggaaaattgtttagcataaaaagaggaagaggaagaagtttaataaaggaaggaagagtgaatcccgaccttgtccatgaaatcgtacgcctcctttttgtcttttggaggaaagtgaaaagcagcgtggggaaagaggacactggccggttcaaaaccatcgccggataaaaacatttgactgccaaggtcgagaggacagacggtggaggctccgtcgttttccattcttgtagtgtttaccaagtaaatttatgaaatcatacttggaaaattcagcggcatctgaactcttattttatagagggttaggttttgtcttgcaacaaaaaattcaataattatggtatgtccgaatggtttaaaccatttttggaaatcgaaaaaaggcaattattgtttcaaaggcgtgaagttttttcctgtgtctcgaggaatgggaaggaaaatggcaaccgtcgcattaaagacaaaaagcccattaaatacaaagtaaaacagttaaggcccaaacccaacaagtttactgaattgactaaacccgagttggggaattcacgttgaaaacgagctccgttctcactaactaagagaaaggccgaataagccgagaaatcttgaaacttaaccacatggtcaaaaatacctaatgcggactttgcaaacccgcattccatcttagcaataccctcaaagggttatagtggaaaaggtttaaaagcctgctcaggcaaaatcttgttcaaacaaaaaaaaagcctctttaggcaaaaacataattatccgaatattaaatttcaaattcttaaatgtttgggacaaaccccaaatttaagtggacgcagccactatgaatccgtagccatctcgagctcaacatcaaccggctcggtttcattcggttcgacggtagggacttgctcagaagaggctcccggttcatggccggcatcaccttcatcatctgggatgatcaccgtctcactatccacgatcgaaggagcttaaggcaaagcaggatcaggttcaacaatccctatcgatgtagcaggcacctcgggtgcggcagtatcaacgggctcacttgatcctgaggagaacagttcaaatcagtcaaaaagatatatatataaaagaaaccgatatatgataagctttaagtatgaaagtttaccagcccaatttaaacccgattcacccaaggggggtgattgggtaaagaactcctcgaagtgctgagggttgaaggatgaagcgggaagagcagcaaggcgaatacgtttctcgtatagaacggctttcaaatcggacctttcttgctcctcagagaaatcatctttgtggatttggtctagtaagagtaggttgctttcatgctccttgatatcagattctagttctgaacgtgcctgctcggtttgaatgaaaagaatggccccttgaatcaactccatcccgcgacccttcacctcatttctggctttagccgctgacttagccaactcagcatctcgaagtttggtgatggctttgtacttcgcctcgagtttggtgaactggttgttcaaggtgtaggcggccgatttggattcagaaagcctgcctcgggcaactgagagttcatcttggagtttgtcatgtctgcgatactgatcttgcaattcggcgtttgatttcttgagttcggtagagaaaaggtcaacttgatcctccaacttttgtttggaatcagaaagggagcggaggtcagcctcaagggaagaaaacttgcccttccaggtgcagatgtcttgctccctactaagcagcagtccttcatagtgctcaaccatgtcgttgagttcgctgtttgcttggcatcgagtataaaatccggaaaagcaagttagtacataaaggaatatcacgattagaaaaatagaaatgaaactaacctgagatgaatggtaggcatgaagtaaaaagcgtttgtggattgtaggacgccatctatcaaagttcggcaagatcgcgtccttttgggtcttgaaacatcggaaaacgttaccctctgtttccatagctgaaaaagagagaagggatcaagggttattcaggccgcgaacaacgcagaagttagaaaaggaaacttgtttaccaaacatgaaagcgacttggcttgagaaacaagaacgattctttgactttggaggagtatctcgtgacttagaaccttcctgtcgaggagtcacacctcggtcagtcttctcgccactaagtcgaggagggggagatgtgaccacaggaaggggaggacccatcgatcgaggtggaagagataacctaggggaacggtctgtccgagcctttgatttctctctccgtggggaagagttacctcgggctgatctgtctctcttcttgcgaattaagtcagcaactggtttgctactcagtctatttcggggagagtaacgaggagagttgcgatggggagataagtttctccgaggcgaacagccaccacgacgttcaggacatggagttgatctaaaagcgtcagcagattcggccccctcagcactaccgactaacagggtcctactatactccttttaaacgatgacggacatgaggaatgtcttattttcctcacagtcctcggccatcggtttggatagcatcatgcgccgggaagcaagggcccgagctgatgttccttgaggtaaagggggaggcagtggaaggttctatccggatggattcattatgagtttgcgattagcttctataaaccgatcaagagtgaaggagttccaaaaggtatccccttcaaggacgattttcaagaattcgatgaatattttggtcgggaaagtttgagcgatgaaatctgcgaagcgagacaatggatttggtcagtagcaataaagataaataaagaaggtgtatattacctaatttctatcgggctttgcaaaccacttagatgggagtgcatggaacagatttttgattgaagcaagggttttcttaatcaaaaaccaaggatgatgccagtttttatccttgttcaggagatgcgagatggttcctgttagcattcgggtatgccgagaaatacccatttttctttgatgaacttctcatggtgagaagctcgttcagttcagggaccccgataacgaatccggcttccgccgcaatagttatgatcccaaagatagttcggaggaggttgggggttagttggggtagagcaattataagagcatctaagtaacagaccaaggccttgggaagagggaaggtcaacccgcagcccttgaaatagatcttgtaaacgcataaataaccagggcgagggtcttccggggactcaaaggggccatgcatctctgattccgccataatctcaggcagaatctggtagagatcttttagtcgttcgagggattgaagggtacagatggatgtgtagtgtggaccggcgatatcgttcaggcgagtgcatatgtcattgttagaacccccctcgtcgaaagacggggattcgggtctttcagtatcaggattcatcgaggaaggtgaaaaaattaagcgttcgaagaagagaaagttggcagaagaaaaaggcgagaaattttattctaaagaaaaagcggaaaagtaagaaagaggtaaatgaatttacctcacgcaagctggtggtgatgatgaaaccgcctcgggagtcgtggaggaagcggaaggattttcccgctttaatagtaataattaagatgcggtcataatggtgacagatgtcatacggataaatatggacattgccggaatcgaaggagtaacaagcttttggcaggaaatcggaaagtcatctagctcaatctttgcccattaagatattagtcttccgaattggaagaacacttcgaaagacttggggggctaattgttggtgtcatattccgcaccagagtccgggacctaccaaagattgccacgtagataaaaagtaagcccacaaggagtaaggcccgtaagattcctgggagaatggcagattacggacgaagtgatcacaccgcgaagtgggggcaaagtcgaagtcaaggacggattgggctttatcggttaaagggcgaggcccatgaaggtcagagtcaattcaaattcgaacgtctaagcaataaatttgaaggccaaaacggacacatttaagaaagaataattatgtgtagttaagaattaaatatcatttgtgagtattagtagtagggccaagagccatgaaagacacacgcatttttgtgcaaacttactatacgcatttttcatcaattcacagcttttggcaatccatagctttttatacttaatttttgtcctcaagaataatctttctcactaaataaataaatacttgagtgtgcgaatccgacatccacaaagatgatatcaccaaaaatgagtatcaaattaggttgaatgctttcattgatgcttctagacacttattacgacaaggattacctttttgtggacacgatgagacagaagaatctgttaacaaaggtaactttctggaactcttgaaatatactgatgaccaggacgaggttgtgagtaaggtgatgttaaaaaatgctcctggtaacaatcagatgacatctccaaagattcagaaagatattatgcatttttttgcagaaaaattagccaaatctattattgaagaaattgaatgccatatcattggtgaaatcaactaagagaaagctgcaggagtttagggttgatgggtggaattctctgatgattaaaatctcttctttttgtgagaaacatgatattgaaaagcttaacatggatgaagattttgttgactcaaggaaacaaagaaagaaaacagggataacaaatatgcatcactacaaggtgaattgctaacagggatatcaaatgtgcatcactacaaggtgtattgcttatatgcaattttagatttacagcttcaagagtttaactatcgttttaatgaggtaaacaccgaattgcttatttgtgctgttttttacgtcctatcgattcgttctctcaatttgaccactcaaaattgatgaggttatctacgttctatccatacgactttagtcctggagaatgcatatgccttgagcaacaattagagatttacattgataatgttcgaagtaatgacagatttgttcacttaaagagtcttgaaaaacttgctcgtgtgttggttgaaatgcggaaacatatgtcatttcctttggtttataggcttttgaagttgattttgattttgcatgttgctactgctactgttgagagatgtttttcagcaatgaagattgtgaagacagatcggcgcaaccggattggagattaatttttgaacgactgtttagtttgttttgttaagaaagaagtatttgaaactattacaaatgaaagtgtgatgaaaagatttcaggatatgaaaaatcgcagggtgtttttgtaaggtgttattttttattaaaaaacattttttggatattttatatgttgtagtttctttatatatctggctcaaatgtcaaacgcacatggctcaaatgcactcatggatgcacctggctgtgagcaacgctcccgacatagatcgagtaatagagatgacaaagcgtgccccgttcacggacagaattgcccatttttggatccgagtcgccgagagactctgcttcccggagtacgatggaacggccgacccgaaggttcattttagagctttccggctagccataacactagcgtacctggcagacgaggaaagcgaagcaggccactatcgctttttcgcagaaaacctcgtaggccatgctctagattcgttcacaagcgtcgaaggaaacactatcgctactttcgatcaactcgcagctgctttcctcaagcaatacttggtgctcatcgtgaataaaacatctcaggctgaccaatgagacttaactcagctccaaaacgaatccctacgatcctacgtcgaaaagttctaaggaatcaagtcaaaaattgtgaacctgaacgaggaagtagccatagcggccctccgcaacgaattaatgttttcctcaagattctgtgaggaactcactctccgacaaccagttacattagatgatgccctccacaaggctctctacttcgccaaagccgaagaagagaccgccgtcctagcccttagattcacagagtctaaaggataaagcacctcatttaatgccaaaaaaactaggcctatgcgttgcttcgcggacctagttttttacaccgaaactccttttagctcatttgcttccaattcgcatataaggcatatttgactttttaagatacatggctttcagctcgttggttaaaccgatcctttcccgtcagataggacactattagcatgtcgctgatacaagtgtcagctcgtccgcttgccttttgatttccgtttatgtatctcttcactagtacataggcagattaactctcgagcgcagaaattatttttcatgcttcttatcagcaaagttttgaattttaggtattaaaaccgaatagcctcaaaccagttaagtgaataaccttacaacaggtccacacttaacatgaggttaaaacaatcttagaccatctaagtgcgtaacataggactgcgtaatcctagcatcaaataatttttgatccttcatcgatctcatcacccaacaccaattcactccaaattaagagaatttggcaaactcattcgtaatcttacgatacaataggcccaccactaatagttcgtaattacatttgtaatcttgcttccaaaagtccgtaaatacgcagctcaaccttcataggtttcgactcatcggagctcatctacaacaaccatgtcaaaagccacctcttaagattgcaacttgacatagaaaagttcgaacaaggaggacacgacggtttcattaagaatattgcgataccactaagcccagcttctgaaaactggcgaatcctttttgtgatcttacttcagaggtcctcgaaatgcgcagcgtaacttgccaagaactgaccaaccgaagcacaaacataactgatatcctacaagtgaaacactcgagttcgcccagcctgaacaaagaaatacatgagatccaatcacctatctcacgtcacccaagtaatatttacgctatcacatcaaaccttgttttccgcacatcgagctcgctcactcactcgatggactaggggctattgttggagcaggaattcgcacctcgaattctcacgtgcgtaaacattaattaggctctaagatttaaatcaggcctgtcagcccactaagaagagatgcgcagctagcaacagatcaggaatcagccaagagggaatctcggaacgaaactaaaatataaaagaagtttggaacagacctgaaatgtaggagaagtttgcgctgacctcgaaccaaatgacctaggaagaagacctatataaacagagaggctaacttgaagaagacatggcctattttgcccacaaacgcttaatacatcacatacttgtattctcatactctaccttgtattcacttgattctcatcaataaaatccattcgttcttagcaatataattctcaaagttttattgaatatctagctctttttcacataaacctaaatataaatctccagtgtggatttctgaacccacaacttgtctacaaaaaccaaaaaggaaacaacactgaatattaaatgataactgaatattcagcatcaatatatttatttcgaatataaatcaaaatattttgtattttttaatttgttagagataaaacaaaaacaatcgacaaaaatcaaatgtcattaattcaaaatacaaaatattttattaataaaatataagtaataatttttatgttgttttgttttttgccattagattttatttagagctcataagaaccaattataaagaaacttgtttacatatttatgttataaatatattccaatatattctcatttaccaaatataacaaattaagtacatagccaaaacaaaatatgcgacatacattctatcaaatattttatttttgtcaaatgactcaaatcataatatgtttagagatacaagatcttatttgttttttcctttaagatattatgtacacataaaattattagcaactaaactaaaataataatagaaataatatgttataaataaaattaaatatttccgggtatctaaatactaaaattacaaatatttatcatgatattagaaaaattgttaagaatgcccttttaacactactcctttataattataccctttcgtgttggcctttttcatttacactcttttaatttttaatgaccattttatccttattatgataatattttaggttaacaaaataaaatattgttttttctcgcctaaaatatttcgaaaatagatttctcgccaaaattttcctgccaaatattatacagtatctcaacttaaaattattttgacaaaagcacaattatttattttgcagtcatcatttatttatccaaaataaaattgtatggaaaaagatttgtgttttgaattttgttacattaattgttaaatttttgacccatcatataagacttaatttaaggagcattggagcattggagcaagcaagaagtcaagaacatcaaaaaagatctacaaccaaactgggaaacaatatgaatatatatatatatatatatatatattataaaaaaagaagtttatatatatataagagaagaagttagatatctatggaaaatgaaaagcgagaaatctgcagatgcttatggaacataatttcttctgatatcaaccattttcttgcttttcattgcacgtaagtcattatttggttcataaatttcaaatacaaaaaccaatttttgtgatggtgggtgatctttgaatgtattggttgtgttttttgaatgtattggttgtgttttttgtcttatatatttggttcacaggacaagcaagtttgtatcaaatgctcatatgtttagatttaaatatatcatgtgccgactgcaaaaaaacagtgcgacgagacaagttatggaggaatgtgtttaaatggaggcagaacttgttgttgcaaaaaaagtcctccgccatcatattataattttaggcccccttcttcataatcatattgaatgtgttcctatttggcaatatcattttggatttgctcaaacatatcaaatttatactttgaaaagaaaagaatcagcaaaataaagttatttcatatttttttctttatttaccaatctcacaatcataacgtcaattatatagaaattttcttaacatgagtcaaactaagactaacgctaaattttacagtctaattataatttttagtaatgttttctaagccaaataatatgtattaagtttactaatagtttaacataataacatttaatcagcatatatgagtagcttatcgattagaatgtgatttctaacaaagtcacgtataaccaagatacacttaaacggatagtgtatgattaacaaaactaatgtaatcacaaacgatagtgcataattaaatttcatgagagccacatattagccaagatataaagacaatataccatgggtaagccacgaaggcacgaaaacacactttaagtgtgttattaatttaatcaaagaaaatataatgttagtgataatatttatatgaccaaagatttctacatcttgtcacggctccccatttcttgtcatatgtttgataagtaaaaccaaatcgaattgttggtataattaatggttccatgttggcaaaggaaaaactaaaatcacataaaacaaaatcgatcaaaaataatagtgtttttcatataatgaaattagttatagtttttttaaccagaatatggtgaaacagctccaattccagtggaacatctcttccatatttcattagttttggaaaaccttttagaagtaaaacgtttgagttgatagatttgaaaaattaatttcatatattccatgtgacattcctttccagctttcactatccccaaacaacaatcccttgaagcacttttgttctgaataatttcagccaacacttcttctatacatttgtctgggtctgggatgtccatctttatactacaattcagtagatattctttttgtttctttgaatatttacgaccaacattttcgttataatcttccgctgtcggtgaccttgcaatcatcgcatcaaactcgtcgtctaaaatgaggacttgcttgtcattatcgccttctttggccaaagttggatgagaaaacgatagcaaaatcatgatcgaagaaaatatcatgaacatggttttattctccatcttaaaatattttgagcttttattcttaattattattttttgtttctattataccagtgaagatttctgcatgtatttatagtatcaaatctttattaacgttattatttagtaattttatattagtaaaaataacttttctttatttaactctcacaaacaatatcttattagttatcaacataattgacatcttttgacgttttacaccgtttctaaatattgtatatttaatgcattttagtttatgacaatatgaattaagttgaatgaaaaatcctaagcgtttcatagatagaaaactgggttttaagtccttgtatgtgtgcattttaagtttcattgtagtaaatttactgtttgtagtcgaatgaaattagcaaagaaattgaaaaaaaaagtataaacataacgaaataagttatttcaaacaaaacctgcaccttagttaactatttgtttatatgaaaatatatgggtgtattaactatttaatactaactaaaacaaggggttaatttggcccaaaaaaaaataaaacaaaaacatctgaagtgtaccaaactgatacactaatactaaaataagatttacttatagagcaaatttatacttttatgaattaaaaaatcaaaaatcgaaactgaaccgaactgtaccaattttagtgtatctaaagtctaacctaaacaaaccaaaagttaataaaatattctaactttagtttttatatactgtatttatacaataaatatattcatgttgtataaatgtaatataaactatgaaataacgttacaagggtttttaaaagatttttaagggctttacaagagttttaacggatttacaagggtttttaaaagctttttgaaggatttacaagggttttaaaacccttttaaaactcttgtaaatctttttaaattcttttgtaaaggttcataagttttttaaaatggtttgaaagttattaaatggtttacaagggtttcaaaggatttataagggtttttaaaagattgaaaagggttttaaaaccctttaaaaactcttggaaatctttttaaaaccttctgtatgggttcacaagagtttcaaaattgttcaaaatttattaaaaggtttacatgagttttaaagaaatttacaagggtatttaaaagatttataaaggttttataagggttttaaaaacctttaaaaactcttgaaatctttttaaaacctttgtacggttcacaagagttttaaaatggttcaaaaagagttacaaattttttaaaatattcgcaaattgtaaatcattttaaaaccttttatggtggttataaaagatttataaaagtttttaaaggggttttaaagtatttacatatgtatttaaagactttataaagattttaataggttttaaaatgatttacaagactttttaacatctttacaaagcttttaagaaactttacaaggtttttaaagagtttttaaagggttcttaaaaactttacaaggatttttaattgcattattttggcaggaaaaaaaaaatttggtgagggaaaaacatttttggcgggaaaaaaaatgttttggcagaaaattttttttggcggaaaaatttcagtttctaattacatgttctcattatcaaaaggtaatttgatctttttgttcaagagaagaggtatgtttaaaaatggacaaaagaaaagggtattggtgcaaaaagatagtagaaaaagatatttttgcaaatcacccatgatattattaatttagcaacgaaaaatatttatcaacgacattaccgatctataaaagtttatgatattaatagtgtagataaactctataaaatatatacatatataaaaatatatatatatttatattatgagaaccatttgaatgtaaactttaaaattgactcaaattatatgtctttctaactcatggatgacctttaacataaacagttggaagacaagaaggaactccgtcggttaaagaatgagactggttgaacttggcaattcgtccggagagattgctaaccttctaactgattttaaccattcgcattgtgagaaggaaggactcaggcccccagggatacgcctcaaaagtctccaaatccttgacaatttcaacaacttgcatggaagctttaacgggttgggaactgcggatcaatatcccttccacgatgacgataacagcgagacaaagccttctccagttttccttcttctcttcttttgggttcatcttttctttcttcaaccattcaataatgtctttgatgagaacgatagggtgatccttaccgataagcatattccagtaaagatgtcttcgtttgatgggttgctccgactttaatatatttgccggtgggggtatggccgacaattcaaaccagtcagaatagttaactctcttaatgaaaatcggaatggctgatcggcaaaaataaaccaaagtttgtatttttttcctgtgtagagccctctacacaacatctgatggactaatttaccagaaaaagaacatttgcggacagaaagctgaaacagcggaccaaagcatgagacgctgagataatttaactctcttgtcccatctaggattttgacgagatcaagaagatactcaggctttgagtaggcattaatacgaccacatggcggatagcaatcaatggcgtagagccttttgggaagtctatccatgtttacttcaaggataaccagtcttcctagaggtcaaagagcgtctcggcggatgatctggcggagacgaaagtatcgtcatcatcttcgaacgataccgtccgcctgaaactgccaagaggggacttttgttttgatttactcgtggaggacctcatctgtagcggggagaaacaaagaagaaaccgaatttgttaatccaacaaatcaaaagaatcacacagaacgacaaaaaacctaataataattagggatgaaacgattaaatcaggacagatgagcactactaattaattatgttctacaaactgactttggatgaacaaaattgggggatagaatcgatagagcgttatgtgcagagaatcaaaaaatgtttacaagttataaaatccgatgaaaggagataacgaagaaagagaaagagaaagtgagagagagagacgaaaatctatgaggggagataacgatgtgttctttacccgcacgattcctagggaagagagataaaaagaaaatgaaatagttcaggtaggcgcaaaaactgctacaaaccgtgagggtaatatggaaaattcaagtaggcaatgtggtatgggttggaaggagttttgaaatgttgtagattttaaaagaaattggggaaatgtggtagattttgtagttttctcaaaaaaatattaatacaaacttttatcaaaaccaaatgaatatgataatacttacaactagcataatgtgcggttcacaacataactattgtgtcataaataacaatatacacattggtatgtagattataatttatactctacaatatctttcattaaaagtttattccaatacattttttaaaatataaaaccctgcacgtatgtgcgggtcataatctagtattatatgctaaatttgttaccgtgttttactactctccttaatatataatcaaaattccaaatacgtaacaccaatccatatggaatgtgaaatcatcttaactcttccccaaatgtacgtgtaacaaaaataaaaaaaattaactctcaataattatagggtttaaaaacaatacaagaccataaaattcataatgattgaataacggatcggattaatgtgatctttgccaattaaaaactctattttaatgtgattaaagtcatatttcccaaaactgtcaatttcgaattctatcaattccctcagtctcgcctcttcctttaaactcgcgtgtatcaattttaatgtgctcgaatcctattataaaccaattgtgttgtctacaatccaaatcatttccttctcttaaaaaccctagagtaggtaatgtccccaaatactttgaaaacaaacgagaatcccctctcatattccacacttgatgttgtagatggcaaaattgactctcaaacttttgttgttcgcttaacccaatcgtggaaagtacgtgatttcaaacgtaataatcttcttctcagcgttgattttcttctaatagatgaaaatgtgtagtaaactaaaaccctaccacaattatattttcattttctgtttacatctaaatttattatttccttaatatctattaatataggctaatgttatacaagaatctatccaaccatgtcttcttcataattttaagcctaaacttatagaggttaacattttctcaatccatgattacgatgtgaaaaaacaacttaactcctaccgtctaactaaccacgactacaagatatttgatataggtcaaattgccttaagatcactctctcaaataagagatcgattgtagcacttaagggtcgaattccacaaagctctctggatcacacaatagaccaagattttgaattaagctaagtaagataataatgaaaataaaaagaaacaaaaggaagcaatagcaaatttgaggtggtaagataagaaagtaaaaacgtcaggcttgcggtattctcaggaaactattggttagtagatctaataatagctaggttgttatcgaaccattcttaaactcaaactctaattatggaataaccggtggtgttccgcgaaactccctatgcctatagctaagaataaccggagaagccgagagatctttaacctaaacatgaattctaaacgagttcaattgttcaccttagtagaaaggccaattcttattacacacctataaaccaggctcatcaaataatagatccaactacagatacctatggtgggtatatctattgtctggattcaagttctaggtgatcaatctagatctagcattaagaacaattaaagatgaagaattttacagataacctagcaaaggggcgatctactaaaccatatgaatccctaatgagaaaccctaaacctaacaagttgattattcagacatgatcaaagaaacacaaatcataatctaaacaagaaatgaataacagcaagagaaagagtaaagaagatcttctccaacgggagtctccacatggttttgctcccaaagtacaaaagagatgaggagattagcctctccaagcttaggtctaaacaatgagctttaaaactatatatatgacctaaaaacgtgatggaccttctttagaaataagagaaagttttggaccgaatttggaaacttcaaaacatcaataagttgcgtcttcgatttgtcgtcaggtattggtgtcgctcgaaaagactctagaaataacaaaaggactctaaaacctatacctaaatcatagctaaaagcaataaaaatagggttatatcaatatttttcagtgatcatacttcaatgaatcatgttgacaatatccactacgaaataccacatgaatatttttgatagtttctccgattgttttatatttttggtttctttttgcaagatatcatgtattcgcagttccgataagttggatgtgtccacaattcctcctaagactacaaacaatgttattcttacgtgcatttttgaaaggtgatttattcttttgttttgcaaattttgtgactgctttagttagtctagatggtgaagactcataatttacattaataactacgtatatttttttgttccgttagtggtgagacaacttacatatctgtatgggacaaacttgcatgtaaattttgtaatgatctcgatcaactacaaggtgagcctcttatcgttattctcactggtgttaatccaaaaaccgtttgtggtcatttctaaacaaataaattatagttgtaacattctctttggttaaaccattatgtattatgctcattgatttttctgtttaagtttggattttgtgttttaaatttaccttctcaattgaaggcgaactatatctcaatactactgcatccacacggtttttctggaacatggaaaatgatgtcaccaaagatttttccgtaaaatgcaataagatcaacgtattagtctccaaatgtaatttgttatcatttattagaataattgtaattaaccaatctgaaatttaattgtagcaccaatttccagaaacttttggtgccttcatgttaagaccaaatcactgagttagtttccactaacattcatactatcgcccaaatactagcttatgtcaatgatcaaagtgggaaggtagtttgttaacaatgttttctactctttgcatattttgttgaatatatatatgtaattcatatcttgaaaggaaaaaaaactatgggcaaaaatcatagacgtaatattacgtagagatatttaccctttaccacactttttcaagttctgtttcattcacacatgcttaagttttcacatcttttttttatgtgtgttaagtcatttataccctctaaaaccaatcttcctcttttttctttcctaccatagcaaaataaatgagatatctctctctccctctctctctctccctctctttctctccctccctccctccctccctctctctctctctctctctctctctctctctctctctctctctctctctctctctctctctctccttccatgatttgtaccaaccttcctctctccatctctccatctctccatagcttattggatcaacaaactgatgggagaagcttcttaaaccattcgatctagattctctcaagaattcattttataagatcactcattttcagatgtgtaagctatttcaatggagctgttctcataaaatcttgattctctcatctctaaccaaagtctcgtttaaaacacaactctaattgaaacaaagcgtgtggctttgcatactatggatttgcataggaacatgtcgcacaaattatgttcactaataatcataccatccatggattcgaacaaatggatgacttaaagaaccaccagcttgaaaaaaacataaataaaagtaggttttgggtaattgtatgtgcttggtgaagatcatatgtattatcggctaattgaaaatcatcaagacttattgcaggcttacggaaccatcacaatcggctgcaccataatagaattaaggttctctaaaccctttcagatcatccacttagatttggccataaacagttgtccattttaccaaaagcacttgttcatcatagtacttacgaaagttaccaaaacacatgaaaaaattatgtctagaaacaacaagatcatgctacgtgtaacacccgtcccgccatatagactaagacggcatgttattcatctgatcttgccaaaacgttttctttaaacttcacacacgaacaaaatattgcacataactcctcacgcttactaacctgaggaaaaaaaaggaaaaaaaaagggtgagtaaagaaaactcagtgaggggaatcaactctgcccactgaaacatagaacactttctaaagctatacaaccatcttcataacatataaacttagacacacgcaatcaacctaacatgctttaacttctaataccacatttataataatcatcttatatatatatatatattatataaacatacacatcgttaggtccagtcatccccgtagaacctcataagtggaggctggccctcgtggcttaaacactcccatgcattccgggctcgttagccgttcttgaccagttgttaatccgtcggtccatcactgtccacatcactagggagaccacggcccatagctcgattctccccagtctttcatacaaacatacataatcatcatatatacatacttatacttaacattctcatacataatatatcatagtcagacatcatcaccataaatatcaatcaataatcatcaaatcatatcatcacataatcttatcctacgcaatcagatctaagcctacatatcatgcgtcaagaagcataacaaaagacaatgataatatgtttcgcaaatcccaccctcaccttagtctagttgaagatgaagaacatctctattctcctttctctccttttagaccaacttagtataagagctttaactgcatactcttgagctccaccttgcttctccatcaaccaaaaccttactccatgagtcctaaaggcttctgcaaagcttcagctccaaccgaacccgtttcccattcaaacaataaaaacttgtcatggtttactccatacaaaactgtctcagtaacatactcataagtcgagaaataaccgttagaaacgtaatcccaccgttaaatatgtagccaatagtatcatgaataagtacacgaagtttcatcccgatcggacctcacatgaatctcccacgttcttctgaagatgctgcatcagaactgatatctaaatttctgcaacttgagatgattctgggcaaacttctaaggtcaattccggatggagctccgatggacaatatgtcagctactatgagttccttgaatcaagatctttccatagaaatcttaatcgtgatctaattccttctggtccaccgggaaaacgcatcataaaaccagtagtcacacattgttcttgatttatacttaaaatagatttggacaacttctgcagttacttgcccagaaagaaatactcatatcttctcgaatataataccgattgaaactctgtcagttggtatggcttcatggcaacgtgatatgtttagagatgtcttatttaacaactgattctctatggtgcaacgggaatgatccttacaaaaccctatcttggaactgttcttcctccttcctcttttccttcttctttgatgctattgctctgtgcaaagctccaatctgctcatatcatcctcctctaagctttactcacaatcataatccaacttgtgctctcctaacacttgaccgtgatgatctcttctcctccgtgacgactccttggcctccatctccgtgatcttcttcttcctcttacctcctctttctttatcactctcgctctttttccatgattacgatatgatcttctcctctcttgtggctgtgcccaactcatcttctcctttacagatgatcgatcaccataacgtcaaacaacatgtcatctcaccaactctgcaacgatggctcacaaactcgtcaccaatgaccgacaaagcttttgttatgttattgttgctgcttttagggtttcagttcaggcttcactttgacggctcttccaagaaggagatatatacatatgtatatatatgctcacaacataaaaacacaacaacccttaacattttattcttgggttcaattaggctttaatgggctttatcattatttcgaaaacaattaggccctataatgtgggagtggggtgttacattacgcgtgggtttatttgatatattttggtgaaaattatatttgagtgattgttattaaatattatcttatcttacttttttaatttctattaaagaattttttcttttcaaatacgcaattttaaaattataaaaataatagtgcttgagaatcaaatttgattaaaagaatcacgaatcaatcttgttattaatcttatcgagaaccaatttttctttatactagtttttgtcatctaactcattatgtctgtaggaacgaagtgaaaaattcaggaaactgaggaagggtcaaattcctcacacaacaagtcgaaaaggaatgactcgattagctgatgagatgatatgtatttatatattgatttgtattaattttgatagttgtatttatatattgatttgtaaagtgttgaggtactttcttatgattaatcatcagttttacatgagtatttatacatccaccattactttagaaactagaaacttttatattttttattttaccgatttgtagaatttctctttcttgttgtagaaagtttcttgactttagttttatttttcctcatcttttaataggtttttccttatcgtttaaactaaagctaagattaacatattttcaggtttttgaatttttctataaaacatctttgaatgatttcaatatatgatttgacatttaattgttttaggaacttaacatatattcgattgtttaaaataagaaacctggtttttattttcctttttttttaattttaaaatataaagtaattactattttcaaaaatgttaattaattagatgttaattatgttaattattgatgtgccagctctcgattggtcgctctaaatcccacgtggacgcctttagaagtaaatagcttcaacttttatatagtatagatttagatagaataagcaaattaaacaatcattaccttatcttttataactctcaacctaattcccacccctaatttcaatgaataagatttcactaagaacacaaaaaaagagcgagcgcacggaaaaggcaaatacccctaatcatctaaattttacattgtttccaagtgatttttaacttgataaaaataaaatcaccaagaacatgtcacaagatatgcaattcaatgtataaaattcattaaagattaaaatgaactcaaacataaacgcatggtcaaaggatattacttgcatcaagttcactaaacacacttagtaacaatgagatagtcaacatacttctcatcatccatatataaaatctttgacggacaccttacgtatcatgttcttctcttttatttgaatcaaatcagatcagaattcttgaattaacacatctgcatttttggtttttcaagctttgcattcaccttctctcaccttgttcttcttcttcttaccctaatttcaaaatccataaatatccaccaaaattggcggatgtaaagtctcccgaaaaactttatcttttattcattcatgtggttagagtttagcggatatgtttggatgatcagtagttataaatattggaatagtatttttgttcaagtaccttttaatatccatttattgataaacaaatgttaaatcacaaatgaataatatgtaatataattatttacttcaaatatatcaacaatggatattaaaatgtaaaaaaaattatcttaatttattacatacaaatatagacaataaatgttattttaagtagcggaaaaaaatgagaatgagagaaagaaaaatgaggtggaaagagaaaaaaaaatgaaaaaaaagatgtgaatttgtttgtcaacgttttcctttaaacataatgatatgtctataatttgcatgttttgtgtgttcattcatcatcgttttgagtctagtttcatatctttcatcactattttatatcatttctcatcattcttgcatactttgcatgattaggatagctttgcatacatattgtatttttgagttgttttcaggtgatttgggctgttggcgaggaaattggaagaagcgagccagaaccagaagacatactcgacccccaggtcgagtacatccaacaccatactcgaccccctggtcgagtgacattggagccattcttccaatctactcgaccccgtggtcgagtaaccatagctcaggccactcgatgacaccactcgaccccatggtcgagtatcactacaccacaccacttgaccatcactcggccattcactctaccacatcactcaaccccctggtcgagtatcatcactcaacaccaacaccatcactcgaccaaacactcgatcacatcttcaaagtctactcaaattcgcacttaacaagacaagctgagcacaaggacgagaagaggagaagaagaagtgtttggaagcggtctggagcttcatccgatcacgaagcccatctcggcccattatcactctatgggccggtcgattaggttcccggcccatcaactatcattttattttgttttgtataaataggtgtctgagggttttgtcctaagacatccagtcgacattgagtttttgcttcagttttattttctgatttactctggctgcgccgctttgcttctgtaacctgtaattcgatatttttccaagttattcagattcagcatttgatttcatctgtcatcttgtttctctactctttatctctttacttatgcaatattatcatttacctgcgtttatgtctttgagcatgttgtttgagtagtgacatagagttcttaaggatgggatagaatggttgtggaatccttagtctgtagaatggttaagttttagaattgattgaaatcccttcaggactagttgtgtttactgcttatttctttctgatcaactggaattcgatccaaagcattcccgcacccagaaggtattcgatggaatgcttgatccactagttcttgagatatgcatctctatcccaagggattggccgtttagagcgtgtattgactttattagtcggttcttattgcctgtatagttagattccgttaatgggaattagtctaggcttgctttgcttgaagatttctatcacgggagtgaatagatctgttgttgaaccttttgtctagagatagcttgattgcgcttgttaaccatccgaataggctaggataccactccatttgattaccccatccttaggaatttctcgtctaactgatttctcagttttatcgctatcgcttaatcgttctcattgcatgttttttagtttttgcaattactcgaccaacttactcgaccacacctagtgtctggcaacagactgtgcagtcgagtacagttgtctcatttcctgtctgttactcgactagcatactcgaccacaccgaagggctggcaacagactgtgcagtcgagtatagctgtttcatttcctacctgttactcgatcacatcctgcttctgtcatcaaccagttgtggtcgagtgattttagtaattctgttaaaatttttgttttctgcatgtttgcttatgactgttagaaacctcaaaaccgttattgcttggcttgacttagtgacttctgatcacatctcatctgtttgcatcacaccttattggattgacacctaaaatactacaacgacaagatagtgttttaggataattgactaaaaacatactatcacaaaatatcttgttgaaggatattttgttattgatttgaattgaaccgttaaaaaaaattataaaaaaaaatataaaatgtgtctcttttgatatgaaactagaaaaaagtgtgccattatgtatctcaccctataaatagaggcaagttctttatatcttttgcttcctgctttagaaaaatgaaaaagctgcttaaacaataccttgtggaacttgtggatctgtatctattgggcgtctacggtatttaccttattacctaattccagttttaggtgtctctatcttgatgtttctcttaacgctttgtatttatcttctactacccataatattttacagatatcttattgaagttatcgtcgatgatggttgccaacttttcatatttattatttttgatgaagcacgaaaaatattgttgaaagccactgcatctaacttggcttctagaaatgtaagactattaaattaccataactatatcttatttttcatactccaaccttttgtttttaaatagaatgtaggtgaaaacgacccctatggagagattgtaccctaggagatccacaatataattagaagagatttcattttctacatcaaagtatcatgcactgctaaacaccaaagtttctccgtctctaaaatggtgacacattccccctggtcaccaaaagggtatgtcacaatccctatattcatatatatttatctacttctgaactttattttctaccacttacagtcataatatttttgtaaataccaaattgttaccgatcaattaccagttttccatgtgtactaacgacccaacaattccgttcagccgtttggccggaatttggtcggaaagtcaccaaaaaatattatgtcaaaaaagttccaacaatcttaactgttttcaagtatattatcaccaattgtggtttcaaagctctctccctaggttaattgaacaaaaaaaaacgtagaacaacgcaaaacaaaacttatatacgtcacaagtatgttatcagatgaaacactttccacgaatagatcttcttcacttaaggacacgaaatagatgggtattttaggtttcattccaaaaatgttgaagaagtatcggatagtgcaattacaagatacaaggacttctgtaaagaaaagtctgcgtggcaaccaaatgaaataagcaaggataccaagggaggaccaaccggacagaataatttacactgatctcaagaagagctcgatctcctcctaccaatattttagaatattcatgggatattaccgactcgatcgatgccgattcatctctatctcatttaagccgacctaaagattctaatataatgacttaatgagagcctcgcccaggccagaagttcaacacacctcttgcatctcccttttcttcttataaaagttaatctcacatacgagagagcaataagcctttagaattgcactaggtactttttatgctttttcatttggttcttctatacactcttcttaatcatgttaactcaattattcattcacttattcaattcttattcatcactatgacccatggttcgaaggagttctaatgaactgaattatgattactatgattttctatatttttttctctctttttttaaagattactaggatttggcttttcaataagcaaattactgcatgaactaaactgatcacttggtacatcaaaattggtaacaggtttcctaagtacaacgtatcccagtagggctcattacacaaaaaacatgtacttcccctttcacgtattgggcagcaagctccattaggtttaggcttaaaaactagagctttgggggaattttaacatgtgggcttaagcctaatgagatagggtttgggttcggtcgtctcaagatggaataatattgtcttgtctcacttgttgttttagtggaaaacttggtgttgtcatactataaagaagaaaaagacatccaagcagattgaaactccaatgacactcactacccttagatcaataattaatgatttttattagatgaagtgcttctatgccatttatcaatacgaacgaataaactaaacataatctgctaaaggttctatccaagaaactaagtatcgacccacaattggtatgcacttgcattgatttttttctgccaggaattttcactttgaatgatggttgttttccattaatatttactcttgagaccatttatatttaaaagtctataataccaaaacagggatgccaaatatggtatatatataatactttttcttgctacacaaataaggttttccaaaacttcgaaaataatcaagggtttcaacactgggaaaactctagtgttccaaaactgtaaattctgcgttaaatttttgaaacaatcatagattttaataagaagaatatataagattggtttcttaacttatacccgtagtcgttattcgatccagaggttgatgcattggtttatgttttatataaaccactgttagtttgccaatggtttcaatagtttctttttgttgtcgtcctaccccacttagatataataaccaaaagaggatgcaatttataattattgtgatggatgctcaaaaggaaaaaaagttgaaaaagggttgatggtgcaaattggagcatgcaagaatggtgcccaattatatgcatagcatcttccctaatcctcaactatgtatttttcaattgagtatacgaatattttatgctttaatgttttaattaatattatattgttttttttaaaaaatatatgttattaaagaagttctcaaatcacatttgtttgggaagtctgtcagttgggcttttgcctaattggtttacctgatagtcagaaatgcaggcggcctgactaccccctggcattagtcggaaagcatttcaaactccggacagacagtgtggtggtccttcagggagaagtccactctaaagtacttcggtgcgtttctaccgaaactgaccggatcagtcgataatgtttatcaaaagaaaaaaaaaaaaaagaagttttgcttttgtatgaaaaaatggaaaaaaaaaaaaggaaaaaagaagttctgtttctttgaacttttttttatccaatgatcttaaaatacaatagttaacccataataaattatgcaaatagctagctcgagtatatattttcgcacatatttggctagggtttacacaagttaatctatatatatatatatatatatatatttatatacatactgataattgttgctattggccaacattaatagagacggcagtgctaattattacttcaaatatatttgttggatc

SEQ ID NO: 1055 - DNA, 64714 bp, Arabidopsis thaliana
aagttctagttaattgctctagaactagcattaaaaataaccaaagatgaagaatcctacatatatcctaataggtgggcgatctactaaatcatctataaccctattgagaaaccctaaccctaacaagcagactactcatacatgatgaataaagcaaacaacatgtatgaataagaaagcataaacaaaatcaataaggagaaaagagttagaaaagatctcttcactattattgaaatctctcatgaaactctgaaaatagggatccaatgtctgaatagcttggaaagtgctcaaaaacatcttaggcctaattaatgacatttaaactatataaatatattaatatatatatatatatatatatatatatattaataattttaaatagggaagtcttctagggaaatttttcatttgttcaaactctaaaccgtcttagactttactaggccgcaacttgtctcgatcgacaccaagagtgtgtcgatcgacacctagagtgtgttgattgacactctcgacttgatatgaaactgaattcctcctttggcttagtttcttcagtttttactctaaaatgtctccttatctccattcttgtcccaatccataaaatacctgaaaaagctctaaaaagactctacaaataacaaaaagactctaaaacttatatataaaccgtagctaaaaatagtagaaatagggttatatcacttagcaacgggtggtgggtgggtttcaatgtaagaagtgatatctcgagaagcaatgtgtgtagatccttgttcctctttgttaatgatggaagcctcaaccaatttttgcgcttagtatccgtgatctttgttgtaagactcgtgataatgttgttgattagtaccagtgctttgccgggggatcttgtcatgaagttgcaataacttgctgcgtctagtgacatatgatacgactcatctatccctcagaaaaatatgttgatgagcaggatttcctggaaaccatgttgtgggcagtccctctgataggatttgaatttgatccacgcatatttgaaagtttatgttggatcctgagtgaacaaagaaatcttcaatcgaagtgcttctgtcattgattcatcaaagaagtgattcatgaatgcgttcttcatattagtccaatttgtcaatgaaccagtttcgagctgtcgcaatcatgatattcctctgcccattagagagtgggggaagagtttgcaaagatgataatcagctggtacaccatctcgacgacactaagtcctcaaagatttccaaatgatcaagtggtgattcataaggagcacctataaacttccatcttgaaacaaaatcataataggcagggtgaataacaaagtcttctcttgcaaaaggggatagctggatcgctgatcgttttgagtagaatagatcaactctgttgcaatagattcgtgaatcaaattctctaggtacgtgaaacacaagagactaaaagaagaagaaacacgtgagtaggtgaagtaaaagaaatgttcaaacttaaatctacacctagtctgatggtgacttcggcaatggcgccaaatttgatatacctcaaattatccttaagcttactccctcaaataagagatcgtcgttagcacttaaggtcaaatttcactaaactctcgttgttcacataataaatctatgatgattatttacctagacaatgtagatgaaagtaaagacaagaaaacaataaatcaagttgtaaattcaggagattaaagcgtcaggtctaggaatagtcttagaaaattgataaattgtcgatctagctatgactaggattattattgacccgttctcaaacacaaaccacttttatcgaataacccagtgttggcttcccattactccccatgtctaacctaaggattcccagcgttcgcttgacaaatccctaatcctaaacatgcaatcaaaacgactttgataaattcacttaagtaaatggctcgattcttattagacacctataaactcggttcatctataatggttctgatgacaaatgcctttctaggttcacgtattatctaagatcaagttcaaggtgatcaatctaaaactagcattaagaacaattttatatgaagaactctaaaaataagcctaaggacttgatcaacatgatgtaagtgcaggaattagcacctccgacaatactagtctaaaccaaaggaattaagaattaaagtaagaattcagtcaaaccggggtactttggtttagtctgttaatgggcaagagtaaagagatcagttgccaacatcaagccaaaataaggagattgcctggctgatattcgttcctcaaagaaaacaaaaatagtttcacctagtcaaacgcaaacctttggggaataagccttgaagtaacctctcacgaagtaaacgttgatccgacctatcgcccactaaaataaaaacgtcataagctaggcaccgagagtgccaaagctgtgaacgatgaggtcgaccgactactaaaaattagatcaataagggaagtaaaatatcccgattggctcgctaaccccatcgtagtcaaaaagaaaaacaggaagtggagagcatgtcctaaggacagtttcccactcccacacatagaccgactggtcgaagccaccacaggtcattaactactatccttcatggatgcattctgtgggtataaccaaatactcatgcgtccagatgaccacaaaaaatggctttcatcaccgatcgaggcacttacttctacaaagtaatgcctttcggtttgaaaaatgatggtgctacctaccaacgcttagtgaacagaatgttcgccgaccaactcggaaaaataatggaagtttacatcgacgatatgctggttaagtctgcccatgaaaagaaccatgtctcgcaactaagagaatgtttcaaaatcctaaacaaatttgaaatgaaactaaatcccgagaaatgatctttcttggtcccgtcaggagaattccttggctacctggtaaccaaaagaggtatcgaagccaaattaaagcagattgccgccttcattgaaatgccatcacccaatacaacaatagaggtccaacgacttattggtcgtatcgccgccctcaacaggttcatatctagatccaccgataaatgcctcccgtactatcaactcctctgaaaggacaaaaaggtcgtttggaacgaggaatgccagtaggccttcaagcaattgaatgtatacctagccgaaccacccatacttgcaaaacccgaagaaggagaaccaatgtacctgtacacaacggtttcttgaaccgcaataaatggtgtcctggtacgagaggactacgaaggacaaaaaccaatctattatgtgagtaaaacactagtaaacgtcgaaacccgttatccaacaatagaaaattggcactagctgtcattatgtcagctcgtaaacaaagattgtacttccaattgcaccccatagtggtgatgacatcccaaccaatccaaaccattttgcaccatcccactcaatcaggaggtctcgctaaatgggccatagaactgagcgaatacgatatagagtatcgtaccaggactagcttgaaagcgcatgtcctggccgacttcgtaatcaagctcctgttagtggacctggaccgaaccaacatcaataagaaatggctcctcctcgtcgacggctcctcaaatcgacaaggatccggagtcagaatacaactcacctccatcactggagaggtcattgaacaatcattccgacttggatttaatgcattgaacaacgaatcagaatatgaagccctcctctctggcataaagctagctcaaggaatggggatccgtgaatacgaggctaaagacgaatgcatggaagcgtacctcgaacttgtcaaaacgttgtccaaacaattcgaatcgttcgagctgactaggatccctaggggagagatctcacttccacttcagatccttttgtcaaacaaataatcacagtcgaaagaatagaacacccgagcgttaacttaacggttaaacacgctgggacagaacctcggcaacgtgcaattttacacagcgtttccggcccttacatggtatgcacctagatgcagaagataaagacctcatgaagagcatgcacgagggacagtttagtagccactgcagtggacgaaccctcgccctcagaatcaagaagcaaggttacttatagccgacaatgctagccgattgcataactcactcactcaaatgcgataagtgccaatgccacgcacctaccctacaccaagaacccaaggaaatgtcgtcaatcttgtctccctacccattcatgaagtggtccaaggatgtcgtaggacccatggaagcttccgggggaaaaaagagactaaaattcctactggtcttcactgactactctaccaaatggattgaggccaaagcctaccaacaagtaaccgagaaacatgtcaaggtttttttgaaggaaaatatcgtatgccggcacagtatattgtacaaaatcgtcaccgacaatgggactaacctcacctcgggaaaatcaaagcattttgcaaaaaatggaagatccgtcttaccacgtctactcccagtatccgcagggaaacggaaaagtagaagccaccaacaaagttatatttagcaacataaagaaaagactcgactccaaaaagttactgtggttcgaaatactccctggagttttctgggcatactggactacgccttgcaaaccaacccgagaaaccctttctctctcgcttacggcttagaagtagtaattcctttcgagaccatagtaccaagcgtgagaagagtcgcaagtcctgcaaactcggactgaacacccaaatgttgcaggaaaacatggacttcatcgacgaacgcagagatcatgcaatgatccgagttcaaaattatcagcaagctgttgaccgctattacaactccaatatcaaaatttggagattcgtcatggaagagctcgttttacaaaagtgttcagcaacacgagagagctaaacgccagaaaattgggcaccaactgggaaggtccctaccgaatcaccgaggtggtagtgacggcgtctctacgctcgaaaaagtaatcaacggagtacctgaattttacggcgttggaatgctatgcatctcaagaaatatcattaataagtaccctaaaacaattgaactacgataaggcttgataccctaaccggctacataggcagttcccccgggtacgtaggccaccatcttaactccttctattttaaaaggtcctttgacaaggaaagcaggcatcacgctctcaatataaccaagacacgatcggacgtgcccctctgtcgaagaacgcaggtggctcacctaaacatccagccattttccaacctcaaacaggtcgctttcctgtgactagagattagatcgtcatatgctttattttatttgtactcgaccatctcaaaattagaataaaggcaatttcgatatacaatgtcaccctttgcaaatcaatcgctgctgaatgttggcggatccattttgtgatctcatttccaaaaagtcaacaacacctctaagccataaaagcataccatttcgacttcatcggtgctcacctacaacaaccatatctatctccttccttcgctataaaaacataaccaactaaacaaggaagaaacgaaggttccattccattcacaatcttgcgataccttaagcccagcatccaaaaactggcaggtcccttgtgtgacctcacttcaataggtccccgagataagcaacacaaacctgcctagattcgaacctacgaaggacatactatttcacatctgcaatacttaggcttaaaacaagacctaatataattatttttaaaaggggaggggggggggataacgcatacaaaagatattcgatagaacaaaagtaatttcaaatggataaaagccttcccaggcaccgaatattcgatagaacaaaagataaaagccttccctggcaccaagttcaaaagtaaacaaaaggatgaaaccatagccaggtcaacatagctcttctcgaggtccttcgaggtagacaactccattttcagtctgcagatctttgcctaaaaccatagtctggtcagcatcattacaccatcaaaccaacacaaagcacaaaaacgaaaaaatgataggagtgtacctggtacgaagcctcgcgctcctgacctgacttcacagtctccgttatctccttgataagcgtcaggggagacgttgcttaagtgttgataataaagagcaatcagcttgttcgtaatagcaatctcctgccgaaaacgaaacaggaatgaaaacaagcacaaaatttggaattaaagggaaacgataatcgattgttacccggccctccttcaccaccatatcagcataggtcgccgcctcgaccatgttcttcacacctgggacctggtaattctgtcctttgatgtggcaaagcagattcgctagcccagcctcgtcctccactttcgttggaagtctgtctaacctcttgagatcggctcggaactcgagaagaggacctacccccacctctcgaggactgacctccactctgggatcgtcccgaggatcgcctgtccacacacacaggtgcttccggattagaagccacgggttctgcccccccccttctagaaggacgacatcctggtcagctatgaccaatccagctgctgggtgcaccaccggcaagatccgagctctttttggagaagatgttgcaccgtccgccatggtaacctcagacggtccagagacctgggtgacctggttactagcacctacctggcctgctgtagaggtcccaacaatagcttcaaggagcagaagatgagacgtcgggcctctgcagccgacatatgacctgtacgacaacagatcctggcagtagctcgctgagcacgaagacttggtcgccacattcttctggggataagcggactttctgaagtagaactggaatttgggggaactagaaaaacaaatatatattgtttgtcaactggtaattcgtttgtatattaaacgaagttaaaataaaaacaagaaaaattgtacctataggcagatcggccacatggtctagttggacctgcgggacctcttcgattgggtcccgctgaactgttggaagagcaattactggacctgttgtagctacggcgagagcagtttttatgcgatccctgttgaaggttgcccaatcaatttgaccacgcaggaggagggtcagcaattcaagttctgtcttcgaaagggtaacttctttgatttttgctgcaaaccaccaagagaagatcgatgttagtaacaataccaatatttcaaaagcaagaaatctatacacgactaaaacaataaattcaaagcggcagatctccatctgacccaggttagaagaccatgtcctcgttatcctcgcagggtcaaaatcgctgacggaatgatgatccacccaaaagaagcctacttaactcgccaattcgtgtcccggaaggcctttaaaccacctaagattagagattcaggacaagcactgatatagtatgtcccctggtggctcctggcattagtcttcacttggcagagctgtaacaattcgtggtagccgaactctatgttcacttctcgggctcgagtgtacaacgccagcacatgacagacaaaatttgggcacatttgaggaaaggcgaaggcaagacagtagagcatctcgaggatgcacgccagaatctggaagaacagcctgtacttcccaaagaagttggcgtaggcgcaacaccatccttccaggacattctcgggtgagagcagcgaactcgggagtatcatagttacccccgccggaactcggtacctcctccgaaggtcgaccaagtcgttggctgtcatcggcaagctttgcttcttcttgggagctttcttctttttaggtcgatcgaccttagacgatggcctttggattcggcctgctccgcctagggttcctgtcgtgaaggaaagaagagaaaagcagatcgagaaaagagaagctgtagaggaaatacgaaggagatgggggaagaaagataaaatttatatctctacaataaaaatagtgggggagagaaaagttaccttgggagtcgaatgagtttatgtgaaaaggagttgggacgtggagagttatttaaagagccagcatcaccacgattttcgagatcgtagagatctcttcccacctcaaatctgaaccgtcggatgaggcataatcaagaggcgcgtcatcttgactgtacacgttagcaacaattttcctcgagtatctgctcgaaatcatttggtttaggaaatccaaatcctaacctttttattgagcttatcctcaaaaccgatgaatcctattgtgtttatcacattaccaataacattttcgcaatcttacctgacacagatctctgctcattgagctcacctactcactcggtgggctagggggcaaatgttggagctggatttccctccaggaatccacctgcgaaaatgccaggctggcctaataggcccaacaagccgatcagaaagaggacctacggagctccggagcccatgtggtaattcagtattttggccttaggaccccgttggtctgacgaggagagatatgtgtgtaacgacttgagaacaaataaggaagcaaggacgacttggaaaagacattcattcaagcttaacattaatattcatactttacacttgtaatctcattctacattgtaaaagttctactattatcaatacaaaattccagtcgttcttagcaatataaatctcaaagttcttgtgaagatctagccctcctttctcataaacttccttataaatttctagtgtggatttcagtacccacactagctctagagtaattaactagaacttgattccagaaaatacaggtacccaccataggtatctattaccagaactactatagatgagtttggtttataagaatcggtctatctactaaggtgaacttatcaaactcgtttagcatgcatctttaagtataggattcgacggcacatcaccgagaatcataactctaggcatagtgagttttacggaacatcaccggttattctgatattagagtttaagtttaagaacggttcggtaacaacctaggtatatctggatctactaataattatttcctgagattattctagacctgacgttttaatatcttgtttctcaaccaaccaacctgctttttgcttactttacattcttttcatttttcttacacacttctaccttaatcttgacacttagctcattgtgtgaacaaaggaactttgtggactccgacccttaaatattacaatcgatatcttatttcagagagagagtttaaggcaagttgaaccatatcaattatgttgtgttcttggttttgagtttctcataggtggctccaaagaagaaagggaggatttatgggcccggttcaatgcagctagaagcctccttagctaacactactctagatattcctcgagaagatccagttgtactctctcaaaagctcttattgcaaaccaagctaagaagatcactagctttgatgtgtactttgactatcttgccgagaaggatccagagtttgatgccctctttcgagccggatcgttttcaaggactgcactagtcatctccaacccgacacctgaggtgcccaatgccatagctgctacatctgctagaataggagctgacgcagtccgagctcaaggcaaccacttgatcctctccatctcaagctttctaagtctataataaagtttactttgggttttgggtttataaggtcacaaacatagacaatttaatgtttgtgaatgtataactattggattcttagattattatatgaatatgcttctaatttcaattttcaatttcagtttaaggattcaaatcaattttcaaatagaaatttaagtttaagatcaaattaagaaagtaattatagataaactaaccttactaacgcaaatgaaaacacacagtgacgtaaataaatcgcacatccatctcaaaatttgctagagatttgccactacaagaaaagagcacgcaaatccattgcaaaatttcctaggtaattgcagtaaacaaagagctacgcaagtccatcgaaaactttgaaagaaacaagcgagacctaccagttgcaactaattgacctaccagttataactaaattagttgcgactggtaggtatcgcttgatggctagtgatatacctcaatttttactgattttagagatgatttagacattggttttgagtctttttgttatttctagagtcgtttctagtccttttcaagtttttatatgtttgggatgcatttggtgatcatggaaaattctggaagaaaacatagaacttatgttgcagaagaaatctcgagaccaaaattcgcataggtgtcgatcaacaccaggggtggtgttgcctgatgatatatcccgatttttaccgtttttaactatgttttaggtataggttttagagtttaattgttatttctagagtcttttctagtcgttttcaggtctttacatgtttgggattcatttggagataatggagcattctagagcaaaacaaagaatttatgctgctgaagcaaagccggaaactaaaatgcgtgtaggtgtcgaacgacaccacccctggtgtcgagcgacaccaatacctgacggcaattcgaagacgcaacttatcgaatacccagaactttctcctttggttaatgaaggccaatcacgtgttttagacttgtatatatagtttttaggtcattgtttagacctaagctttgggaggctattccatatctcttttgtacttttgggagcaaaaccgtgtgaagattccctttagagaagattcttcttaactctattcttctcttgttttattcattgatttcttattcaatcatgttttgttcttctatgatcatgcttgagtagttttcttgttaggtttacggtttctcattaggaatttagattatttagtagattgccctgttgctaggttatctgttaggattcttcatctttaattgttcttaatgctaattcttgagtagctaactagaatttgtatcctgacaataggtatgcccaccataggtatctctagttggatctattatttgatgagcctagtttataggtgtgtaataagaaacgacctatctactaaggtgaacaattgaactcgattagaatacatgtttaggttaaagatctctcggcttctccggttattcttagctataagcatagggagttttgcagaacaccaccggttattccataattagagtttgagtttaaaaacggttcgataacaacctagctttttctagatctactatcatctatctcttgagaataccctaaacttgactcttttcccatctgatttacattttgatattattgcttttctttatttcttattttataatctattggtctagcttaattgaaaacatcataagtctattgtgtgaacatcgagagctcagtggaatttgactcttaagtgctaacgacgatctcttatttgagggagtaagcttaaggcaatttgagctatatcacccgacaccactatctgacggcaattcgatttcgagtctttttgaagttttgaagatttgttgatttgccccagaacttctccctatttgcaaagaagtccttgcacatttatagaatttatatatagattttgaaggtcatttttagacataagcttggagaggctaatctcctttttacttttgttcttgagagcaaaaccatgtgaaaattccctttagggaagttctctctaaactctattctcattgttattttcttttaagatttcttattcaatcatttttttttgcttcaatttccatgcttgagtagttctcttgttagggtttatcattagggatttagatgatatagaagatcgccaacctgttaggattatctttagagttcttcatcttgattattcttaatgctagttctagagtacctaattagaactttatcttaagtaataggtaagcttcgaaagggcgcttattgctagaactatcatatgtgggcctaagtatttatatgtggatagatctgggttcgatacctaggtgaactgatcaaacctaatattaatgcatgtttaacaattagggatccgcgaatagcattgggatctttagttattaggcataactaattaatgtgactagcgttggttaagtttacattagtgatttgagttccaaaacggttcgataacaatcttcatcatagctagatctattaatcttctattagtctactctgtgatctgagagctttgtggaattcgaacttaaattattgcaattgatctctttatttgagagagtgttcttaagattaatttaacttacatcaaatttcttggacgtggatgcaagtgatatgagacggaaaagacttgtctaccgtagggtcccaccttcggaggataaccatcgatttggagaaatggaagagttggttctccaaagctttgagtagattaggttccttggcgaactgaaactggaagaggctgtttccgaggtccgcacccaccgggctggaaaaggggtgatgaaaaagaccttatggattgcaggattgatgagttttcatatgattgtgagttcatgtcttcaaagaagctcagggttgtcgaaagcagggacttaaactctaggaggttgagggttctgtgaggaaatgattgagcttttcccttttccgcataggggagacgactcaccattttcttagatgctgaagaaaaatctttacttgatgtaagaaggtttagagggagatttaaatcggagaaggagagaaaaacggcgacaccaagggaaccagaggagatctagaaacaagatctaggttaacccggagagaaatgtgaattctcgggagtcaggtttggtaccgttttctctctcgtccaaaaaagcatctttttctagagtttgaatcctttagtttttggtttatgatctattaaaactaaggatgcatttcttgtaatacacgtttttttggtgaatacattttttcattcatacaaaaaaaaaaagaaatcacagttgcttagaaactaatatgactgaaattctttacaccgaaattaaacagtaaatacaaagatttaatataatattacatttgattttttttaatataaattttaaatagaaaaggattattttagaactccctcttacaaaaattcttaactagaaaaagtatatagtttgaataacattacttttattatagatttaccaataatgaaatgtataacacacaaaattttagattttatatagaaatgatagactcaacacaacacaaataatgttattgtcattttacactctcattgaatattaaaattttaatttttcttacatttaaatagcctgttaacgtttttaattatccaatcatatactttgtgtataaaaagcggtctatcaacatgtctctcagcttttatctttagatagatcccattttttattgctctccaatcccatacgcctccatgatctgaagcactataaagtttaaatgctgtaaagttttgattgtgaatttataattaggcccttgtctcaaggtacacatgaaacgagtcgtagccaaaacatgggtaagaaattgattgaacctatgcccaattggtattattaatggacctataatgtcatctttggattaacatttcatccataaaaaaaggatttgaatttgtggtcaacctaaaaaaggatttgaatttataagtgccaccctagcttggtcttttaggcttttgactggacctcgacatcaaactggagggatctgaaaagccaggttgggatcgattctgttgttgggtggttgtgagttccagttgaacatctgataaataaataaagattctgtcatgatgtctcatccctagaattagtcagataacttaagtttgttgtggttagaccaagttctagctaatcctagacccttaattcgatgttgacctgaatctcccataattatcaaaaatggcaaataaaaagatccaaattaatagatattgactaaaaaccatgtagagcctaaaaagctcatatgttggtatctcatgtctataccacaccaatagaagtagttttttttttttttttgtatttgccaacagactgatgtctatagtagaataatcaaatcaatttatgttaatccaaattaatcaatttagttgaggtatcaaaccatttgtggtggaccaaagtaagtaaaccaatttatgagttatctcatttggagattgtatacaatatttgaactctataatttgcagcacacaatatgtccactaaaatgaaatcgcagataagttgctaatatgatattatcttcataatctatatatacttgctaattatgtccatcgtttttgcatatatatataaaaaagcgcacatgccgaatctatctgttcactatatatcctgtggcaacagtctttgacgaagattaactaggcgtaggcaaccaatccgagctgcaaattcgaagaagggtctatgcatgcatgattattgattgtgggttacagtagtcaatagatataattctttagcttaaggtactacttttgattttacgttagtagttacacacgaagttggtggttgttagatttgagtttaaaggcaagttaattatagataaattattatgaacatgaatggagttatattattttattagaaaccattactcatatttttctagcggcacatcacgaagttccggcacctgacacatagtttaaaggaaatgtaactggaaaacaatacacataaattagtgttaatagttttacagtttatttaaaatgaatttccaagaacactaaatacaaattaaaataaaactttatttttatatagataattggtcttatgaagaatattgaatcttacatataaattaggtagcttgtaactatttactatatccaactttgctctttatgcagattgtctgcaccgtcatcaaatttggccttatagattcttcttaaatagatcccatcttctctagctctccaatcccataagccagaatttttaaatgctctaaagctctgactgtgactaaatccaggcccttgttttaaggtacacataaaacgtgtcgtaccaaataaattatgaaagaaataatctgtaaattgtcctccatttggtattactgttggaccaagtacgtcatttttggaatagcacctcatccaaagagttttcttatttttgagttcgttcacgattctaattccggcgccggatacatggccaagcatgcaaagactaaaaacaaatacgaaaattgtgaaatatttcattttttctgtagagatattttgatcttcttttgtcgtgttgacttgtttttttcgtctgtatttataacaacatatatgttgctatttttgaatgtacagtttcttgtttctctgttaacataaatgttctattaaattttgtccaaaaaaaaaccttttctattaatagttaataaaacaaatcattggagactttcaatatatgtggacaaaaataagtatatgaacatttaactaccagcctagcacaggttatctcatccatttgtattatatcttttgtggcgaacaatatgttcaccaaaatgaaatctcagataagttgctgatattaacctttattatctatgtacttataatgtccattattttggtataaacaaaaagtgcaaatgccgaattaatcgatcaactatatcttaataaaatatttcttttacaagtacttcagagtaatcctatagaatccagagttcattttatggatgcgatgcaacatttaagtgggtcccaaattgttatagggaaaaattaaaaatgtttaaaagttctaggatttcacactcttaatttggccttccttttatagtttcatctccactcttcttattcctcttcgagaaagatataaagatcagcagtgaggcatcaattgcttttttaaattacactccttttgtttctatatgagtctcgcttcggctaaacatcgtatgcatcaacgtgttttataataactgattctcgattttgggttctaatggattaattttttgataagtaggttttttttaggcctacttatatgctgaatgtgaggttcagtttaattcccctacaaacactaacatgtcgatgtagctataggggtgtcaatccagtccactgttattgctagcaatcaagacgtgtacataagcaactaagtccagccagattataataatggtgggtttctagtaacaatcctaggtcaggattcaaacaagaaaaacaagaacttaagagccctactcgatcattgggtcgagtagaaccaacaagtgacaaatttaagtaactaaaatgtaatcaaaaggggatacaaataacaggtaaataaaagtgcaatcaacaggggatacaaataaatctaatagaagtcctaaggatggattcattgataagggcaactctagggttcatcatgtggctaacaggtgaaaggtagatacccttgacgatagattcaaaaactgagtcaatcaactatcgtgacagagacccccataactctaccacttcctaatctcaactgtcgttgatgaaacatagcagaccagggtttacgcaacaatctaccaaagccaataagcagacaaaccaatgtcttggtctagtctataaatctctggaattcgtagatcagacatccatttgaacgtcttttggacgctggacgtctatgatcgaatctccacattagccagcgaaaaccgcataggggccaagtgaatccagaagggttctaacctaatcttaaccacctgactaacctagatattaattaccctaatctaatccatcctcaagaaccctaatcgctactcaagcaacattctcaagaacacaaacccagaaattactgaaatcataccaaaatgtagatctaaacaagctaaacaactttacttaaagaactaaatgcaaaaacgaaatagtttaagagtaattaagttttgaagattcataaacacaaagaaaaactaaaggataaaagctagatcctttggacaaatcccaaagtgatctatttatagtaaaatgttaaaaccttatattcactagaagaaaagagagttgaggcggtttgggcgaatgctcgatcttggggatcgagtaatgagggtgctgcaaagtctgctcctttgtgtctatgttccgagtgatcaattggtcgagtagatgcttcttcctctcctatctatatgctaagatgtctggttgagtggggaatgaggaggatcaaaaagctgccttgatcgagtaagagggtcgagtgaattgctgcctcctctgtggctgcctagatcgagtgaatggatcgagtagaatgctttgcttcttccctcctggttggatagagtaaagggtcgagtagagtccttttaacctccttctgcacctgaaaacacaccaaaacatgcaatgtgtatgcaagatgatcctaaatgcctaagtatgcaaaataagctaaaatggtgcaaaatgatattatacattgagcaaatgcaaatctaaatgatgataaatgcacacctaaaatgagtaaaatacagtgttatcaactcccccaaacttatctcttgcttggcctcaagcaaacaaaaaaacttaagttgaaggagaggtttgaaggtggggattcaaaaaccgaagcatgcatatagaacgggtaagctcaatgtccaggtagctaattctaggttgcaagatgatagacccttacttcaaaactttagccatattcgtcacaatgcaacctaacaacttgccttaatctattcaagcattcacatcaaccaataccctttaacattcattaagcacgaacagtggatcaagcaatgcaatggttttgtactcacttggtttcgggcttaggctaagagacaaaaatggtccctctcatcattggtcgagtaacaaagactctcagagaaaagattgagcttgagcagaatgctaaaggtaaaagccaatggacacatacaagaacagactcccatctacccaatgatatagtatgatagctcaaaagatgatccctgtcccatagatgtcctaactttaccatttttcccattctttctctcttttggttcaagttctaaagggttcttttttgaaacgatttaaaagtctagcgggtttggttttttaaactttgacaaacttaaggcttttcttctaatcttagcatagagggtgttttacccttttctttgaatcacaatgcctaacttctttgaattccaaaccctttactagaccaacacttttgtatccccctttagaactctaaactcttactctcttttttttcttttcttttcattctcattctcatttccattcaatccataaacaatcccaatcccaaatacaagtctccacctagtcctagctaacccaaaaagcgtgagctaggtctacatggaagactgctcttgtcggctcatacctaacacgttataccaagctcaatcaaaaaagaccccacaatcacacacaaatgatatttggcttaaaataagactaggctaagggtatgggaaactgctctaaaaatgagagtcaggtatttggattaacagagggtggtgaagtgaataagataatccaagtatgtatatggtagccatgagttcacaaaccatgcatagacatgataattacaaattcaatttaggttctagtagatagggaatggcatcagataagcgagtttcgaatcaaagtagtatagtcaagttacaaattcaaagcaggatgcagtcatacttcagagatacaatcggttatgcagcagagaactaacaacttgggcattgaacttacttcattgaatcaaaacatgcttatcggtttgaaatcatcattatcccctatacaaatgaggaatcctaaatgcaaatacactatatacaatcctaaagtgatatgcaatctacatgacactctatttttgtgaaatcattttctgattttttttcaaatttttatggttttttctatgccttagatgattcaaaatttgaaataagaaaagagaacacaatgttaaacgtgtcttgaaacctccccccaaacttaaattacacaatcccttgtgtaataaaaatctgagaaaaaattcaagaccaaaacacaaaacacacaaagaaaaataaaaagaagctatggtatataaaatggttgaggtgctgttaccttagtgatcaggtgaagtaggaggagaaaaaatcgtccatactctcctttgtgtaacttcaaggaacgggttgtgctgaacttggattagctggatgttcgaccctttgctcgggttgttgattgagtggctcctcaagtggtgcggtagagtggcttgctccagcatctgatttccttgttcttcttcgctttttcaacttgctcctcttttcattttctctaggttcgaaggatgattgtcttggtggtgaaggtgcagcatggtgttccctctgctcatatgaagactgtcttggtggtgaaggcggatcgaaatgcataggttcgtgacgagtggatccgcttctcccaaaaggcatgttctgtggcattgccgtagtttaagaagaacagttgatgttgagttggaggttgttaaacttcttgttgagtgccgcgagagccttgtcgtggaacttacaccagctttggaggaaaccaaggcgcttgtgaatttactttgagtctttactttgcctcggtgcggagtactcctcaaagtaaaactgttgtgttatgtaagacacgtccataggttctgcctcattatctgaataatggattggggtctcatcatcattcactccttctatcggcacaacttcatcacctgaagtatagaggttctccactggtgggcaaaactcaatgtttccaccatctctgatcgaagtggaagcgggatttgggaggagtaaaatagattgtcatgctgtggggtgatcgaacctatatttatataggtcattcttctgctacgaccaaaaactcttggaattgataaggtgttgcatatcaatccatctcgggggaatcggctttgaatgtagaggtacattgcatgctctcagaattggtgtcacaactcctctcacaaccattcttcatggtttcttaagtccctttagcccatcctctgtaacccagcaggtgctcgattaggtagaatgagaccaaagcgtttgtctgatctccagctagaactgtaccatctgatgttaaaccaagcaacttttgcagcgctgtctccatcaactctagttctccattaacgaaggttccattcctctctcttgcaaatagcgcactagccaaggacctatgaaagtttctaaccacccgactccttatttcgttgctcttggccctagaggatgaaaatccatgcttagacccaagtgtggcccagaatgactgaagctctctcttgtcaaaacgatgactcgtgtgttttgtacttggaaatccatacatcagctcaagatgctcgattggaagccgatactctacgtcatacacacagaactccaagtatcccaaacttccgtctggcctgatttcatcgtcctcttactctccatataagaacaattccacggataaaagaaacttgatggtctcttcctcatacccctccattggccgaaacatgtgaatattcaagctgcactgcttaaacatatagtctacatcatcatagatgccgagtctctccacggtctcgggatgacggtatcgagttcctaaaaactcattgcgtttcagcagcttgtagtactcgtttcgagttgcacacttctcagattgatcatctatttgatcatcaccacctcctttgtttgatcatctttctcagattcttcatctaccagttccaacctcctccccatgggcttcattcctcgagtgatgtctgccttgttcctcgaaaattcccttgcagaggacttactcgaccttcgggatcgagtatttctagcgggagagctgaaagtttcttcttcttgcatcacttcctcctcttggcttgattcactgtggtcaatctcgaaacttgcttgttcgctcctgctcgaccccatgggtgatggttttgtaagtcctcgagctgctgcatgtgaagaaggtgttgggtacctcttcgatggggagagagctttgttccaaatccttgacaaaagcgagcgcatgtttgtcattgagaacaaaagtgggagaaacttaaaaccaaaattcagtaggttaggagattagacaatggaggaaacaaatgaatcgcgaaaagtttttgataagaaagggaagtgaaggaggtaaagagtgagaattataaggatttgagaatgctttggtatgggaggtggagagatgaggttgttgagttcgggaattgcaatggggggaccaaagtgattattgggggggggggggggacaagaagacaaagggacaacagcgtttcaatggaggcgggtcacaaggcatcggtgtctacgaagagggtgtctttggtttcttcacttgatcagacggtgagaaatgcttcatctttaagcactcgatcaaacggaccaaaatgaatcgcaagaaatcactcgatcaaacggtgatgatgcttctctcatttgatcattcaaatcaacggctcaaaacaatcctcctcattctactcgatcaacggttgagatctttcttgacttggtttgaatttactcgaccgttgacttcataatgatcaatgaaataaacctgaaacacttaaacaaaaacatcaaaaataacaaggaaaatagatagttatatacatggatagacatgggatttcctcccaagcgagcttgttttaagtcactaagcttgactctttcagagcttagttagaaaagaggttgaagagaggaacagaaaagtcttcatcttcagtggttgaattttgagtgcttgaatcatactctacatcctctctaaagatatggtaggatgaatactcatttgatttttcttcaaagtaagcttctttctgatcagcagagtagtcttcttcttctgaaccaggctcctttaaccaatcctcaaattcaaaactggggtagcctttaaccatttcttgaagttccaagattgtatggttcagtccttccatcttgtaagttagctccccaatggtatcctcttgagctttgtattctatcctgagttccagaagttcttcagcaacagaatcatgaatcaaatgttcttcttcagcataggggttggtgggttgtttaggcacccctggagaataagttggaatagggatttcctcctcactcaacaacttgctctgtaggcttctttcctctaagtgaactcctttctggtcttttcgtgcaaaccattctgttgtgaaatcttcgtcctccttgatagtagagtccttttaagctccttctgcacctgaaaacacaccaaaacatgcaatgtgtatgcaagatgatcctaaatgccgaagtatgcaaaataagttaaaatggtgcaaaatgatatgatacaatgagcaaatgcaaagcttaatgatgataaatgcacacctaaaatgagtaaaatacagtgttatcatttttaaatacaagatcttagtttttaaatacaagatctttgcaagaaacaagcgagaccaaccagatgcaactaatttgctaccgctattactcctcgcaaattgcgactgttttgcaagggatttagttcgttgcaaaatttgcaagggacttactaccgatattaatttgttagacgctatttgcgagaaactgctattcctcgcaaatctctcggtaatcatgatttgcgagggattacctacgaaatgttccgtcgcaaattagctgttttcttgtagtatatatccctaatcactaaacatgcactaagatcaggtttgatatgttcacctaggtattaaaaccagagctatctgtgtttaaatactcaagcccatcattgatagttcagataatatattccctctcgaatgctacctattacatatgatcaagttctagttagctactctagaactagcattaagaataattaagatgaagaactctaaagataatcctaatatgttatcaatctactaaatcatctaaattcgtaatgagaaaccccaaacccaacaaagagattactcaaacatggagattgaagcaaagaacatgatagaataagaaatcttagaagaacttaaaaagagaatagagtttcgaatgatcttctataaagggatttttacagtgttttgctcccaagaagaaaatagaaaaggaaattagcctctcaagcttttaaagaaaaattataaaagttaggtttaaacattgaccttaaaaatctaaatattttttttttgagaaaaataaaaataaaagttcctaaaaacgtgtagggaaaatagggagaaattctgaggcgaatctgcaaatcttcaaaatttcatagagacgcgaaacaattgttgttagatattggtgtcgattgtcgtcatgggtggtgtcgatcgacacctacgctaattttgatctgtagatggcttttgcagcataagttctcagtttttctcgagaatgctccataatttccaaatacattcgaaacctgtaaaaatctgaaaaatactaggaaagactagaaataacaaaaagactctaataactataccaagatcatacctaaaatcagaaaaatttgaggtatataaaaagggatctggaatatgttgaataactaggatgggtacgtgaaacttaatgctaaacctagctttaaaggattcagttcgcctcttgaggtaagtgtttttatatttggtatgagtataaaaaggaaagaagattttatgatattaaatgtatgtttttttttgtaatttgtagattctcgcctatgagtcttttccacttcttggattgaaatttagagtatttgtacgagcagagaaggactgtccaaggatgtgcatgcacaagtttaaaggaactggcttgaaaggtttttcgtttcaagaaatatgtaaagagcttgggaatagtacgataagtttctgtgaatctgcttagtaatttgaggatatgtaatgagattgtgccgaagttaaatgtatatttttcacaagatattgatagcatctcggaaccaaactctgatgagaagtctctgcttacgcggatcgtagaagatcatgatgatgatggcctaggttatattgatataattgttgacagttggacagaccgtctactagtacggaagaagaatattttttggaatgatttgtaccagatggacttagattctcgacgtgtcattgaatctgaagtccgtagaaatgaattccctggaaaagaagtctctcggaatgaattccctacatatgtaggccctgatctagctacaattcttgcgtctattaagtcactcactgaggcaatgaccagaggctttgagaacatgacacagaagcttgctgacatgtatgtaagagtgtaagctcttgaattgtatttggcagagcaaagagagcaggaaaagcaatatgggacacagacatattattatcagaatgaggttggttatgggacagttaaggaagcagtgcaaccacatgatttagttgtttatagtgaagtttcatgtctccacaacctagtgcccaaacaaatttccccaattgcgaacaagaatggaaaaatgaagaaaaacctggagtgtggacctgtaatagcaactggttagaagcaaacaaaggaagcatcccaacatattaagccacctattatggaactaaaagtgaagcgaaagagaaataagtaaggttgagagtgttgtagattgtgtggatgtttattctagataattctgggcacatgttgtttttatgttattttggacacatgtatttttaggtttgattgggaacaaaagtaagttaattatgtttacttagtgattgcttcaagtgttggactgggttcaacaagtatgtagagtacaactgagtgggttccactagtatttaaagtacaaattagttggttcaactggtattgagagtgcaactgatattgagagcacaccatacataacaaagagtacataaattaaacaattaaacatagcatacataatatcttaacacaacaaagaggtatccctaactacctcctacgtagatggtccttcagcctaccattctcggtttctttttgagctattcgatcctcaagatcaatgatttgagcacgcagttctcgcattgactgccgaattgattccaagataggactttggtaaacatgttgaattgcttatatctcgctttcaattttgctctgtaattgttttacctcctcatcaaccgcttgatcccaccacttattcaagtgttccccatcaagctagatttatattttacaataactttaattaacaccaggttcaacaagttgaaaaacataaccttagttgaactagttgattactaactgaaaaatcaagacataccccagtcacattcattgaaaatttgtatcgttttcttccttgataagtgccacttctacgcaatgtcagtgtcacaattcttccacaataacaccttctaggaacaccccaattaccgcccgctctaacccaactgaaatccacatttgcttttgagtcttagctttgtgtatacttgtttggcatgaatacaaacacagatcttacttcacagataacataaacaaaactaagatcttgtatttaaaaattaaaccattagaaccctaaatcgagagtcggctattacaaaacacgttgatgcataccaagtttagccgaatcgagactcatagaaacaaattgcaggtaatttaagaaagaaatctatgcctcgctgccgatctatatatcttgctcgaagaggaatatgaagagtgaagatgaaactataaaagaaaggccaaataaatagtgtgaaaccctagaatttttaaacatttttaaatttttcctatatcaatttgggacccacttaaatgtattttgttgcatcgcatccataaaatgtgggacctaaataatattcatttgtatttattaaatggaattatacacatagttgaccacttgtagtatcatacacatagttggacttttccatgttgtccttattttcagttagactagtatgtttataacttattaaaagttgaacacatgaattctctttactattttgtattttcaagattttcataaaatcatattcgttaaaatattatttcacttattattcttcatattagctcatctcatactatttattctagagagttgaagcggttgtttgagtttaaatatcattatccaaatttttaatttaatttaaatagtaataatataatatgcgtgaatataataaaccagttggtaaatattctataatcatacaaggtcaaatataatgaattttatgtccttcgtagatgatctagttgaactagttgcacgtcatatgccacattcaacattgcagtttaatggcaatttaatcgggttatctgaagatgtgttcaagcagatttaccgttttaactagttgaacttagcccgggccaaaaaattgtgttgtgtactaatgagacatgtattggactataattaagttttggcccaaaattttgcaactcttacttgacaatgcaagtggaatattgataataggttttttagtcaattatcctaaaacaccaatcatgtcgttgtagtattttaggttgtcaatccaaatggatgtgatgctaacaatcaagatgtgatcagaagtcactaagtcaagccaagcaataacaaattttggtgtgttctagcagtcctaaatgaacatgcataaaacagaaaatcaagcagaaacaataaaacactcgaccaacacaactcgtagcagagcactgggtgtggtcgagtgacatgtcgagtaacagacagaaaatgtaacaggatactcgactacatagtctgttaccagacaactgggtggtcgagtatcaggtcgagtaacagtaaagaattgcagaaactaagcaacagatgacaagatgcagtaaacagcagtagagtaaccaataaaatcaatcggataaagaattttcgaggatggggtaattgagtagtttcgtttcctcagtttacaggtgattgacatgctcaataaattatccctagacaacaagttcattaaccaaatctaagtgccaccgcaacagagaccctcaagttaacctagtcccagactcaatcaccattgacgagagctaacataacaggcattacgaatcaacaagttaaagccaaaacgctccctgcaaccaataccttggtacagggccacgaatctctggaattagtggttcagacatttcatcgaacaccttttgggcgcggaaatgtctgggctcaaattccagttgatcataaagcaataggcattaagaacaactaatccagaagggatctatcaatcaatactcaaccacctagcatactgagaattctacactactctaacccatcctcagaaacctattcactactcagacatcatagcagaaagcataaacgttgaatggaatgaagacatgataacaacagtgtaatagcagaatgataacaggatgaacaacagtaaacgaaatcaagaacaaatactgaatactgaatagataaagagaaatccggattataaaaggtctagaacacagtgtctgcggaataaaactagataaaaacttgttctcgaaaatgttaaaacatgctacttatagcaaaatattctgaaaccctaatactcaaaacgacgcagtattgggacggattaagaactgtactcgaccccggtggtcgagtgagaggtcgagtgaatagctggagtcttcttttcttccttgtgctcgagtgtctggttgagtgcggaaaggagaagactctgaagcccgccatcgagtaggtagtcgagtggtggtgatggagatactcgacttcttggtagagtgacttgatcgagtggtgatctggtaatggaggtgaagatactcgacctcggggtcgagtggagtgatcgagtgatggtcaggtggtggaggtgaagacactcgaccagggggtcgagtgatatgatgaaatcgtgaaattccctacttgacatgggggtcgagtggtctcttgaggtcttgaagcttctactctacctcatggtcgagtggtttgacatgatcaggtccgcttcttccagttagctcgtcaacagctccaaatcacctgaaatcaacacaaatatgcagcatgcatgcaatcctatcctaaacatgcaaagtgatgacaaatgatgaaaaatggtataaaacagtgatgatatggtgctaaagtgatgacaaatggatgctcaaaacatgcaaaatacacacttatcaaatatttttttaattttcacacctaacaattcgagacccattaaaatgtattttgttgcgtagcatccacaaaatgtgggatccaattaatattcatttgtatttacgagatggaattatacacacacttgtccacttatactatcaaacacatagtaggacttttcaatgttttctttatatcagttggcctaatatgttaataacttattagacgttgaaaaaatgatttctcttcattgttttatattttcaaggttttcatagaatattattcgttaaaatattgttttcacttattattctttatattggctcatctcatactatcgatttcttatagtagaaggggttgtttatgtgaaaacatgttaatccgatttattttcattaaattaaaatagtaatagtataatatggattaatataagggaactttactcaaatagaaaagaaattaggtgtattcaccagaaccataaggaacttttttttattactgtcatatttcggccttttttgtatatccattgtgcccctactaaacgttacaggaaaaaatgtaaatacaaggaatgccactgccacgtcagaaatagctgatgtggattaatgaactcatccataaggcgatacattggcagatacggctgagttacggtatgttgcggctgacttacgacaaaaatatatgagttatgacttatgagaaaacggtagaattatgagtataactcagcctacgttatgactgatttatataagggatctgatttataaaatttgtttgagttatgaaataacctagcctacattacgactaagttaatgaaatttctctaatttatgagaatttcgagcataaccctgacaacgttaggctaagttatttcctcgacacgactgagttatctttttccggctggctgggttatcaaagacggcttagttatgggatgtcgttacggctggattaaccaataactcacgcttgttacggctgacttagttggaaaagattaattactaaaatagcatacagttacgaccgagttaataaacgatatggctgagttattgattgtcggttgagttacgattctatacggctgtattaattaacttggcgtttttttcgtttttcaattattgtaatagtattcatgttgcgactgacttatagatttgtttgatggcttatttatttaggcaaatttacatctttgtttggtggcttacttgccacttcatcaattaaaaaatgacgtcggatccaacattcaatgtcatcatcatcaaaggacaaaaaagagggccaaatttttcaactcgtcttcttcacctgagtttttcacatcaccgaaactttttaattcctcatcgtctttctcattattcttcaatttctttcatccatctccagatatggttgattcggttccggtaattgttgtttccggtaattgggtgtagaaacacaaatacatatttaacaccgatgaaagagggtgtagagttgtggtagatgcggaaacaacgcacgacaaacttgtgaagttggtgttcgatgataaagttagacgaaatgttgcgtctcttactgttttgcgcaaatttacatgtaacggccgagttatatgtttaaggaaagacgaaaggttcggtaaatttacatgtcacggctgagttatatgttccaggaaagacgaaaggtttggtaaaattacattgcggctgacttatatgcttaaggaaagaagaaaggttcggtcaatttacatgtcatggctgagctatatgttccagggaagacgaaaggtttggtaaaattacattacggctgagttatatgcttaagggaaaacaaactgtttggtatatttacatgtcacagctgagttatatgctcaagtaaagacaaaagataggtgtaaattatatgttatggctgagttatatgtttcagtgaagagaacgttcggtaaattacatgtcacatctgagttatcattcagggaagacgaaaggttgtctaaattatatgtttcggctgagttacatcacgttacggctgagttacattactttacggctgatttataatacagatcggaaaacaacatatttttgggaaagacaatatgatatttattggtcaaataacaacagtcaaattaaaaacgtaaaaatatgtttgagggatacataggaggaagactaaaccgtatgaatcaaaacatagatagaagtacaaatgtctccaaatagatcgattgagaggaagactaaactaaagacatgtaaaataaaagtaaaagagtagctattcttgatttcaactcaaacctgtaacgaatcgttttaaattccatagatctgtttgatttgggttttgatttttgatgacttttgatttgacgaagcttttgatttgggaccctatggcaaatgttgtggctgtgagatctaggaagatccagcgcaatccagcaatttgaagatctatgttcatgttgtacccaagttagttaaagattattagttctaaaagttttttggatttggagacaaaaaagagaagaggggaaataaagtgagtttgaggagtgtgagattggtgatgtgtgttaatgacatggataatcaaaattttatttattatttttaactaaaaatgaattaaaaattattaattaaaaaaactaatcaaggattttaaattgtaattacacaaatgctcaaaacatttgagtaattaaaaaaagatgtatgatattttaggaataaatatacttttctatgctatatgagtaattaattcttaatataataaataaatctttgtttgtaaatattctattatcatgaaacgacaaatataatgaagcttatttcgagaaaagatgaactagttgaattagttgcacttcatatgctagattcaacatttcggtttagttgcaatttaatcagattatctaaagttgtgttcaaaccgatttgccttttttgctagttgtaatcagccgggcaaaaaaactgtgttgtgtactaatgggccagatattgggctataattaaggtcatgcccataattgtgcaactctcacttcacaatgcaagtggaagatttattaatttttgggaaacatccagaaaaaacctccatttatttataatatgcctgtttaatacatgcattatgtaactttgcccgtttaatacttaagttaatttttatgtcttttaaaaaccttcatatttttaaattttggcaaaatcagacatccgagttaacggccgttagcactgctaaccacagttaaaatttaaccctatgatgtttactatgtatatacaattgtttttctaattaatatgagcatattatcttagtttggtggttatgtgagagattaccatcctcatcaacccgagatcgaatctcatatccaacaaatattttggattttgtattgtattttttactttcaaaaattccttttttcacttacaaatcaaaatcatttattttgcttactaattgaatttttagaattcaacatatgcaatgaaaatgttctcgaaagctcaggcggatgtttgatgggatgattgagccagaaacttcggcggatgaggctgcattgtcatcgttggtttccggtggaattggattaggggttccatgattgggtgattttggttgatttgggggatgagtatcagatgatggttgagaaggtaaatgttcgcccacgtgaaattgaagatttcaaattgatagaattagggttttggtagcttcaaagacgaagagaaagagaatcgaaaacctaatcaaatatgggccgccgtcagattaaaaaaaacgtccaaaaaacggttcggatgtgggaatcgaactcatgttcacgaggaataaactctcacataaccacctaacttagacaatatattcgtaacacttagaaaaacaattgtatataaatagtaaacatcatagggttaagttttaactgcggttagcgatttcgttaccgctgttaacggccgttaactgggatgtctcattttgccaaaaattttaaaaataaaggtttttaaaagacaaaaaaattaacttaagtattaaacgggcaaattaaataatataagtattaaacgggcaaattaaaaataaatcaatattttgtcgggattttttcctttaattttgtcaccttacaatttgagacacacttaaatgtattttgttgcatcacatccacaaaatgtgggatccaattaatattcatttgtatttacgagatggaattatatacacagttgtccacttgtagtataaaacacatagtaggacttttcaaatgttttctttattttcagttggattaatatgttaataacatattagaagttgaacccatgatttctctttattattttatattttcaaggtttttatagaatcatattcgttaaaaaattttttcacttattcttcttcatattaactcatctcatactctctattccttaatagtataaggggttgtttatgtgaaaagatctttatccaacttttttttattgaattcaagtagtaatagtataatatgagtgactataatatataattctttgtttgtaaaaattctataatcataaaacggtaaatataatgaagtttattttgcaaaaagatgaactagttgcacgtcatatgcttgattcaacattcgagtttagtagtaattactcgggttatctgatgatgtctgttcaaaccgatttaccgttttctttatttgttcacagccgggtcaaaaaactgtgttgtgtactgataaatgttcaaattaacccaacactactctctcaaataagagatcagttgtaatacttagggatcgattttcaaaaagttttcttgttcacacaatggttatcttgtctaggttaagctaaacaataagtatggtttaagagaataaaacattaggtttagggaagttcttaggaaacagatgattagtagatctaataatgactaggatgttaacaaatcgttctcgaactcaaatcactaatacagagtaaccgacgttagcccgcattactcaatattatcaagtttgataagttcacctaagtagatagaccgatcttagtacacatctaaatactcgacacatctttgatagttctcgtaataaacacctttgtaagaagagttagcataggtccttgtgaaactattgtaaggttaagtcttctcaaaagcaagctttggagtgatacctgaagattttggttgcctccaaaacgattaccactatagttttcctatggcggaccaaacttcttgtatccctaaccatcaatgtagaacacgccttcctctgagtctgccgtaggctcgatagtctctacttctacaacaaagtgaacttgcttcttccctgtaagtaggctatgctctgaatcatgcttagcatttacctcaaccatctggtttcttgaaacaactactgctatcttcttcctctcgaagtctgcattctacatattgttgctacatgcaagattctctatcaaagttgtagcattatatagctcaaattgccttaagcttacttccacaaataagtgatcgtcgttagcacttaagggtcgaattccacaaaactctcagatcacacaatagactaaggttatcgaattaagctaaacaaaatataagaaaataaaaagaaagcaaaagcaagcaatagcagattatgagatggatgtaaactaagataattaaagcgttaggcttaggtattctcagaaaatagatgacagtagatctagaaatagctaggttgttatcgaactgttcttaaactgaaactctaaaatttgaataaccggtggcgtttcgtgaaattcactatgcctagagctaagatttctggtggcttgtcgtgaaaccttatacctaaacatgcatgctaaacgagtttgataagttcaccttagtagatagatcgattcttattacacacctataaatcaggctcatcaaatcgtaatcctggtaacagataccaatggcgggtatatctattatcgggaatcaagttctaggtgatcaatctaaaactagcattaggaacaaccaaagatgaagaatcctacagataacctagcaagggggcaatcaactaaatcatttataaccctaatgagaaaccctaaacctagcaagaagactactcaaacatgatcatagaagaataaatcatgtttgaataacaaatcaataatgaatataagtagagaatagagtaagaaagatcttctttaaagggagtctccatagtgttttgctcccaagtacaaaagagaaaaggagattagcctctccaagcttaggtctaaacaatgacttttaaaatgcgattttagtcttcgtatttcttctgcagcataagttctttgttttcctccgggatactccattatctccaaatgcatcccaaacttgtaaagacctgaaaaagactagaaaagactcaagaaataataaatagattctaaaacctaaatctaaaacataattaacaccactaaaaatagggatatatcgaatgcttttgcaggtccttgagtgaatgtagaaagcttgttgcgcaacttttcagacttagcatcgttataggtccttgtgaaactactctacggataagtcttctgaaaagcagtctttggagtcacctaaagatttggttgcctccaaattagttaccactgtagtttcctagtggcggactaaaattcttatatccctgacaatcaatatagaacatgccttcctcttaatatgccttaggctcgatagtctctgcttctgcaacgaagtgaacttgcttcttccctgtaagtaggctatgctctgaatcaagcttagcatttacctcaacaatttggtttctcgaaatagctccttctatcttcttcctcttgaagtttggattctacgtattgttgctacatgcaagattctctatcaaagttatagcatctacaagatacgtggtgttgaagttaccattgttcaatgagtctagagccatctgatatctccaatcgactcttctgaataaggtactgatatatccctattttcactgattttatctatgttttatgtataggattttaagtctttatgttatttctcgagtctttttagtgtattttcaggtattctatgcaatgggacaacaatagagatggggagacattttggagcaaaagataaggtcaattttcagttccagattcagaggagtgtcgatcgacacactacttgggccgatcgacaccagttttggcccatcaaagtccatgacaccttcaagtttaaagaagagaaactttgccccagaagacttccctatttgcattattagtccctaaatgttttatagggtttttatattgtttttagacctaaggttctctttatcaagttcttttcaaatccctattttgagagacataagctattcatccattgttcgtgagagattcattaagttttcaatacaatgaagagatcctttctttacttatctttattgctgtgtttatgctttttatctcaattatgttatttgtttcattcaatatgtttgagtagtttgcttgttaggaatagggtttctcattagggattcatatggtttagtagatcgcccccctgttaggttatctgtagaattcttcatctttgattattcttaatgctagatctagagtaattaactagatcttgaatccaaacaatagatatgtccaccatatctttagttggacctattatttgatgagcctggtttataggtgtgtaataagaatcggcctatctaataaggtgaacaattgaactcgtttagaatgcatgtttaggttaaagatctctcggcttctccggttattcttagctataaacatagagagtttcgcggaacaccaccggttcttccataattagaatttgagtttaagaatggttcaataacaacctcactttcattagatctactaaccaatagtttcctaagaataccatgttcctagctctttaattaatcgtttacaaccaatcaatctgctgttttcttacgttgttttcttattttttcaatcatatcctgctagcttaatcttgacattgaattcattgagtgaacaaaagaactttgtggaaatcaatccttaaatactgcaattgatctcttatttgagaaagtagctcttagggtaatttgaaacgtatcatatttagttgatatatccatattttcattgattttatctatgttttaggtataggattttgagtctttatgttatttctcgagtctttttagtgtcttttcaggtattctatgcagtgggacaacaatggagatgaggagacattttggagcaaaagttaaggaaaaggaagctaaggacgattttcagttccacattcagaggagtgtcgatcgacacactcttgttctcgatcgacctagtttcagcccagcaaagtccatgacgctttcatgtttacagaaaaggaaatttgccccagaagacttccctatttgcattattagtccatggacgttttataagttttttatattgtttttagacctaagttctcttttatcaagttttttgcaaaaccctattttgagagacataagccattcatccatttttcttcagagattcattgagttttcaatacagtgaagagatcctttctttcccttatcttatttgctgtgtttatgctttctatatcaaatatattgtttgcttcaatcaatatgtctaagtagtttgcttgttaggaatagggtttctcattagagattcatatggtttagtagattgccacctttgctaggttatctgtagaattcttcatctttgattatgcttaatgctagatctagagtaattaactagatcttgaatctagacaatagatatgcccccataggtatctgtagttgaatctattatttgatgagcctggtttataggtgtgtaataagaatcggcctatatattaaggtgaacaatcgaactcgtttagaatgcatgtttaggttaataatctctcggcttctccggttaataatcgcagaagggtttggtgtcgaatgacaccaacacggtgtcgagcgacaccaacacggtgttgatcgacaccttcgggagtagaacgcagatgcaatcagtgtaggccaacatcctttccatagcatcctttccatggcttctctcatgaactgccaatggaccaaagcaaagtagccaggcctactaaagcaaagtagccaagcttaagctcataggcgttcctttggtatggtgggggtacaatcgctgaacgattagcatagaacaggtcaggcgagttcgattgttcaccttagtagataggccaattcttattacacacatataaaccaggctcatcaaataatagatccaactacagatacctatggtgggcatatctattgtctggatttaagatctagttaattactctagatctagcattcagaataatcaaggatgaagaaatctacagataacataaaaggggggcgatctactaacctatatgaatccctaatgagaaaccctattcctatcaagcagactactcagacatattgattaaagcaaacaacatatttgatatagaaagcataaacacagcaaataagataagggaaagaagagatctcttcattgtattgaaaacttgatgaatctctgaacaacaatggatgaatggcttatgtctcttaaaatagggttttgcaaaatgcttgataaaagagaactgaggtctaaaaacaatataaaacccctataaaacgtccagagactaataatgcaaataggaaactctttttggggcaaatttcctcttttgtaaacttgaaagcgtgatggactttgctgggccgaaactagtgtcgatcgtcacaaggagtgtgttgatcgactctcctctgaatctagaactgaaaatcatttttagcttccttttccttagcttttgctctaaaatgtctcctcatctccattgttgtcccactgcatagaatacctgaaaagacactaatagagaaataacataaagactcaaaatcctatacctaaacccatgttatttttctagtttcattgagactccctaaacccaacaagatgattactcagacatgataacagaaacacaaatcataatctgaatagtttgaattgatgaattagaaatagagtaaaaggagttcatgatcctctctgcagggattgggttcttctctccaaaagtgtatcttaatatccaaacaaaacttaggtctcacaatgaccaaataattagatatattagtgactaaaaacgtgcatggactactttgcaaataaggaacacttcggggcttctcaaagacttggcagaaaacagaaattccctcagccgaaataagggtgtcgatcgacatagtctcagattattatatgtgagtttaagataggaagtttgtgaaatcaaatcaggtacctaggagttgcaccttgttgaaacagtgatgcgatagtctctgcttctacaacaaagtgaacttgcttcttccctataagtaggctatgttctggatcaagcttagcatttacctcaaccatctggtttcttggaacaactcctgctatcttcttcatcttgaagtctgcattctacgtactattgttacatgcaagattctctgtcaaagtggtagcatctgcatgatacgtggtgttgaagttaccattgctcaatgagtctagaaccatctgatatctccaatcgcctactcttcagaaggtacctaggagttgcaccttgttgaaaccatgatgcgggaattctctttggtactccttgaagcgaaactaggtagccatgaatgcctttgtatgtccttgagtggatgtagaaagcttgttgcgtagctctttagacttgtatcatcataggtccttgtgaaactactctacggataagtcttatgaaaagtaggctttggagtgaaaggtgaagattttggttaccataaatcgaataccactatatttttcccccatggcgaaccaacttcttttatctctgaccatcaatgtagaacacgccttcgtcgatagtctctgcttctaatcaagcttagcatttacctcaactatctgatttcttgaaacagctcatgctgtcttcttcctctcgaagtctgcattctatgtactatttttacatgcaagattctctatcgaagctatagcatctgcaggatacgtggtgtggaagttacaattgctcgatgagtctaaagccatatgatatctttaatggactcctttgaagaaagtacctaggagttgcacctcgctgaaaccgtgatgcagccagccttgagtgcttttgcaggtccttgagtgaatgtggaaagcttgttgcacaggtcttcagacttagcatcatcatagaagtttttcaaaaacgcaaccttgatggttctccaagtggttagcgtaccggctttcagctgcttaagccaagaagtggattccccaacaagtgagtatgggaaaagcttgcatagtaggtagtcttcagagactccattacctttgatggtcagaactagatcttcaaagcgcttgatatggtcaatatacttttcatgagataagccatggaaagggtgcttgccaactaaagcgaagtagcctttcttgatctaatagtcgttcttaaagggggcggtacaatcgctgattgattaacatataacaaatttggcgtgtttaaatccccaagagttcgacgaggttttgtagctggctaattacttgcgtctggaattcgtgggtgtcgatagacacctagctggtgtcgttcgatacccagctggtttcactcgacaccaagccctgcttcgttgcgagcagcaagctgcgcgttgagtcgcgcctattcatctatctgattctcagctttgatgattcaatgatcatccaatctttgtccagtctcatttaggcatgcccatcgtcatctcttaaaactccttatccattagctctaacttatctgataaccattggtactaatctctgagtttttcggttggtgcgttcttgtgtacgcaaatcaagtattgacagattgacgaggtccttatcttttgtgattcttgtgagcctatacatacacatgaaacacagaaaagaaaaaaaaaaacaagaaaggagtaggcaacaaaaggaaaataaaaatttagacaaaatctcgaaagcaaaacctaatggtcattcccaagaactttggcaacgacgccaaatttgataagtgttcaaattaaccctagactactctttctctaataaaaggtcaattctaatacttagggacttatttccacaaagttcttttgtgcacacaataggttatagtgtcgagattaagctaaacaataagtaagaaaataaaataaaacaaaagctagcaatagcagattatgaggatgtaaattcaagatattaaaacgttaggtttagggaagttctcagaaaatagatgattagtaaatctaataatgactaggtgataacactgtattttactcattttagacaagtatttatcatcatttagcttagtgatcactcattgtttcatatcattttgcatcacatttagcttattttgcacacttaggcatttaggatcatcttgcatacatattgcatgttttggtgtgttttcaggtgcagaataagcttaaaaggattctactcgaccctctactctatccaactaggagggaagcagcagagcaatctactcgaccagtttactcgatctagacagctacagaggaggcaacaattcacttgatccctttactagatccacgcagccatagaggaagcagcagatcggtctactcgcccctcttactcgatcctctactcaaccccttaactcgatcaagggcgaccaactctacaagatttgttgatctattaaagcgtcttcagatcctcctcattccccactcaaccagacatctgagcatacggataggagaggaagaagcatctactcggagcatggaggcaaaggcgcagactttgtagcaccctgtttactcgatccccaagatcgaggaatcgtccaaaccgcctcaagtctcttgtcttctagtgaatctagggttttcaacatttagtataaatagatcactttggggtttgtccaaaggatttagcttaaatcctttagtttttctttgcgttcttgaatctttaaaacttatttaatcttaatctatttcgtttttgcatttagttctttgagtaaagttgtttagcttgtttagatctacattttagtatgctttcagtaatttctgggtttgtgttcttagttatgttgcttgagtagtgattagggttcttgaggatggattagataagggtaatctctaggttagtcaggtggttaagattaggttagatcccttctggattcgttggcccatatgcggttttcgttggctaatgtggaaattcgaccataggtatccagcgtccaaaagactatcaatggttgcatgatctacgaattccagatatttgtagactatagaccaagagattagctagactacttattggctttggtagattgttgcttaaaccctgctctgctatgtttcatcaacgagagttgagattaggaagtggtagagttatgggggtctctgtcacgagagtggattgacccggtttttgaatctatcgtctagggtatctgcctttcacctgctagccacctgatgaaacctagagttgcccttatcaatgaatccatccttaggacttctattcttcttagatttatttgtattcaccccctgattgcacttttatttacctgttatttgtgtcacctgttgattgcattttagttcttaatttgtcacctgttggttttactcgacccaatgatcgagtagggctcttaaagttctcatttttgttgtttgaatcctgacctaggattgtttctagaaaccaaccatctctataatctggcttgacttagttgcttttgtacacatcttgattgctagcaataacagtggactggactgacaccccctatacgtgcatcgacatgttagtgtttgtaggggagttgaactgaacctcacattcagcatatataagtaggcctaaaaaaaaactacttatcaatttggcgccgttgccaattcattgttgcattgttacattcaagatatcagaaaaagttaagatcaagttcttttacatttatcaagttactaactcatcatttcgtctgcttgtttttgtggtataggtactaatctttgtgcatgcaaactcgatccaaaggttctgcacacctactaccattcagagacagaattgatagaatagctcatgagttacaagaaaccaaagcaaaggcagcctgtgatcagcaaagactagctgctatggaacaacagaacagactagttgatgttcaagacccaccaaatattgatcaaccaagaaacatttgtgttggtgatgccccaaggaatcatcaccaaagacaagggatagtgcccccaccagttcagaacaacaactttgtgatgaagagtggtctcatctcaatgatccaaggaaacaagtttcatggcttacctatggaagaccccctggaccatcttgacagctttgataggctctgtggccttatcaagatcaatggtgtcactgaagatatgtttaagcttagactatttcccttctctttgggacacaaggcacaccactgggagaagactctgcccccagactccgtcaactcatgggacgattgtaagaaagcttttcttgccaagttcttctctaaaagctacactactcagtgcccccatcacggtttcaagaaagcttcattaaacagaggagctttaccaaagatcagaatgctactcgacaccgcctctaatggaaacttcctggccaaggaagtagcagaaggatgagagctggtcgaaaatctagcacaatatgatgggtgctacaatgaagactatgatcgcccagtgagaggaacaggaggaactgaggataaactgagcaaagatatcaaggctctgaatgaaaaactagacaagctgttgcaggctcagcagaagcagatacactacatcactgatgaagagcacttccaaatgcaagaaggtgggaatgatcaaactgaagagctgtgctacattcagaaccaaggatggttcaacaaggggtacaacaactataaacccaacccgaacctctcctacaaaagcactaatgtagctaacccccaagatcaagtgtatccaccacaacaaaatcagtctaagccatttgttcagtataaccaaggttatgtcccaaagcagcaattcaatggaggataccaacagcaaaatccatcaccagggttcactcaaaacccacaaaaagcaccagcagctcaagatcctgaaattaagcaacttattcaacagatcattcaaggacaagctactggagctatggcttttgacaagaagatagctgaattacacaacaagatcgattttttcttacaaagatctaaatgtcaagtccgaagctcagaattccaaagtcaagtatgtggagagtcaatttgcatcaacctctactccgaagcatcctcagcaacttccagggaaagcagttcagaatcataaggattatgctactccaaatgctatcactatccaccaagaagatgagtctccactaagtcaccagactcccaatactggggacagtatgtttcaagaagggggggattcaactcaaattgctgcacccgccacccagcaaatcatctggactgtagagcacacacatttgctgaatactcaccattttggaaaaaatctcaaaattgaaaaattcaagaaggatcagaatcaagagatgattagtagtgcctccacccaagaaacatacaagaagaaagtcatccaagaaaagcttgatgatcccggttcgttcactctatcatgctctctaggaccattgacattcaataggtgcctttgtgattttggagcatatgttagccttatgcctctctctacagctaaaaggctagggatcatggaatacaagttctgcaacttagctttactcttagctgatggttctgttgcacatcctcatgatctaatagaaaatcagcctgtcaagattggaaatgttgagatacctactgattgtggtaatggacatagatgaagaaggaaaggatcgcctgatcctaggcagaccattcttagcttcagctagagcagtcatagatgtcatgaatggaaaaattgatgtaaaccttgaaaaaggtatcaagatgagatttgacatcaacaaggcttcagggaaatcaacaacaggaggtcagagttttgggattcaggacatggatgttaatgaagaaacagaagctggaaccccaccaagagttaactatacttctaaactcagcaagctaaagagaacttttgaccacaagaagagagcaatagaagggttagctcagactgaagatcctaaaaaagataactggtatgagttgagaaaaaatgtaaatggcaaagcagagtcatagagggattatcttcaagggtgatgaagctgaaagatcaactatggatgtttgaaaaaagagaaaataagttttttatgagtattgatccagagaagatagaaactgcactagctatcaaggaggacgaagatttcacaacagaatggtttgcacaagaagatgagaaaggagttcacttagtggaaagaagcctagaggacaagttgttgagtgaggaggaaatccctattccgacttattctccaggagagcctaaacagcccaccaacccctctgatgaagaagaacacttgattcttgattctgttgctgaagaacttctggagctctagattggatataaagctcaggaggatacaattggaaagttaactcacaagatggaagagttaaaaagcaccattctggaactttaagaaatggttaaaggctactccagttttgaatttgaggattggtcaaaaggagcctggttcagaagaagaagactactctgctgatcagaaagaagtttattttgacttaatcatgagcaaattcgtcattcaccttagtttccttggtttttgctccaaaatgctaccttatctccattctcgtctcaatccttgaggcacctgaaaagactctaaaaagattaaaaataacaaaaagactctaaactttatacctaaattatagctaaaaatagtgaaaatagaggtatatcatgtactaatggctcagatttacaatggctataattagggtccaacctgaaatttttcaattgtgagtttacaatgcaagtggagatttagataacccaaaagtgtttttagttgcgactgtttatatattcaaaatatttcctgaaaccatagagaccttctgcattcacccaccagaaaaaagagcccatgtaccgcaaggttcaccttggtcgtcgcaaaggaccccatgtagaaactctaactatgaaaatgatttggaaaaggagcctaactcatcgctaccctcatcctcccaaagcaaatcttggatatcgtcttcgtcaaaatccggatcatcatctttgccaaatcctgatcatcatctttgtccaaatccggatcatattcttcggagaaatattgttcttccaccagtcgttcctctgaaaatttttctcctgtattggagattatgcctcctaaagaggcggagtctattcggcgtgtcaagccactagcagcatggcttacgcctctctcatctgaggtaagagttatgatcaaacctctcactcatgcaagcaatagatccttatcttagttctagggccaaccctagagtttgacccggaagagagagacttgattcccggagaagttatatacctagaggctttccttttagaatgtgatagcattgcattcgtaaagaatcaacaatggtttttttgggtgagtgagtatgaactgatttctagggtttaaaagtttctagggttgtaccactttataggattttaagtctggaagtcaaaacttacacaattgaaattgtatttagggttcgtctgagggattatactttgcgagaatctcaaagaacaacataagctattatataccactgatggtattgttgatattattgatataaagatgtgcttgatcgtacaagtgtttagactactagaagaaaagtgttttgccttcaaagtgatataaccctattttcactgcttttagctacgatttatgtatactttttagagtccttttgttatttctagagttaggtcattacatatttgggatgcatttggagattatggagcattctagagtaaaacagagaatttatgctgcagaagcaatctggagacgaaacttgacgtaggtgtcgatcgacaccatccctggtggcgagcgacaccaatacctgacgccaattcaaagacgaaacttattgaagttttgaagatttccaagttcgacccagaactttctcctattattaaagaaggcccaacacgtttttaagacctatatatctatttttaaggtcattgtttagacaaaaacacttattatctattctgtacttgggagcaaaaccctgtggagactccttttagagaagatctttctaaactctattctcttcttgttttctacattgatttctactttaatcatgttttgttctttgataatcatgtctgagtagttctcttgttgggtttagggattctcattagggatttggatgaattagtagatcgaaaaccctgctaggataatatatttagaattcttcatctttgatcgttcttaatgctagttctagagtaattaactaaaacttgattttaggataatagataaacccgctataggtatctattactagaactatcttacatgagcctagtatttagatacggactagcgtcgatttagatacttaggtgaccttatcaaacctgattataatgcttgcttagttctagggatttacaagagagttgggatcaatactattaagcatagtgagtaatacggcacatcaccggttactctataatagtgatttgagttctagaatggtttgataataatcataatttactgctagatctactattctgatatttcctgagaatttccctaaactcgacgtcttaatcatctgaatctacaaccaattttaattgctttcttgtcttttattttcacaatattttctgtttagcttaattcgaaactgttagtttattgtgtgatttgagaactttgtggaatttgatccctaagtgctatgacaacctctttatttgagagagtagttattagaatttagtctaaatttttcttttactttgttactcacacgttctttttcttatttttcttgtgacatgagctaataggaattcgaacgcaacaactggaaagctaggaatcagtggatatgttgacacaaattatcagacctgatgctgctggagtcttacaagacaaatatggtcaggcatacaacgatgagggtcataaaatagatgaacagggcaacttgataccagaaatcgccgagggtgtcgatcaacaccaactgagaatgaagatctctaccttctctcaagaaaccgttgaataatttaaagccacttggatcaaattcaaaggatataagagagattgcccgcatcttggttttagtgatgttcagctgttaggtatcttctttagaggagttgttttgcataattagatggctttggatgcagctagtaacgggaatttcatgtctagatatccaggggatgcaacaatgttgattgaaagcttatctttgagcattcgtacaaaaatcgctgacattgtaaggaaaacgcaagttcagtatgctgcacatgttgatagttcagagaatatgtatcatacatgagctataataaaaaatctacatctccaacaccggttcagcaaactacaagcttcattcagaattatgcatcttcaatccaagcccaccctccacccgagaccagacctgcgaattctccaaaacccgatttcagctgcagaaagggcaaccaaacccaagattccttttcccaagagtcctaggaagtcaaaacaggagctagacgatgctagatgcaaagcgatgatggataaattgattgtagagatgccacttattgatgctgtgaagtcttcttctatgatcagacattatgtgaagaggatgattactaaggatttgcttactgagtaagctttgatgatgatttctacacaggttagcaacattattaagaacaagatgccacaaaaacttccagatcaaggtagctttgttctcaattgtggtatccttaacaagtgttgtgagcaatgcttgtgcgatcttggttctagtttcagcttgatgccacgatcagttgcactacgacttggtttgacagatttagagcctacgcaaatcactcttgttcttgctgatcgatttgtccgtagacccaatggtatcttatgcgatgtccctgtacaagtcggtactagctacattcctacagattttgtggttttatcttatgagaaagaacctaagtatcctctaatcatgggaaggcctttcttagcctcaaccgattccattattgatgtcaggaaggatagaataggcttgaatgtaggtgatcttacaatgtagtttgacatgaataaggtggttaagaagcctaccatcgatgggcagactttctatgtggatattatctcgtctctagttaacgatatctcatggagatgacacatgctgatcctttgaaacatgctctaatcccttcaatagacaatgttcccgacgggtatggtaagctgttggatagaactgagcatgtaatgcaattgattactcaagaggagttaattggcccatctacaaaagcagcaacggttggcgagtggagcccagaaaaagctcctaatattgatctaaaaccacttcctacaaggctaaggtacgcatttcttggtgaaaattctacttccatgtcattgttaatccttctttaaacaacacagagctcacttaattgctaagcaagctgcgcaagtatcgcaaagctcttggcttttctcttgatgatattacaggtatctctcccgacttgtgtatgcataggattcaccgtaaggattaatctaaaccctcagttgagcatcagagaagactaaacccaaatatcaaggatgttgtaaagaaggagatcatgaaattgtttgaagcaggaatcatctatcctatttcaaatagtgattgggttagtccactccatgtggttcctaagaaaggaggtgttacagatgttaagaatgataagaatgagttgattcatacacggactgttactggccacaggatgtgtattgactacacgaagctgaatggctgcaacaaggaaggatcattttcctctaccattcattgatcaaatgctggaaacgttagctaatcataagtactattgctttcttgatgggtactcaggattctttcagataccaatccatccagatgatcaggagaagaccacgttcacgtgtctgtatggtatttttgcttatcatagaatgtcgtttggtctttgcaatgctcctgcaatatttcagagatatatgatgtcgatcttcacatacatgattgaggatttcacggaggtctttatggatgacttttctatttatgggttttcatttgaagcatgcttggagaacctttgcaaggttcttgctagatgtgaggagaagaatttgattcttaattgggagaagtgtcatttcaaggttcacgaaggtattgttcttggtcagaaagtttcagctgcaagtattgaggttgataaagacaagatagcggttattacaagtctacaagaacccgatagcgtgaaatatgtgaggagttttcttggacatgctggattttacaggtgattcgttaaggatttcagtaagattgccaggccactaacagctttgctttgtaaggatgtgaagtttgacttcaattctgattgccatgctgcttttaatcagattaagaaaggtttagtgagtgctccaatagttcaagctctggactagaatttaccgtttgagataatgtatgatgcaagtgattttgcagttggagctgttttgggacagaggaaggacaatagacttcatgttatccactatgcaagtagaacacttgatgatgcactgcggaattatgcgaaaacagagaaagaattttagctgtggtttttgccttagagaagtttcgctcttatctggttggttcaaaggtaattgtgcatacagatcattcagcactcaagtaccttatgaagaaaagggatgctaagccttactacgatgtattcttcttcttcaagagtttgacatcaaagtacgagataagaaagggattaagaatggagttgctgatcatttgtcaaggatcaaggttgaagatgacattcctatcaattattttctacctgaagaaagtatgtacttggttgagacaagtttgcaggaaaatcctagcagtgtcaattcacgcgttgatgagagctgcagagaatcagtgtcgctcgacaccacaccccctgtcgatcgataccatcgcgtttcatagacagatgcttttgcacttccttcacagcccacaactatttcagttccctgtgataggtactcctccatctcttctcctacttatccttcgattacttctttagaatattcgaagtgtgcttcaccggtaaacaagcatcgagtttctcgagagcttgtttcctcttctgattttgcaggtaaaggagtgagtatcgatagacaccaccaccagtgtcgatcgacaccagatgcagcacatagccgatctgtttacacaacaccttggaaggcgagattgcagcacaagttccatgttcttccatccaagtcttgaactacgccaagtcaaggtattgactataaacaagcgcttagttggaggcaatccacttgtatgatttttctatatttacgcttttcttttaatttctttttcgctaacttcggatttgaatgcgaccggagactgatatgtccccgtttttactgatttctaacacagtttcagaatgttttttagagtctttctagtcttttcgtatgttttgagtcatttcaggtacactcacacatttgggaactatggagcacaaaaaggaattttggaagcttttcagcaataaagatcttgaaggacgtttttcaaaagctggtgtcgatcgacactcttatcgctgccaagagaatattcgtttttcaccaagtctttgaaaagccctaaagtcttccttatttgcaaaataatccctgcacgtttttagggttatatacctaattgtttggtcattgttagacctaggccttgaatggctgcagtttttggcatagtttttggattttgattttgcaaaaaccaaatattatccaatcatgattctacaaaaagtagatttcctaaaaactaggaaaacctgattttaaaagattttgcctatttgttcatagaatctaaaaacccaattttatggggttttctaacaatttacgtcacatttttttcaagttcttaaatattattttaaatatgctattttcaccatttaccattcattaaatgtatacattggttttatttaccaaacctatgtttatatgcaactagattaggacttttaagttttttaaataaaattagatttagcaaaaagatacattaaaattttatagggagtagaaactttatataataaaatatacctatgtttttgttattctgcatatttaatttttattatcattatttttgtaattttaaaacacaaaataaaaactaaaaattaaatttgataacttaaaaagttttaaaataatagttatgtagaaaaaactaaaaactaaacaaattatcattcaagatatttcaaaaacaaaatctacatcaaaaaatcataaactacaaaaatcaaaaaccaaaaatcaaaattcaaaaaccagaaactaaaaaccaataataaactacaaaacattcagggccctagtttttgttcttgagcttttgttacactttagagaaaagaatccaatccctaaagtgaggattttgaactcttttgctattattcttaattcatcaatgaaaactattcagattatgatttgtgtttctattgtcatgtctgagtaatcaccttgttgggtctaggaagtctcaatagggatttagatggattagtagatcgaaaaccccttaggattactcttaaagttcttcatcttgattattcttaatgctagttttagattgatcacctagaacttgatattagataataggtattcccgccataggtatttgttatttgaaccatcatatatgatcctaggcatttaagaaaaaacaggtaggctcatagaagggctctggtttagatactaggtgaactaatcaagcttattaacaatgcatgctttagcataggatttctcggcttctccaggtatcttagttgtaagtatagagagtttcgcggaacgccaccggttactctagaattatattttgagtttgagaacggtgcgataacaatcctgatattagctagatctacaatttatctatctcccgagacaattccttagacctgacgctttaatcacttaactctacaactcatttacttgcttattagttttaaatattcaattacttcatttagcttagtaaacaacatcataagtctattgtgtgaacatcgagagctcagtggaattcgacccttaagtgctaacgacgatctcttatttgagggagtaagcttaaggcaatttgagctatatcagggacagtgacctttaagtcagggggaggcgtttactaactacgtttttctttttgattcttatttttactttttgagtcattttattgagtcaaaatttagttaggaattaggatctatattctttagattattgcctagttgattattgttgcaggttcaactcaatctgactattggcaaatccagatggcaaacgaacaaacttgagaatatcctagtttccaacacaattcattaaggctggagctaatctcactgatcttccttttacctcatcaaaacagttagtattcatagaacttgactccttacaaacctgatattgagaccaatgtgaaaaagaaaaatattcctctccccttattataaataaataaaaacaaagaacagagattgatatgattttcggtagtgtataggggtaagaatgtttctcatgaccctactattatacattattaggaatgatcaattacaaaggttagaacttgccgaggatgtcaatccagtatgcgagtactcctttgtttacttttcaaaaagaataagcataggggagagaaagaatgctaaaaagaataaagaatggtcaatttatcatggtatagtacatgaatgattctagaaggttcttgaatattagcttgcttgatgagacctagcgatgaaagactggtggatatagttaaggaactaaggtatggaatcaagaatgttgtgtaagcttgcggagatgtacatgttgtttaggatttgattacacttcctaggcatatggatttggttagaataaccacggcaatagactagagaatgttgggagttcctgcgttttcaaacctcttccacgagttcggcttttgtgttttgcttgagggcaagcaaaagctaagtctaggagagttgatatacctcaattttcactgtttttagctatgatttgggtatagattttagaatcttttgttatttgtagagtttttctagtcttttttaggtctttacatatgtgggatgcatttggagattatggagcattctggatcaaaacagacaacttaagctgcagaagcaatccagagacaaaaatctacgtatgtgtcgatcaacaccacccctggtgtcgagcgacaccaatatctgacggcaattcgattgcgcaacttattcaatttttgaagattttcaaattcggcccagaacgtttctaggaacttaagtatcaatttttaaggtcaatgtttagacctaacacttattatctattctttactagggagcaaaaccctgttgagactccctttagagaagatctttctaactctattctcttcttaattttattactgctttcttattcaaacatgttttgctcttttataatcatgtgtgagtagttctcttgttaggttttcgatctactaattcatctaaatccctgttaggataatatatttagaattcttcatctttgtttgttcttaatgctagttctagagtaattaactagaacttgattttaatataacatgtatacccgccataggtatctattactagaactaccttatatgagcctagtatttagatgcggactagcgtcgatttagatacttaggtaaacttatcaaactggattagaatgtttgcttacttctagggattatatgttgaacgatgtatttaattttaacgtggggtttgatgataactatcataagaatggtagttatcagaatgtggaagaactggtccgtaaccattcaaataaattctacgacttgttagaaggtgcaaataatcaattgtacaatggttgtcgtgaaaggcagttgcaattatccttagcggctcgggtcatgcaaaacaaggctgagtagaatatgagtgaaaagttggtggactgagtttgccaaatgtttaaagttttttttaccaaaaggaaacaaggctaccacttcacattaatagaccaaaaaggtgatgcgctattaggacttccatatcatacgattgatgtttgtaagaacaattgtatgctcttttggaaagaagacaaaaaagaagatcaatgtcgaatttgtggcgcacaaagatggaagcctaaagacaaccgtcgaagaaccaaagtacaatatattcgtatgtggtatctacctattggtgaccgattgaagagaatgtatcaaagccactagatagctgcgacaatgcgatggcatgctgagcaccaataaaaggagggagaaatgaatcatcctttatatgcggcaaagtggagatatttccaagagtttaaatccccggtttgctcaagaaccccgtaacatttatctagggttgtgtactgatgggttcaatccatttggcatgtctcgtaatcattcgttgtggcatgtgatcctgactctatataatttaccccctggtatgtgcatgaatacaaagtacttatttcttacaattctaaattatgggccaaatcatcctcgagctagtcttgatgtcttcctccaaccccttattgaggagctaaaagagtggtgtgataacactgtattttactcattttaggcatgtatttatcatcatttcgcttagtgatcactcattgtttcatatcattttgcatcacatttagcttattttgcacacttaggcatttaggatcatcttgcatacatattgtatgttttggggtgttttcaggtgcagaaggagcttacaaggattctactcggccctctactctatccaaccagtagggaagcagcagaggattctactcgaccagttaactcaatccaggcagccacagaggaggcagcaattcactcgacccacttactcgatcaaggcagcctcacaagaagcagcagatcgatctactcgcccctcctactcgatcctctactcgacccacttactcgaactagggcgacctactctacaagacttgttgatctattaaagcgtcttcggatcctcctcattccccactcaaccagacatctgagcatacagataggagaggaagatgcatctactcgaccaattgatcactcggagcatagacacaaaggcgcggattttgcagcaccctctttactcgatccccaagatcgagcactcgcccaaaccgcctcaagtctcttgtcttctagtgaatctagggttttcaacattttagtataaatagatcactttgggatttgtccgaaggatctagcttttatcctttagttttactttgtgttcttgaatcttcaaaacttaattactcttaatctatttcgtttttgcacttaattctttcagtaaagctgtttagcttgtttagatctacattttgatatgatttcagtaatttatgggtttgtgttcttagttatgttgcttgagtagtgattaggtttcttgaggatggattagattagggtaatctctaggttagttaggtggttaagattaggttagatcccttctggattcgttggcccctatgcggtttttgcaggctaatgtgaagattcgaccatagaagtccagcgtctaaaagacgttcaaatggatgtctgatcttacgaattccagagatttgtagacttgatcaagagattagctagtctgtttattggctttggtagattgttgtttaaaccgtgctctgctatgtttcatcaacgagagttgagattaggaagtggtagagttatgggggtctctgtcacgggagtggattgacccggtttttgaatctatcgtctagggtttctaccttttacctgttagccacctgatgaaccctagagttgcccttatcaatgaatccatccttaggacttctattcttcttagatttatttgtattcaccccctgattgcacttgtatttacctgttacttgtatcccctgttgattgcattttagttcttaaaattatcacatgttggttctacttgaccaaatgatcgagtggggctcttaagttctcatttttacctgtttgaatcataacctaggcatttacggctctgtatctgttcaattataaatgagttgtgttgtaataattcatgagacttaatcatgtcgttttatttttgcagaatcctagtattcaaacttcttctccgtttcatcttatctgtgtaagataacaatcctaccttgttatttatttgtgtttatgttgttttatgcgagtgaataaactatctatcttagtgtctgattattgaacttattatcacaaatgtatgaataatttgtggtgggactcttgtgtcgagttggtgtaaaatggacaaggcatgggcttggctgccaaggtatgcatctgtcagatattttcatagatagttttacttatcgtgatattgaatgtgttgttgttttatattatcttaggaatagccttgagtatgagattggagcaaagaattttgtctctggagcatcaattagtttggggaatcatactgagatgttctgtccctgcgttgattgtagaaatgtctgccatcagctgatagagacagtattggatcatctagtgatcagaggtatggatttgaagtataagaggaatccatgttggagtaagcatggggacaagagagactgaacatttgttgatgttcccacttcagaagaagaggcttatgagttgcttaggacaacgtattttgactcttaagttagtgatgaacaaccatctgataagtgtcaaactgtagaagaatccgattttagtaataagttagaggatgttgaaactccactctactcaacatgttagaagtacaacaaggtttctgcaataacagtcctttaccactttaaagttaagagtgggatgacagaaaacttctttgatcaggtattgacgacagtaaaagacatgttgcccgaagataatgtgcttccaaagtccactacggagatgaaaaagttcttgaaggtctttgggtttggttacgatctcattcacgcatgcaagaacgaatgtatactttatcggaagtagtatgctcagatggaaagctgcccaagatgtagtgcgtcaaaatgggagttggataaacgcagtggtgaggaaaagaaggggattcctgcaaaggtccttcggtattttccaatcaaagacagactgaaactgatgtttagatcaaaaagaatgggtgaggatctgcgatggcatttcagcaatggtagtgaagatggtataatgcgacatccagtggactttgttacttgggcacgggtgaataataaatggcctgagttcgatgcagatccgagaaaccttcgtcttggtctttctacagatggaatgaaccctttctcgatgcagaataccaaatacactacatggccagtcttattagtgaattacaacatggctccaaccaagtgtatgaaggctgataacatcatgttgactatgttgatccctggttcaactgcaccaagcaacaacatcgatgtttatctagcaccgctgatagaggatttgctggatatgtggattgaaggtataaaggtttatgactcatttatgaaagagaaatttacactaagagctatgttgttgtggagtatcagtgactatccaggcttaggcacattgtttggatgtaaggttaaagggaaacaaggctgtaacgtttgtggaaaggacacacctagtagatggttgaagtatagtaaaaaatatgtctatttgggcaataggaagcgtctcaggaatggacatccgtacaggcgccaaaagagttggtttgacaacactatcgagaatgggacagcaaatagaattcaaactagtgcagagattgctgagatacttaaagtttacaaaaattactttggaagacctttggaaaaggtaactaagaggaaaagatctgaagttattttagaggaagtctatggagaagacagtgattaatggaggtggaagaaattgttttatactcttcttattaccttactggaaggttagcatttggttttgtttaatagcaaaaatgagtaaaactattgtaaacattatgtgtagcctgaaactagtttttattttgacttaggatctgccggttcgtcacaacatatatgtcatgcacgtggagaagaaagtgtctgacgctatgttgtccactctaattcacaatgctaaatcgaaagatggcttgaaggcaagaaaagatttggaagatatgggaatacgaagccacttgcatacagaatcacggggtaagaaaacatatttgcctccagcagcttaggatgtagaaagaggagaagaagagattttgcctgaggttatctaagttcagaggtcctgatgggtattgtgcaaacatcgctaattgtgtgtcagtgaatcctcctggtattggtagttttaagtcagacgatcatcatatgctcatgcaaaatctattacttgtggctttgagagggttgctaccaaaagggcctaggattgttgtgacccgagtatgcaactttttccatagattatgccagcgttcccttgactctgagatgttattatcattggagactgagatagtcgagacaatgtgccaaatggagcggttcttccctccatcattatttgacatcatgtttcatcttcctcagcatctagcatcttcctccagacagcgtttcttcgagatacatacatactgccatcacaagctaaacaagtgttttactcaagagaagatgaatcctctccatggtatgtagtcatgagggcgccaccaagaggatatcatgagctagatactgaggaagagtatgtagcaacaccattgtttgaggagcaagttgaagatatggggaatcagttgtctgacgatgagagttactatgttagagatgactatgatggagttctagtggaagattaatgtggaatataaactggattatgtaatgctaatgtgggatatttattgttggttttgtttcaggctcagtcatggcaattactagaggaggaggaaatctacgccgtagtaaccgtcaggaaggaaaaggtgtgagtcctgtcattgcaaagaaactttccaagaagtctaaaagaagagaagttccacttaacagaataaaatgtctaaaagatattgttggaacataagagaatgagaaagagctgtttgacagagaattacaagttaatgagcatgaaatggttgaaggtgaaaaggcagatgaagaagaaaatgttgaagctgatgcagatggagatgaaaatggtgaagctgatgcagaagatgatctagaggcaaaaaatggtgaagctgatgcaaaagatgagctagaggcagaaaatggtgaagctcatgtagaagatgagctagaggcggaaaattgtgaagaacctgatcagcctgctgaccgtgagacttttgatgattctattggaggtgtagaaactgaccagcctgctgactgtgggaatatggatgcttccacttgagctggagaacctaaccagcctgctgaatgtgaaaatatggatgcttccattggaggataaaactgggagagttagtcaagtgttggggaaggataaacctaggagagttaggggtttaggcagagggattacggctaccaaactagcattccttcaggctagagacacacacgtgcaaaagctagaagaaacacaagccgaattgcttagccatattctagacttgaaaaatgtggtcactgacttagctagaaaagaggtaagtgatgttagcagaggggttaggtgtcagctgctagaatggggttcatcaaaagatgttgttgtcgatgaaggagaattctgctcgtctgatcctttgtacctgattggtcgcattagacttggtcctaacgcagcagctgttgtagtcacatctataattgatagtgattcgccactatggaggcctaccccaaccatgttcacacttggggaagctttgggactcaaaattcattggcaagcggataaagttattttggacaacttatcaaaatctccaattagaagttcttattcaaaggtaacccaggtctcaggagtttacttactttattctcaatacttgcaagctaaatttcatatgctaatatttgtgaatcacttatagggtacaatattagatgagtcagttacaagatgcaaagtttatgattggaattctcatggtgatgttattgctgagggtattttgtgttccactaatccggaccaaatgatcgataacattcctttgggaaaaaatgcagccattgtgaagattgtcaatgttctgaaggaggcggcttatgtgtggaggccaacacttgacatatttgtgatccctgacgcagtagatcatgaaatcccatggccaattaaaagcttagaaatcatcattcatactgcagagaattcaacaatgataagatcgcctagggtaagttttgatgttgcaatgacgtgtaatttaaatttagtatttgagattttgatgagtttgtttttgatgcgttagactacaagtaccaactctggttccagcagcaaaggaaaaaagcatacgaagtgcatcctcttggattgttacaattctggtaaaactgttgcagagggccgagtttgctcgacggatcctgcaactcttctacatttcaaacccataggtcccaaagctagcaaggtcttcttaggtgacaatatgattcacacaacaagaagataagtgtacatgtcttcttaggtgacaatatgagatacaatgatattcatttcaagaataaaaacgtttcaaaatatttttaaataatttctaaaaatctgcaattatgtaaacataataaatttgtcaatatatattttttttttcataaaaaatttgaaaatggcatgtaaaaaacattcttatgccttcatgaaatagccaattagaatgtttcactcggattgatgtcgtggcgaaatctcagcctttcctcatgccatcttaaataaatgtccaagcttgccaaaacgatccaatcaccatatatcactcggatacatgacgtggcgagatattggcctttgatttgtctgtttcgtctccttttcgataatttattcacttctttcgatccaaaaaattagaacatctcagaagaagcctcctttcgatctgtcagccattgaagaaacctcctttcgatctgtcagccattgaagatcagaagaaacaagactcacacggtcagccattgaagaagcctcctctcattacctctcatcaaacatctagatctgtacccaaaccttatccctttttccttatttctcgctttgtctattcttaatctgattaatacttgttgttgttccaggttatagaagatctgggttgtgttatatgcttcattttctccacaggtaatattcttttcatcctttcaaaaataatttccgattcgtcagagtgatattgataagatgcgagtaccattgattttcttttgtgtatattgaatgattcttatatttcagcgaccagttggtgtttggttcttagattcatgaagaccaatagagaggtaaacgattagccattagtaacttatttgtaattcaaacgactaactttctttagtttactgagattaaatctttcgttttgtagcaggaaatttacgttgaaagaagcttcaaaccaaacaattcaacaattcagaatttgatggacattgaaaggttcattttgcctcacacttctacatcaggtgtcgcaaggctcaaaatgagggtcatatcatgggtcgggcttcagttctacaactactgatattgggccttatcacaaattagttatagggccattgtatccaatatttaatatctctgtaaacttgtttaatggttattttgttctaatgcccattacaactagacttaatatcaatataaatactttgtaaaatactttttttttgttaaagagtcaccaaatagtataaaataaggcataaaatacagtaattatatggatactctaaatacagtatccaacgactaaatacagtaattatacggtataaattacaatataaaatatggtataaaaaacagtataaattacagtattaaaatacaatatccagcgcttaaatacagtaattatacggatactctaagaaagctattgttcagcaacccttaaactatcaattattacataatttaaatgctattataaatttaaagtactgctatagttacgcaatttaatagcaaatagtaattgctattgtaaaattaacaataacacacaacaaaacgctatattagttgaaatttttatagcagaacccaaaccgctatataaagtgttcgacctactataacaagcgcatacatagtgtttactacaacgctataatatcttataatattgtttttcctgtgctattgatactcacaattcctgtagtgaattc

SEQ ID NO: 1056 - DNA, 82347 bp, Arabidopsis thaliana
gatccattggttcggtttaatattctgaaaatttggaaaagaaattatattaaacctgcagtttggttttaagacctgcaacggctttgaccaacaattggctgtaatatttgcaattgtttattgtcaatatcattacgtctttggaaaacaattaacgtgaagtgaatgaaagttgcagtttttgtttgtttgcaaataataataatcaagtattcagctgcggtttactcgattgagtttcatgaaagtcaaagtcagtttatgactttatgatcactgaattcatatgaacgaatatgataaaaagataaggcctgcaacccatgtggccagtttctctataagagtggaggctgttttttaaatgtaaaagaacgcaacatctcttagttttaagtaaaagaaagcaacaaagtttattttattttggccttacattatggaaactccattaacaaatttaaaacatgataaacatcatgagaaagagactattttaaaaggtagacataagtagtgactgtttagttgtcgatacggaacgtttgtccttgtttccatttgatgcggctgatttggttgtttctggtttgcgtgcattttttcccttgttgcagtaaccttacattcaacatccccatctttggagttttcttcacctgattcactaagagaggcgatttgggtatcaatgatccgggagatggtgatagtttggcgagaagtgttgaagttgtattttgtgagtttgatctggaatttgcaggagcagccaatgatatgctttaaacattctggaattgtggtctttattccttcgcaattatctttacccgcagcctgagagtgagtgaatataattgaagttgtatgtgtgagtttttaaaaggaagaaaagtagtaaagagaagtatacctcaatgcattcatttaaaacatcacgagcattttttccagctattttggtggcttcaccgttgaggacaacaaaagttccgacgtctccgtttctatcacgtaatctcatttcgaaacggtagctatgaaatcaatgatttggttaaagtctgtgtaatttattatgagcatatattttgatgacggagggtcagagttcccaaacctgatgagccccacgttgttatactctttgcacttgttacagtacatagatgtgtctgcttgttgaagtttgttgttggagatgctgcaggagatgtagtaccatccatgttgtggtttgtatgtccacaactgtagcaaagcaggtgaagctaacttcctacaattattaatgtttggttttttaagcagtaaaaaattgtggtaaagatgaaattagaatagagagaggatactttgaatataacctgtgattttcattatgtagaaactggtgtatttcattaattgtgactgtctccagttttgttacagcagaagaggagcttgcgatagttggtgtttttaaaccactatcccctaacctgttggtgggaagttagttagtttggtatgtgaaatgttggaggtgtttgatttagtatttcaaagcataccaagtaaggaactgtttggtttcatggatgtcggtgtcaaaaccacgaaatctaaacttctgttcatcaatttgattgtctccagtatgcacgagtatcattgacgttttctcgttgaagaagattccgtttttttgatcagtgactttgtaaacttttttgcagggggtgatcataaatttactgagcttgtaaatggagttgcgcttaagagcctcttcatagcggaatagccggtttgcatataagaatccttgcactgcattagactgaaggatgaatgattaggatttgtgtagaggtttgtatatattgagttaaaagatagaattacttgggagttgatgagcagtaattcaaggcccatcagtatgttgccttttttgaaattcctagcttcccagtaatgaattagtcgtactaagacatcatcaaaaatctgaaaggtgaatggttggggagactgttgagctttatttggtgccagattttgagtgtagtaacaggtcgtttttgttttggtttctcggtgtggtgatggtgatttggatttatagtgaaaaataaagctatggtattgaagatagtggccattagtttcttttaatgtcaattgaaatgaatgtatgggggattgaagatgagggagtggagatttgataagacgttttcagtttttgtttttgaagaatctgaatcgctagaatttgagagaaagaagacgacggtgaaaggtggtgatggcgaaggttttttattggggctaatttttgttttgttaaattagtagtggtatgggctttcttttttgaagtgtttttttttgggccttgtaatgttttattttgtttcaattagttgtagattagagtttacattatggattaaatttgtttgggcctgcgttttttatagtaattggtctaaagctgcgttgatttttgtagctttgttttttctgtcttgagaaagatgttgacgtgtccattaaagagagtgtttttgagaatgcatatgtggctaggctgagaagcctcaaactgttgcttttattagtagtagattcataaccatgtcatccgattcaaagaagtggtgcaccattgagcagacatcattccctatcaagtcccaaaattgttggtagaaggcagccgtgaaactgtcaaaatttggagctctatttgcctaaatcgaaaggactgcatcctttatttcctgatctaataatgactataataactctcgattcatctgatctgttactttgggtacaactttagaaataacttccgtcaaaccagtattctacgatgtagaaaaaagatcattaaagtctgtttcagccactttcccaatagcatcgtcgcggaactgttccattccttggtcatcagtgattgccttagttcgatttcgagactttcaaatcttagtggatgcattgaaaaactttgtattacgaagtcccagtctcatccatttgtttctactttttagatgttagtaaagttcttcatctctataaacatggttcagattgtgtctaagttgattaactgttagttgggatgtcgagcagtttctctcagcagcatctaaccggtgtttcagagcctgaatcttctcaactgaatttttctttgttcttttcttctaatttgctttttcttttttacacattcgaagcttatcttgatatccatttcgtgcatcaattcgtcccctttgccaacacatttgcaatgtgtcaaccaagtcttcagagtgaacatgtcatatataatatctgaattggccctgtttagtgcaaatctcatttgcaatatctattattacaggggcatgatccgatccaacaatcgtaagaactctattttagaagttggaaaagaggcttgcaagtcagcattatgaaaactctctccaaacatgactatatagtctttttctctctcttgcctacccaaccgaaagggttccctttaaatttcagatccttcatattgcagcaattgattgtacttgtgaagtcttgtaggatgccaatactttgacggccaatactttgacggctaccacataatccaagcatctgtttggtttgctgacaatctttgaagtttttcccagaggtgatgtttttcacttggtattggatgcccatagatgcaaggcaagtagaaattaaaatttttgtattcagcataaagatctacaagccttacatcatgagaaataacttaaagtgaaagatgctttttataatatacactactaaaacccccaattaaacctctaggagaaacaatacacatatcttcaaatcccaacttgactcctaaatcctttgtgtatttgtcttgtttttctgtttcaatcaatagcaacatatccagaaagtacacctgttgtattgcctctaggggtcgaattgtcaaagatcgtccaaatccttgacagttccaaaatccaactctcatagaggttttggtgttacaggccccaccgcggctctatcctgactcttattattgatgttatcctctgaacccattgactcctctgaatgttgaacctcattttaatttctgacgccacccttctccttcgataagatccggatgcttctcctatctcataagtttgttatcttttgcgcagctcgagtgctagtacttctaccggtcctgggagatcacctattgctttagcaaatgaagggattgggttataaagaaaaccttaatcacctgtcaattccgctcaaaacatatcgcggtcattgtcaggggagttctcctccaaggcattatgatttgggtcaatgtcagagagttgcgtctccgctttgttaacattagcagcaactggacttgggacaatttctttcctctgacggtgattccttggtgcatctcagcaccaatgtttgcgggtccattttcttgatttggttcatcagccatttcgagtagttgcttgtgttgtacaaggtcgactgtgtttctccttcctatagttcctgagctatgcgattgatgttatcgttgtaaaggaggttctggataccgtttgattgagtttgcatacagcagaggtgtacctggatcaaaaagacaacaagcaaaacacacagttagtacctgaagtgaaaattgaaaaggaacttgatctaagctagtctgaaatcttaaatgtaacaaataaacacccaatgggcaactgcgccaaattgataataggattttatgatcaattaatcctaaagcactatcatgtcgttgtagtactaaaggttgtcaatccaaattgggtgtgatgctagcaatcaagatgcaatcaaagttcacagagtcaagccaagcaataacaggttttgagtttcaacagtcctaaggcaacatgtaggaaatagaaattcaagcagaaacagttaaaatactcgaccaacacaacttgttgccaagcactgggtgtggttgagtaaagagcagagacagtaacaaagatactcgactgcacattctgttaccagacaactaggtgtggtcgagtatatgagtgataacatctatgaaatgcaaaagctaagcaacatgtaacaatatgcgctaaacaatagcagagtaaacaaagaaatcaattggatgagaaattcccgaggatgggggtaattgagtagttaagtctcctcgatctacaagtgattgacatgctcaatagactatccctagacaacaagttcgataaccaaattatatacaagaaaatagctaactaccgactacaaccggcgactaaataaatagtcgctatatttagtgactattccgctactattgtacgactaatatacaactaataggtttatagtcgcttattagtcgccaaagtaccactacacagacgagacgccgtattagtcgctaaatagtgactattatatgactaatattgtgtgtcgccagagttagtcgtatattagtcgctatttagcgactacatgaacaacccgccgtagtagtcgctaaaaagcgactataatacgactatttcggcgtgtcattaaccatagtcgaaaaatagacgtaatgatcaatttaaaaatcacatgtgtttcgttttctaagttgttgtaccggctttagacgactacaatatttagtcgtgttttagtcacttaaaaattgcctatataatgaaaatttcacgtacacaaaattcattcacaacacaaacacttttaaggaaaaaaaaagtaacaaaattttaatggcgggaaactataattatacgagtagcggtggttttaatcgagagtggatgtacaagaggttcgatgaaatgacggggaatttgacagcagaatacgtcgcatgagtggaggagttcttgacattttctaataggcagcctatagtacaaagttgtcgaggtaaattccactgtccttgtgttgtgtgcaagaataacaacatatcgtctcgggtagaaaagttagtagtcatttgtttagtcaaggatttatgtctgattattatgtttggtataagcatggagaagatttcaacatgaatgtaggaacgagtaattatgttgataggacgtatctaagagagaattatgaaagtgtgggtaatgttgtagaagatccatatgtggatatgatgaacgatgcatttcgttataacgtggggtttgatgataactatcatcaagatggtacttatcagaatgtggaggaacaggtacgtaaccattctaagaaattctacgacttgttagaaggtgcccaaaatcctttgtacgatggttgttgtgaaggccagtcacaattatagttagcagcttgagtcatgcagaacaaggcggatcataatatgagtgaaagatgtgtggattcggtatgtcaaatgttgacagattttttactagaaggaaaccaagctactgattcgcattacaagacagaaaaattgatgcgcagtttaggccttccttattatacaatcgatgtttgtattaacaattgtatgcttttctggaaagaagacgaaaaggaagatcaatgtcggttattgtggtggtcaaagatggaagcctatggatcatgactaccgtcgaagaaccaaagtgccatatagtcgtatgtggtatttacaattctgaattctaggccaaatcacctgcgagatagtctcgatgtcttcctccaacctcttattgaggagctaaaagagttatggtctactggaattgatgcatatgatatgtctttgaatcaaaattttaatctaaaaggagtgttgctgtggacgataagcgactttccggcgtacagcatgttatcagaatggacaacccacgataaactgtcttgtccaatttgcatggaaagtactaagtctttttatctacctaatggaaggaagacgtgctggtttgattgtcaccaaagatttcttcctcatagtcatccattacggaagaatgcttctaccgagtatccacctgagtctttaaccagtgagcaaatttattacgagcggttgtatggtgtaaatccaccaagaaccaaggatgttggtggcaacaatcacgaaaagaagatgccaggctatgggaaggaacataactggcacaaggaaagcatattatgggagcttccatattggaaagatctaaatctccgacattgtattgatgtgatgcatacaaagaagaattttttggataacataatgaatactcttatgagcgtgaagggtaaatcaaaggacaacataatgtcaagaatggatatagaacgattatgttctcggcttgacttacatattgatagtaagagaaaagctccatttccagcttatacattgacaaatgaagccaaaatgagtttattgcaatgtgtgaaacatgcaatcaaattcccagatggttattcgactgatttgggtagttgtgttgatatggagaatgagaaattgtcaggtatgaagagtcacgattgccatgtttttatggaccggttacttccatttatctttgcagaactcctcgaccagaacgttcaccttgcattatcaggtaaaataagaataaaatttactctttatatcatatatgcacttgagatgatgcaatttgtatttttttgtaggggttggcgcattttttagggatttatgttcgagaactttgcagaaaagtcgcgttcaaattctcaagcagaatattgttttgatcatatgcaacttagaaaagatctttccactatcatttttgatgttatggagcatctgcctatacatctcccttacgaagcagaattgggcggtcctgtccaatataggtggatatatccttttgagagggttttcaaaaaattgaaaggaaaagcaaaaaaaaaaaaaagatatgcggtcggatcaattgttgagtcttatatcaatggcgagatttcttatttctcagagcactactttgttgataatatacaaacaaaatcaaggtaaataatagtaattaaatatctttacaaaagcaagttttcaatgcgcaaaactaaccatgaattacctcatttggatcaggttaacaatattcaatgagggtgaagttcatgtatatcatgttcctgaagtacctaatatatttactttcgtcggtcgtgaagtatggctatcagaggaagactatcaatgcgcacatggatatgttttttgaaattttgattattttcaagtaattgagaggtatataacaaattaaatacttccattttaagtttttaattataaatgttggtttaataacccctatatgttgtttttgtatatattttctttctattcaatatccaggattgaacgaaaaagaaatcttcttgaaaagaggcgaagaatatcatgtgtgggtgaaagattattatgtctaaataatttatctatatatttgcatttctttattgttcttcatatctacaatgatgtgtatttctaaatttgcatacatgttacatattggaacaccagtaattcatttccaacttgggttcaagagatagtccatggacctttgcacaaagtcaaaacctggccaatttattttagaagaggttatttgttttatatgcagagtcatggagctggacgtaagacttgtaactatggggtatgtgtgaaaggtgaaaattatacggatgcatctgacgccatagatttttacggaaactttactgatatcatagaacttgagtatggggggtgctcagtttgaaaatcacactttttaaatgtttgtggtatggccccaagcactcggaggagcaatagtggtgttgtcgacgttctttcatcgagaaaatacaacaaatacgaaccatttattttaggtatgtacggtatatatggtcattggcaaacaacatctcaagcggaacaagtgtgttttattccttatccatacacgaaaaaatcaaagcaggagtggctcaatgttttaaaagtaaatctaatgggaaacatattaggagaatatgaaaataaagaccagatgttgcaaacagaaaatgatgattttgttttaatgactacaatagaagatcttgtactcgacaatttgacagaaaatcgcaaccctataaacctcaatctagatgtcggagatgcccagaagatggattccgatgtaatttatcgtcttctgaagatgaagaacaagaagacgaagaaaaatattagttttatgtttatgatatttacttaagttattatgtttaaatatgcaaacattttaaattattttgaaaaattatatttgactaagtatgtttactatgtttaattatatttttatgtataattctgaatatcaccaggcccaaaaacaccaagcccaaacccaattataagaatttaaatatgcgacttattgttgacattttagcgactgtaacaatactattgggccataaaaactcgaggcccaaacccggtgactaattgctgacatttttacgactacaacaatactattgggccaaaaaactcagagcccaaacctggtgactaatttgggacattttagcgactaaactttaaagaaacctgaaacctttaaggcctaaacccttaaggcccaaacaaaacccttatgatcttttgttcttcgaaaccttcgcagtcttcttcttccatttcttatgcaatcgatctttcctcttcgatttcctcttaaatcgatatttcttcttcgatttccaactctatctctctgatttcaaaccatagcagctctcttcgatttcaaaaccctagcttgtccttcgatttcttcgatttcttcgatttctttgatttcttcaatttcaacctccgtctcatctcgatctctccttcacacgatgtttgggcgaggaaaaaagaggcgtaccactcctaaccttgatgagagagccaccggatccacggctggtggacaacctagttctcttctggctcagtacgacttcacgccggcagcacaacggcctactcagctatagacgcctacaacagaagaccccgttcctccattacagtcatcgacagctcatgtccggaactacccgccgcctcaacaattattctagcactccggcagtcgacaacctgaagtgcaaaggactgcttccgtagaagtctagaacaatcccccgactcaagcgacaacgactctggagcttgtccctccgactcctcagcaagacccttcgccttctccagttcaagagtctcgggctcacagtcacccatcctctcaaggcaacaacttcgaagaatatccacctctgtcgccggatctctaggaggacacacttcagtctctaaatgatctgcttatgttgacggagagggataagttcgttaccatcctctcttccattcctcgaccgaatacgacatggaatgatcttcttttctcttgtttgtgatcccatgttgtgttcaatgtcgtttttgttgggtaatgagctttgtgaggccgattagatttagaaaatgtcagaattgtttcttgtttatgtcacggatgcatttaaagagtcgtgttgtgttggtctttgtttaagtttatgtctgatatttagatgatactttgcagccataatctatgttttgctagatatgatctatttgtatgaacttcttattctgttgtttgcgagaaaaagtagtttaagttatgtgttgtgatcttagggttctgttgggtaatgagcattgtgaggccaagtagtttaagtaattgtctgaattgattcttgtttgtcacggatgcatttgaagagttgtgtgttattggtctttgtttaagtttagttgtagatgatactttgtagccacaatctatgttttgctagatatgatctgtttgtatgatactttgcagccacagtctatgttttgctagtttaggtctaatatttagatattatctgtcatataacaactgcttgtttttcttgtgtatggaggtttactcgggacacaaactcgctacttgttaggaatattactcgagtgtttacaaacaaatttgatggtccctactacagctgaacatgtgtgcctcaagagaaatacttccttgagttttcttttaagtgttctttcagcccttcttatatatataattacgcttcttttttttactgacattaccttttgtatttgtagaaaacacaccattgggatcctttgataacatggactatccagtattatttcaatgagatctgtttaaggcgaatgaaaggcatggttagcaccgcaagaactagacgaaataaaccttaatggattggaaaaactctatggaaaacaatgactgtgtactgggacactgatgaagctcaagaaagaagtcaaatatattcaaatgcccgtctgtctgaccgtaacggtctaggtcctcacatacatttctcaaggtcgaagtcatatcagcaaatccaagacaaattagtgagtcttctctctgtttactcctttgcaactttaatctgatgtttctctatttatctattacttgtttttttttcattacaagaagagcaattgggcagagctgtcagtattggtgacgttttgatcaaaacacatacaaaacctgatgggacgtatgttgatcgaaaggcggagaagattgtagagttatatcaaaagaatttgcaattgaggcagtctgagctcaaggcagaaacttctgctgtttcagatggcacttcgcgggaacgggagctcacagctgaggaatgtacaaccatatttcttcaggtaacgttttatgtttcccaatttagtgttttcgagttcaattttcattctctattctcagcttttatcatactttgcagtccactgagagggattcgagaggcgttccttatagagtaggaagcctcatagagtctcttgtcaatgccaagcggaagcaagcaggtgactcaacttcttttgtggctttgcaagaacaattattggaagctcaacgcaagatagaagagcaggcctcttacaatcagaggcgtgaatatgagattgctttgcgtgaagctgagaaatccgtagttgctgatgagaagaagaagaagattgagcacttgtccttattggagaagtttttgcgcgaaactgatctttggttcctgaatttcctcgaatctcattcagctaaggagacaaccacagatcctatctcaccctctccagctgcctctccattttcatctgcttcataggtctatgtcttaactccttcctcaagactcaatatcacttttcaaagtttttctatatgtgtacttgtgttgcttgtacttgtgctaaacaaagttcttagttgtagtgaatcaaacatgtttttgtaatttgggttttgttacttttctgaaatgacaataaatttgtgttcatgattattgtattgtgtttatgattcttgtaatttatgttttgttttctcagcaaggtttccatctttagaacattcatatttgtattctgataacaacaatagtcgcaatttagtcatcaaaaatgtcatcaagtagtcggttcttgatgacaatttagtcactaaattttccgactaaatgacatttcagtcgcaactcagtcttaaatatagtgacaacatagtcgtaaattttaacgactaattacctacaacgagtacagaacccttaagttaatcgttagtttgtcgtctaatagtcgctatattgtatggctatatggtcactataaagcgattacttaaacttagttgctttttagcgactaaaactacgactatagtatttaccgactctcgattagcgactacctttaatagttgtttatttgtcgtaaagaggtatttaacgactaaacagtgactaatactgaagtcggtaaatgtcaatttttttgtagtagtctaagtgccaccgcaacaaagaccctcaagttaaactagtcccggactcaatcacctctgacgagagcttacctaacatgcattacgaaacaacaagttaaagctaaaacgctccctataaccaataccttggtacagagccaagaatctctagaattagtgattctgacatttcgtcgaacaccttttgggtgcagaaatatctgggctcaaattctagttaatcagaaagcaataggcattaggaacaactaatccaaaagggatctataatcaaactccaccacctaacagaccgaggattctaaactactctaacccatcctcagaaacctagtcactactcagactttattgcagaaaacataaacgataaaatgaatgaaaacatcatagcaaaataatgataacagaacaataacaggatgaacaacttagcaatgaaaagtgaaatactatatagattaagagaaatcctattacaaaagcgaagaacacacaaactgtctgcagaataaaacttagtctcgaaaatgtaaagtacatgttacttatagcgaaatattctgaaaccctaatactcaaaacgacacagtattgggacggattaaaaacggtactcgaccctggtggtcgagtaatgggtcgagtgatgagccaaagtcttcttctcttcctgatgctcgaatgtctggttgagtgcggaattgagaagactcttaagctggcagtcgagtagggatatcgagttgtagatgaaggtggactcgacttggtggcagagtgatgaaacgagtgaatgatgatggtggtactcgaccatggggtcgagtggtagtgatcaagtgattgacaaaaggtggcgatggtgttgctcgatcaggggctcgagtgaatggcgagggattgtgatggatgtgctcgaccaattggtcgagtggtggtgagaaacggtgatgtcagctactcgagctcgtggtcgagtggtggatagagtctcgcggtcaagtgatttgatgtagaggttgtggccgagtacttcaggaagtccaggatgacggtactcgagctcgtggtcgagtatgttgatttgatcaggtccgcttcttccaattagctcaccagcagctccaaatcacatgaaaacaacacaaatatgcaatatgcatgcataactatcctaagcatgcaaagtgatgacaaatgatgacaaatggtataaaacagtggtgatatgatgctaaagtgatgacaaatggatgctcaaaacaagaaaaatgtacacttattagttagcgactagacaaaagacgtaagcaaatacttcgcaattttaggacgtaaaaaaacagtcattgttggagctggattctcctccaggaatccacctgcgaaaataccaagccagcccacaaagcccaccaagtagaggacctacgcaactgatgagcccacatacgcgaatgggtacttgggccagataagccgggtcacctgatgaagggagataagcgaataataacctaggaactgatgaggagatattcacggagcagacctgatatctcggaactgacctgccgaatattcaggaggatctccgcagatcccggacggagctaccacgtgcgtagacctatataagggagcaaggacgacttggaagagacgttcaattcagcttacattcacacacatacttttacacttgtaatctcctttcacattgtaaaagctttttcataatcaatacaaaaagtccattcgttcttagcaatataactctcaaggtttcagtgaagttctagccctcctttctcataatctcaattacaaatctctagtgtggatttcagaacccacagtcataatatagtctctatttcactacttcattccgactcaattctgtctataaaacgaaggtcgcaatttacgattattgtcgaacctatttgatactcgtgatttttatgtatatatatacattgattgaataaactcaatcattataagtttctcaaagctttaaatcacactatttgaacacaataatcatatatatatgaaaggaggctaactctcttccacaacttgacacataagcacatgagaacttgccacctagacttcataagttaagtaatacataattagtaattaatttaacataacaactaaaataggaggatataattaatcagaacttgaaccatcactcttttatatttttttaattcaatatatcctctttaatgttgagatccacttaagtggctaaagtgatcataaaatccaaacatgctacacagattccttgcaatctaaattttctaaacttttctaaaatttcatagtctcacaatctaaacatataacaaaaaaacaagaatatataaaataaaaacaaaactaagaatctagaacaacaataaaaaacaactcaagcacattcgtttttcagatgaactaatatagttggacttttcaaaaacaattacaaatcataattatgtttcaaaaccgatgcattcaactttactttatatgaacagacattatataaaactgttgggaatgtcctgaaatcagttatacttattctaatgaaataaagtggtaatgtcgaggtttgacatttgtataatattaggtggttataatgttttgctagagacagcttataatctatgagtgagaactcattgctaatattatacaaacctacaaggtcacacacctaagcaaactgcatcaatgtttattatactatatatgttatatatgatatatatacatatatttatgtacatgaatttcaaaaagggaaaaaaagagttattgggatttggcccattataaatcctaattagttagggttaaacggttggctatatatatgatatattcgaaacttttgtaatatatacttttgatcataaaaccctaaaatagagagataaatagtttatctgagttttgagattagatctcaaaggaactagcattccagatctgattcagtttgtgtgcgtgtggataccggtagaggcacaacatttggggtgctaaaacaacctcgaaacaatatgattcatcttttcgctgcagattatccaggtatattcaaaacctattatctagatttgattctttatttacacagttcctggcaattgaattcgttattaggatttataaatcgttataaagaggtacaaattcctacaaaaataatttgtaaattgtaatacataaacccacacgtaatgcaggtactcatctagtatcattaattctaaatcattcttaagtttaacatgttggtttaaatacttgtaaatttcaaattgggaatctcgatgtaattctaaatcattaacatttttgtaaatttcaaaacaaagttattaaatcaatgttttaagatcttatactaatatggatactctagaatacagttatgcttgttttttagtgattggtatcaatagttttgatcactaatgcctagaatccaaaaaaacaatttatgacttaaaccttagattcacaaaacaataacaatatgtgactatatttggactcatttaatacttgcaattttttgaaatcggaaaatcaccttagagaattgatatatacatacatatagatgagtgaacaaaactcaatcattataagtttttcaaagctttaaatcatattgtttgaacacaataatatcattaattctaaatcattcttaagtttaacatgttgggttagaagaaggatttcagtttttgtaaatttccaaacaaagttatcaaatcaatgttttaaactcttatactaatagggatactctagagtatagttatgcttggtttttagtgattggtatcaatagttttgatctgtaatgcctagaacccaaaaaaataatatgtgacttaaatcttagagtcacaagactaacaatttgcgactatattcggacttatttaatactcgctattttttgtattcgaaaatcaccttagagaatgttatatatacatatatactttgagtgaataaaaatcaatcattataagcttttagctttaaatcatattgtttgaacacaataatatcattaattccaaatcattcttaaatttaacattttggtttagaagaaggattggatttttcaaaaacatttaaatacaaagtaatcaaataaatgttttaaacttttatactaatagggatactctagaatacagttgtgattgtttttagtgattggcatcaatagtgagaaggaaagttatcccatttggagaaggaaagctgtcccttttcccctgagaaccaaatgatcaagcttgggcgggttcctttgtcggagagtgttgaagcagctcctcctcaagaagctcaaactaggcgaggaaggtcgcccccatattggtggcggggtagccccactcgatatgctgcaaaagcaaagcataaggttactgctagtaagcgggttgaagtttcttcttctaaagcaaagagatcctatggtccccgtgtgggtaatgaggatttgcagagaaaataggggagtgcaaaggacaaacccttgcttattagagaaccacctctcaatagagctcatcacacttcgcagtagcgcaggctctcttgtggagatttaaaccacaaatcaaggggtaacatctttccccgaacaagggagactgtattagaaggaaatgcttccttcaggaagcgacgttttgaagaagctgcctcgtcagaccaccaaggacgggattcaagcaggggcaggtctacaaagtcccgtcagactctagaatctaatcttgtttcttctgcaaaagctctcattcaatcccctcttgtggattctcaattgactatttcagaacctcttctagccgtagttaaggctaagcaaggttttggttctccagccctaacgagagagcgcccttttcgtctacagctcaataaaaagtctaacgttgtcacaatgtcaaaaggaaaggagaaagaaggagatttggagctttccggtgattcctcagattttggaagtgcagcaaaaaagagtttaaactttgatgtgttggttcctgcagcttcgaatatgttatcaattgtccaaactcctttgccagctcaaagcctgatcgattgcaaccttaactccaattcttggtatgatcaaacggttgaagaagaggaagaagaagctgcaaaactcaaggcttaagctgtggagattattgttccaatccggaattcgatttcgtgtattccatctgtcgaacgatatgtcgcaattcccaattcgattccgcttgtttttgatgcattcgacccattgcttgaatcaactatgaatggcctgcagttagacgacggtaatgagaacagtatggattgggatctacctttggaaaaggaggatggggtggatctagaattgggagaggatgatgaacaagcttatcgagattcagagtatcccatggaggagggagaaggtgatcccgcgacgagagactatctctttgaagaggtcccggaggattcgactacgagaacgatgatttattgggtgatgagtattatgaaaaggaatcaattccggtgatggaggatcgtgagtctgagccgttagtagttgctgatcaaattgttgattcttcactctctcttcctattgggcctagagtgtggagaaaaaagggaaggcccactcaaggaagaaggtggaacagaaactcaaaggcccatctgggtcatctgcttttattggggctgcgtcgaagaagctcagtaaggcgtcctcgaagaagcggccctccgacatgaaaactggtccaaccaaaacaaggaataccagaaaagctgcagcaagcccgagtagttatgttttcccatcgtcaaagaacaagacatctttggttattttgagtaaggcgggatcgtctgatctccccgattccaagatatgaggattctagcatggaactatcaaggggcgggtgcagatctcacaactcgtcgactggaggaaatgtgtcgtttgtattctccaggttttctttttttatcggaaactaaaaaagaccgtatgcatcttcagaatatgcaagtgcctttaggctttgattctctccagactgttgaaccgattggtaacagtggtggtcttgctcttttttattcgaaagactatccggttaagtttgtttttcttaatgatcggcttattgatattgaaactattattgatggaaatcgatattacttttgttatggcgatccggtagttcaataccgtgaattagtgtgggagcgtttgactcgtattggtatcgagcgttcagatccatggtttatgattggggattttaacgaaattaccggaaaccatgagaaaaagggtggtaaacgtcgatctgaatcctcttttcttccctttcgttgtatgattgaggactgtgggatgatcgagatcccttcacatggtaatttattctcatgggtgggtcggcgtagttgtagggttgcgggtcgtagatttcgacaacttattaaatacatattagatagagctttgggaaatgaagaatggcatacaattttttcccacacaaatgtggagtacttaaaactatggggttccgatcatagacccctcctagcttcgatccagaatagtcctcatcggtttaataaatccttcatctttgatagaagatggattgataaaccgggattcaaacaatcggtcctcgaaggctgggctttcccttcgaatgaaggtgttctttttttacaaaaagttaaaaattgtaggagaactatctctatttggaagaaatcaaattctacaaattctgaaaagttgattgtagagctgcaagataaaattaacttagcccaagaagatgagtctttgtcctcagaagatcttttagctttaaaatggcagttatgcgacgcttatagggaagaagagattttttggaaatcgaagagcagggaattgtcgtttaaactcggggataagaacacaaaatactttcatgctattactaagcaaagaagagcaaaaaataagattattggtttattgaaccaagatggtttgtgggtggataaggaggtggatattgaaagtctagcggtggattattttaaatatatttttacctcctcggatccacgagaattccattccgttcttagggatgtgccagttataatttcggaagctatgaatcagaaacatataaaggaattctccccagaggaagttagacgagctctgttttcgcttaatccagataaagccccaggtccggatgggatgactgcccttttttatcaacatttctgggacttgacagggccagatttaatcaaatttgttcaagatttccatgccacaggttccttcgataaaaagttaaatgcgaaaaatatttgtttgattccgtaaacaaataggcctaggaaaatggcggaatttcgaccaataagtttgtgtaatgtgggttacaaagttatttccaaggtacttagtgcccgattgaaaaaacttcttctggaattaatttcggagactcaatccgcctttgtgtccgggagactcataacggataatattcttatagctcaagaaaattttcatgctcttcgaacaaacccggcatgtagaaagaagttcatggctataaagactgacatgagtaatgcctatgatcgtgtcgaatgatcctttctacaagctcttatggtgaagatgggtttcgctcagaaatgggtagacttgatcattttttgtatctcttcggtgtcatataaagtccttttaaaaggttccccgggaggattcattaagccttctagaggaattcgacaaggtgatcccatttcaccttttctgtttatattatgcactgaagccttggtggcaaatcttagagatgcagagtggcatggtcgtattcaaggtcaccagatttcaagagcaagcccttctacctcgcatctcttgttcgtaaatgatagtttatttttctccaaagcagaccccatccaaggtgaggaaatcatcaagattctccgcatttatggcgaggcttcgggacaacagttaaatgcttctaagtcttcagtgatgtttggacatgatgttgataatattaagcgaaatgctattaaggcgactttgggaatccataagtacgggggcatgggttcctatctgggattaccagagaaaattcatggatccaaagttcaagtcttttcgtttgtgagagatagacttcaaaaatgtcttaatacttggccagctaaattcttgtctaaaggaggcaaaaaggtccttataaagtcttgctcaggctcttccgacatatgttatgtcgtgttttcttcttcctaaggctatacgctcaaaactaagtagtgctattgctaatttttggtggaaaactaatgaaaatagtaatggtattcactgggtagggtaggataagttgtgtaccccacactttgaaggcggcttgggttttataacactagaataatttaatcttgctttactagcaaaacaattatggcgccttattagatatccaaactcccttctgagtagggttttgagaggcagatatttctgttttagtgatcctctgcatataggatcttctaatcgtccctcttttggatggagaagtattatgggttctaaaccgttactagttttaggccttcgaagaacaataggttcaggtatgctgacccgagtttgggaagatccgtggatccccacaattccagcaagacctgccaagagtgtcattgacataagagaccctcatctctatgttaatgacctaattgatcaatccacacagatgtggaaattggatcgccttcaggctttgatagatctcgttgatacttcgctcattttagggatttgaccaagccgtacctacttgagtgatggatttagttggtcgtatactaaatcaggtaactatactgttaaatcaggctattgggtcgcgcaaaatttatcttgccctacttgtgaccccccttttcagggaccaggttttttggcacttcaggcacaagtatggaagctaaaacttacgcggaagcttatgcatttcgcgtggcaatgtatctttggttatcttgccacttgccaaagatagacttattgtcatatgggaacaaataaaagatgtccccgttgtggagaagcagatgagacaattaaccatcttcttttccattgtccaccctcgaaacaaatttgagcattatcgcctattccttgctcagggaatgtcttccctagaaattccctcttctataatttcgattttctcttttggcgtggctgagaatttggaataggagaagaggtgctagaactctttccatggatactttgatatatctagaaaagtatgaaccgttttgtttttgaaaacataagggaacctcctcctgaaactttagctttggcacttcaagaggcagctgtttggaaacaagcatctcaaaaagaagatgatcccattcgtcctaccccgttcgtaggttcttctcaactccctccctctttgctgtctgaatgtcaacttgatgcttcctggcatgtagatgacactatgagcaagcatggttgggtccttgttcgtcaagacttggtcatccagcttggacagaggagcactcgtcgaagtttatcaccgcttcatgcggagtttgactccctgttatgggcaatggaatgcatgatctctattggtgatacttctagtaattttgcttcggattgcttggatttgattggtatccttgataaccaagacaattggccgacttttcctgcagaattggcttcttttggttctttagtttgtttttttccttcttttctgattagatttcttcctcgtagttctaatactcgagcagattgtttagctaagaaagctcggactcgtaatagcttttttcccatgtaagcaaatcggttcctgaatggctctctctagctgagagtctctttccgataacttaatataaatggtgtttaatgaaaaataaaaactaatagggatactctagaatacagttatgattgtttttagtgattggtatcgatagttttgatctgtaatgcctagaatttttgaaaaaaaaaaacaatttgtgacttaaacgtaacagtcataagaaagtaacaatttgccactatattcagactcatttgatactcgcgatctttggatggtgaattttgggcttttattttgggcggtgagttttgcccctttttatatatgtatttttaatggatttgggctttggtttggacagtgaattttgcctccaattttgtttttgttgtgactcgtttgcgaccgattaaggactcctccgtattaattactatgtaaacacttagtcgatttttcattatgcgggacttctctttctggattttgggttttactctcaaaacctctgaactctcttctcttctcaaatcgatttctctcgtcaatctctcctccgtctcttctgaatctctcctcaatctcttctcaatatcgcctcgatctaatggtactaaagggaaattctacacgaggtcgcagtggcaaatctcaatcaggttcgagggtcttcactagtccggatacgaagccaagtgctagtaggacttagagggtgaatcgtccgaatcctctgaaaccaaccattggtaggcgtaaaaggcatatcctttgaatccaagcagaggcttgagtccaaatcctccggatccagcgctggtttgattaaccctccattgaatccaagtgtgagtcggactatgaataatagtcgcggaggtggaagcagaggaggaatgagtggtatcggagtgtcttctcactcctctagtccatcagagacacaatctatgacccaatcacatagaagtcttccatcccagtaccagtagaggacacaacctcttcctgctcctcaaccaccgtctcatgttattcaattaggataattctttagatcctaatttgattaggataaactcgattatattatgttctattctgattagatctataaatttaataagattaactttctagataactaataattttaatttgattaagattaattaaattatttataattcaattagatatatattggatatatattagttatattttatttatattggatataattttttaaatataaactagagttataaaattaattcctcaactaatatcaagtaaattgatgtcttccctgattttatcaactgttaaaacttaaatttttgtatggcgggtctgccaaagcagcggtctgcaattgtttaagattgagacacatagtaacggttactatataaaataaaattggtttacttgactaagctatcaaaacggtttggggcttagagacataagattgtataagatattagatgtcatccacaaccaagaattatattggatataattagcaagaagttgcttacctaaataactagatattcaggggtggagccaaagctcacttggattctagtgaaatatggatcttggatcattgtactcattagagaatatttgttttgagtatagtgttagttttcttaattgttaagaattctaaacttatgaacatcatattaatttctgcttttctttttcgatagttatgtcaaaccctcaaagttcctattcagttcgagatgtccttaagaaggacaaattgaatggatcaaaccctcctgaattcttggaagatctggagaagaagaaaacattcaagatttcttcttcgggtatctatgttatagatgtaaatgttactacttctggttttactccttgggtattggataccggttgtagtgctcacatttgtgtaaatgtgcatggcctaaacaacagtagaactttggaggaaggacaagtggacctacgtgtgactaatggagaaaaagtctctgcattggccgtgggaacatattcgttgtctttgccttcaggcatggttttggaggttaagaactgctactatgttcttgcaataaacaagaatatcatctccgtttcatgtttggacatggaaggtcatcacttttcgagatgatacgttttatggtagcgctccattagagaatgggctctatgttctaaaccaaagcatgccaatttataacattcataccaagagatttaagtctaatggcttgaatccaacgtttttctggcattgtcgtttgggccatataaacgagaaacgcattcaaaagcttcatagtgatggaattttaaactcatttgattatgaatcttatgagacatatgaatcttgtttgttgggaaaaaatgactaaagccccatttaccggacaaagtgagagggctagtgacttattgggctttatacatacagatgtactgtatgtgggccaacgagtacaaatgctagaggaaactatcagtatttcattacatttactaatgactttagtagatatggttatgtttatgtaatgaaacataaatcggaatcctttgaaaagttcaaggagttccagaatgaagtacaaaatcaacttgggaaatcaattaaagttcttcgatcagatcaaggaggagaatatttgagccaagtttttagtgatcatctcagagagtgtggaattgtttcacagctcactcctccaggaataccacaatggaatggtgtatctgaaaggagaaatcaaactttattggatatggttcgatcgatgatgaatcacacagatcttccatcatccttttggggatatgctttagaaatatctgcgtttatgctcaacagatgtccataaaaatcagttgagaagacaccatatgagatatggactggaaaggttcctaatttgtcttttctgaaaatttggggttgtgaagcttatgtcaaacgattgattactgataagcttggacccaaatatgataagtgctatttcgtaggttatccaaaagagaccaacgattattacttttaccaccctactgacaacaaagagtttgttgctcgaaatggtgcctttttggaaagagagtttctttcaaaaggaactagtgggagtaaagtattactcgaagaagttcgagaaccacatggtgatgttccaacttctcaggaagaacatatgtttggatctacgaagagtcgtagaacctatacatgtggaacctgaggtacgtaggtccgaaaggagccgtcacgaacccgatagatttggagattgggtgacggatgatcatgctctatttcttatagagagtgatgaacctatgtcttacgaagaagcgctgatgggccccgattccgataagtggttagaggccgcaaaatccgaaatggaatccatgtcacaaaacgaagtatgaactttggttgatttacctgatggtgtaaaagccataaagtgtaaatggatttttaagaagaaaattgacatggatggtaatatatagatatacaaagctagactatgatgaaacctattctctagtcgtaatgcttaagtccattcagattctcctagcaactgctgctcattatgattatgagatttggcaaatggatgtgaaaacaactttccttaatggaaatcacgaagaggatgtgtacatgacacaacctgaaggtttcactattcttgaggctgctaggaaggtatgcaggcttcatggtttcatttatggattaaagcaagcatctcggagtttgaatcttcgttttaatgaggcaatcaaagagtttgatttcattagaaacgaagaagaaccttgtgtttacaagaagactagtgagagcacagtcgcatttctggtattgtatgtagatgacatactgctccttggagatgacattcctttgcttcagtctgtaaagacttggcttggaagttgtttctcgatgaaagacatgggtgaagctgcctatattcttggataagaatctatagagatagattaaacaaaataattggactaagtcaagatacttatatagataaggtcttgcacatgttcaatatgcatgattctaagaaaggctttatacaatgtctcatggtataactcttagcaagacttagtgtccttcgacgcatgatgagcgagagcggatgagtaagatttcatatgcttctgctataggatctatcatgtatgctatgctctgcactcgcccagatgttgcatgtgctttgagcatgacgagcagataccaatctgatccaggtgaaagtcactggatagtagtcaagaccatccttaagtacttgagaagaactaaggataagtttttggtctatggaggaagtgaggaacttgttgtgagtggttctactgatgccagctttcaaacagacaaagatgttttccgatcgaaatcacgatttgtcttttgtctaaacggaggagaagtgagttggaagagttccaaacagagcactgtggcagactctacaactgaagctgagtatatagctgcttctgaagcggctaaggaggctgtttggattaggaagttcattactgaacttggtgtggttcctagtatttctggccccattgatctttactgtgataacaatggtgtcataacgcaagcaaaaaaacctagatcacaccagaaatccaaacacatacaaaggcgatatcacctcattcgtgagattaatgatagaggtgatgtgaagattagcagagtttcaatgaatgcaaatgttgctgatccttttacttaacctcttccacagccgaagcatgagagtcatattgctgcgattggcattagatttataaagatgtgatcttatttctagtgtgaagtttttcttttatgatatgatgttcatgttaaaagaaatttggatttatttttaaattaatgaaatttgtttcagtattatttatttatttgataattaaataatagtcccaaataatttatatcattcttataggtcatcaagtacgtgacttgatcatgaaaccctgtaagtgaaaaatgacattaaaaaattgattatagagtcagaatcgtttatcacttaagataatgagttctgagttataatgattcctgaactgatatgtagaaacttcaacttcttattaagtccctagtcaaggttattaaaatgggacattaataactaagaatgactagtatgtgaggtgactgatgactaagtttcatggagtcattaatatgtggtattaaagtcaatcacatagatatgtgttcgagaacacagtattggactgacccgttatgagaactctacaagattgttatatgagtgtcataagagtttctcatcacaactatagagtatagttctttgacctgagttcgtcatgatttcttactcatggattagttcgctttgactctgtcaaacatcagccgaaaaggtgattataaagacaagtgattgggcgcgttatgaattgtataaggaacaggcatggaacaagatgggatttgtccctcccatataacgggagataaatatctttgggcctatcgaagatttgatactgagaaatgcgtggccgcgctcaaacgaggtaaatgtcagtcgtttgttttatcagtaaaaatcagagttcgataaacatagtctagctgaataaggatcataatttcttgccttatgctcagatcgagatatagagacaaagggattatgggaatagatgattccagtacaagtgagagattgttgggaatgtcctgaaatcagttgtattttattctatttaaagtggtaatgtcgaggtttgacatttgtatagtattaggtggttattatgttttgctagagaccgcttataatctatgagtgagaactcattgctaatattatacaaacctacatgatcacacacctaagcaaactgcatcaatgtttattatactatatatgttatatatgatatacatatatttatgtacatgaatttcaaaacgggaataaaaagagttattggactttggcccattattaatcctaattaattagggttaaacggttagctatatatatgatatattagcaacttttgtgatatgtacttttgatcgtaaaaccctaaaataaagagacaaatagtttgtctaagttttgagattaggtctcaaaggaactagcattccagatctgatccagtttgtgtgcgtgtggataccggtagaggcacaacacttggggtgctaaaacaacctcgaaacaatatggttcatctttgcgttgcagaatatccaggtatattcaaaccctattatctagatataattctttatttacacagttcctggtaattgaattcgttattaggatttataaatcgttataaagaggtacgaattcctacaaaaataatttgtaaatagtaatacataaacccacacgttgtgcgggtactcatctagtatcattaattctaaatcattcttaagtttaacctgttggtttaaaagaagaatttgattttttgtaaatttcaaaacaaagttatcaaatcaatgttttaaattcttatactaatagggatactttaaagacagttatgcttgttttttagtgattggtatcaatagttttgatctataatgcctagaatccaaaaaaacatttatgacttaaaacttagagtcacaaaacagtaacaatatgcgactatatttggactcatttaatacttgcgatttttttaaatcggaaaatctccttagacaattgatatatatatacatatagattgagtgaacaaaactcaatcattataagtttttcaaagctttaaatcacattctttgaacacaataatattattaattctaaatcattcttaagtttaacatgttgggttagaagaaggatttgatttcttgtaaatttccaaacaaagttatcaaatcaatgttttaaactcgtatactaatagggatactctagagtatagttatgtttggtttttagtgattggtatcaatagttttgatctgtaatgcctagaatccaaaaaaacaatttgtgacttaaatcttagagtcataagacagtaacaatttgtgactatattcggacttatttaatattcgctattttttgtattcgaaaaatcaccttagagaatgttatatatacatatatactttgattgaataaaaatcaatcattataagcttttagctttaaatcatattgtttgaacacaataatatcattaattacaaatcatttttaaattttacattttggtttagaagaaagattggatttttcaaaaacatttaaatacaaagtaatcaaatcaatgttttaaactcttatactaataggtatcaatagggatactctagaatacagttatgattgttttttagtgattggtatcaatagttttgatctgtaatgcctagaatttttgaaaaaaaaacaatttgtgacttaaacctaacagtcataagacagtaacaatttgccactatattcaaactcattcgatactcgcgatttttggatggtgaattttgggcttttattttggggggtgagttttgcccctttttatatatgtatttttaatggatttgggctttggtttgggcggtgaattttgcctccaattttgtttttgttgtgactcgtttgcgacctattaaggactccttctcgttaattactatgtaaacacttagtcgatttttcattatgcgggacttctctttctggattttgggtttcactctcaaaacctctcaactctcttctcttctcaaatcgatttctctcctcaatctctcctcagtctcttctgaatctctcctcgatctcttctcaatctctcctcgatctaacggcgacaaagggtaattctacacggggtcgcagtggcaaatctcaatcaggttcgagggtcttcactagtccggatacgaagccaagcgctagtaagtcttagagggtgaatcgtccgaatcctctgaatccaaccaatggtaggcgtaaaaggctgatcctttgaacccaagcagaggcttgagtcaaaatcctccgtatccagcggtggtttgattaaccctccattgaatccaagtgtgagtcggactatgaataatagtcgcggaggtgggagcagaggaggaaggagtggtgtcggagtgtcttctcactcctctagtcaatcagagacacaatctatgatccaatcacatagaagtcttccatcccagtacctgccgaggacacaacctcttcctgctcctcaaccaccgtctcctgttattcaacaaccgccttttgctcctcaaaatgacaaagaggaagatgacgaagaaacagatgatgacgacaacgacataccaatccaagaagatgatgaagaagaagaaaatccagaccaagactaccaagagctgttagattgtttgcttaatcttcaaggccgccaacatttactttttctgtccaaggttcctatcccaggcgttgaaactctctggtaatttcgctctctctcattctctcgctctccttttcttcctattgttgatgtgtttagagcactgctagagattgatttgtgatttatgattgtgattgtgctagagtttagagcactctctagttacactagttcttgtgattttttattgtgattgtgcaagagtttagatcactctctagttcctttagttcttgtatttgtgattgagcacagctagagatggatctttttcttgtatttgtgattgagcactgctatagtttgtctttatagagactagttctctatttttaatataggtttaacatgcataaatataaactacctcgggcgattgctgaagtatttaggaggaaatttgatggtccatacttcaattggaaggttactatttttagcatccaagagagatatttcaggagtttcgcggtaacaatttcacttttatctttcaaattcttattgttactcatttactaattatccgtgctaacttatctctttaatttgtaccatgtagaggatgttctatttggatcatgggcttactgaggctgttagagaggggttcaaaatgttagcccaaaagcgtatgaagggcattgttagtgaagttaagaggagtggtgtacaacctctttggattcgtggtaaactttgggatctgatgtgggttcattggaacaccagtcgtgtagtggtgaggagtgaaagtgcttcacaatgaagaaaatccaattgtggcgatcttggtctctacagatatgcatccgacagaaatcgtttgtgcaagtttacgaagaattggtaacattcctctgatttttatccaaacaattcactattcttatatattaattacatgattttaatgtgtttcaatttcattgtaggaggacatatatgggcgccctgtataaattggggaagtgtttatgaaaacacatactcgggaagtgtttatgaaaacacatactcgaagcggacctgatcatgtcaaaccactcgaccccctggtcgagtagacgcttcacgacctcaatagaccactcgaccccctggtcgagtagaagacttcactacttcacttcaccactcgaccgcctggccgagtaccaccatgagagtcactcgatcacttcactcgaccacctggtcgagtatcatcacctccaccacttgaccatccctcgatcacgccactctaccacaaagtcgagtatcaccatcaccatcactcgactacatactcgattgccagcttcagagtcttctccattccgcactcaaccagacactcgagcacaaggaagaaaagaagactccagcttatcactcgaccgctcactcgaccacctgggtcgagtaccgttcttaatccgtcccactactgcgtcgttttgagtgttagggttttggaatatttcgctataagtagcatgtattttacattttcgtttatctaagttttattccgcagacactttgttcttcacattttgtaatccggatttcttttaatctattcagtattcaacattttgcttttgatttcgtttacttttgttcatcctgttatcatcatgctattactttgttgttatcatgttttcattctattcaacgtttatgttctctacaatgatgtctgagtagtgaataggtttctgaggatgggttagagtagtttaggattctcggtatgctaggtggttgagtttgatatataaatcccttctggattagtttttcttaatgcctattgctttctgatcaactggaatttgagcccagacatttccgcgcccaaaaggtgttcgatgaaatttctgaaccactaattccagagattcgtggctctgtaccaaggtattggttgcacagagcgttttggctttaacttgttgattcgtaatgcatgttaggttagctctcgtcaatggtgatggagtctgggactggtttaacttgagggtctctgttgcggtggcacttagatttggttaccgaacttgttatctagggataatttattgagcatgttaatcacctgtaaactgaagaaacgaaactactcaattaccccatccttgggaattctttatctgattgatttttttgtttactctactgttgtttactacgtcttgttacatgttgcttagtttctgcaaatctttcctgttactcgacctgatactcgaccacccagttgtctggcaacagactgtgcagtcgagtatctttgtttcatttactgcctgttactcgaccagtcactcgacctcacccagttctctgcaaagagctttgttggtagagtgttttattgtttctgcttgaatttctgttttctgcatgttcacttaggactcctagaacacgtcaaaacctgttattgcttggcttgacttagtgacttctgatcacatcttgattgttagcatcacacccatttggattgacaaactaaaatactacaacgacatgattggtgtttaaggataattgactaaaacctattatccatttggcgcctttgccaattgggtgtttgtttgttacatttaagatttcagacttgcttagatcaagttctttttcaattttcattttagttactaactatttttttttttttttgttgtcttgttgctccaggtacacctctgctgtatgtaaactcgatcaacaggcaatcagaacctccttttcgataacatcgaccgcatcgctcgcaaactcagataaaggagaaacacagtcaaccttttaccccagcaactactcgaaatggctgacaaacagaatcaacagaatggtcctgccaacatcggtgctggagatgcaccaagggaccatcgtcagaggaaaggaattgcacctcctgctatcaagaacaacaacttcgagattaagagtggtctcatctcgatgattcatgggaacaaattccatggtctgccaatggaggatccactcgaccaccttgatgaattcgataggctctgcaacctaacaaaaatcaatggtgtcagtgaagacggattcaagctccggttgtttccattctccttgggcgacaaagcacacatctaggagaagaatctgccacatgactcaatcaccacctgggatgattgcaagaatgcttttctagcaaagttcttctcaatgccaaaactgcaagactcggaaatgagatctctggcttttcatagatgactggtgaaagcttctgtgaagcatgggagcatttcaatggttacaccaaccaatgtgatatggttcaaattagctagaactactctctcaaataagagattaattgcagttatttaagatcgaatcacggagttcttttgtttaaacaatgagttaaatgtcgagattaagctagtagggtgtaagtgaaatagtaagtaaacaaagcaagaaaacagcaatattgattgtgttgtgaacgtttaggaaaagagctaggaacagggtattctcaggaaactattggttagtagatctaatgaaagctaggttgttatcaaaccattcttaaactcaaactctaattatggaataaccggtaggcgtgccgcgaaactctctatacctatagctaataataaccggagaagccgagaaactatcaacctaaatatgcattcttaacgagttcaattgttcatcttagtagataggccgattcttattacacacctataaaccagactcatcaaataatagatccaactacagatacctatggcgggcatatctattgtctagattcaagatctagttaattactctagatctagcattaaacataatttttttttttttttggcaaacattaaacataattaaagatgaagaattctatagataacctagcaaagtggacaatctactaaaccatatgaatccctaatgagaaaccctattcctaacaagcagattactcagacatattgaatgaagcaaacaacatattcgagtgtgaaagcataaacacagtaagtagagaaggggaaagaagggatctcttcactgtattaagatctgaataaaactctgaaaaacaatcgatgaatagcttatgtctcttagtaacagggatttgcaaaagcttgataaaagacttgataaaagaaacttaggtctaaaaacaatatataaaaccctaaaaacgtccagggactaataatacaaataaggaagtcttctgaggcaaatttcctcttatgtaaacttgaaagcgtcatggacttctgccgggccgaaactggtgtcgatcgacaccaagagtgtgtcgatcgacactcctcgctgattcctgaaccaaaatcgtccttagcttcctttttcttagcttttgctccaaaatgtctctttatctccattgttgtcccattgcatagaatacctgaaaagacactaaaaagactcgagaaataacataaagactcaaaatcctatacctaaaacatagataaaatcagtgaaaattgggttatatcacaataccctcatcatggcttcaagaaagcctctctgctcagcactctttacagaggagttctaccacgcatcagaatgcttctggataccgccagcaatgggaatttccagaacaaggatgttgaagaaggccgggaattggttgagaaccttgctcaatcagatggtaattacaacgaggactgcaataggaccatcagaggcacagctgattccgatgacaaacataggaaggagatcaaagcactgaatgacaagctggacataattctacttagccagcagaagcatgtgcacttccttcttgatgacgagcagtatcaagtccaagatggggagggtaaccagttagaagaagttagctacatcaacaacaaccagagtggctacaaagggtataacaacttcaagaccaacaaccccaacctctcctaccgcagcaccaacattgctaatccacaagaccaagtgtatcctccacagcaacaacaaggtcagaacaaaccctttgttccctacaaccaaggttttgttccccagcagcaatttcaagggaacttcagccgcaaccaccacctgtgtttgcacctcagcaaaaccaaggtcttgctgctcctgatcttgacatgaaacaaatgctacaacagttgcttcacgggaaagcatctggctccatggagatagctaagaaaatatctgagttacacaataagttggacagtagctacaatgatctaaatgtcaaggtggaaacactgaataccaaagtccgatacttagagggacattgcatcttcttcagctccaaaacagataagccaacttccaggcaaagcaattcaaaatccaaaagaatatgctcacttccaacttgagaggaaccaaagacagtcactgaggacagtgaagatcaagatggggaggatttcagtctcggtaaagatcgagctgacaaaccactcgagcagccacttgaccagacactcgagcaaccactcgagcagccactcgaccacgttactcgaccaaatactcaaccaaccttcctagcaacatcaccaactgctccaaaaccagttgttgtcaagaacatagaaaaggtctttgttcctcctccttacaaaccacaacttccatttcctggctgtcacaagaaagccttggcagataagtatagagctatgtttgccaagaacatcaaggaggttgagttgcggatacctcttgttgacgctctagcgctaatcccgaactctcacaagtttctgaaagatttgatcgtagagagaattcaagaagtgcaagggatggtagtattgagtcattaatgcagtgctatcatacaaaagaagatcattcctaagaagcttagtgatcctggttcattcactctaccatgctctttaggtccattgcctttcaacagatgtctatgtgatttaggagcattagtcagtctcatgccgctctctgttgccaaaagattagggttcactcaatacatatcctgcaatatatcccttatcctagcagacaggtcagtaaggatccctcatggtttactcggaaacctaccaatcaggattagagccatagagataccaactgactttgtagtcttgaagatggatgaagagcccaaggaccctttgattctggggaggcctttcttagcaactgcagaagctatgattgatgtcaagaaagggaagattgatctaaaccttggcaaagactttaagatgacctttgacgtcaaagacgcgatgaagaagcctactatggaagggcaactcttttggatcgaagaaatggatcagttagctgatgagttactggaagagcttgcagaagaagatcaccttaacagtgctttaaccaaaagtggtgaagatgagtttctgcatttggaaactttgggataccagaagctgtactcccataaagcaatggaagaattacaaccttctgaggaattgaatggaccaccaacataggtaatggtaatgagcgaagaagggtcaacacgagttcaacctgcacactcgagaacatactcgaccaatgactcgacctcgactgtcagcgactctggagagctgatcattccaacttaagatgactggtctgaactcaaggcaccgaaggttgatctcaaaccacttcctaaaggtctaaggtacgcattccttggtccaaactctacttaccttgtgatcattaatgctgagttaaatgatgatgaagtgaacctgctattatctgaacttaaaaagtataggagaacaattggctattcattatctaacattaagggaatttcacctagtttatgcaaccataggatccaccttgaaaacgaatcctattttagcattgaaccacagaggaggttaaatcccaacttgaaagaagtagtgaaaaaagaaattttgaaactgtttgatgttggtgtcatctaccctatatctgatagtacttgggttcttccagttcattgcgtccctaaaaagggtagaatgactgttgttaaaaatgaaaaggatgaattgatccctactagaactataactggtaatagaatgtatattgattatagaaagctaaatgctgcatctaggaaaaatcattttcctttaccattcattgatcaaatgcttgaacggttagctaatcacccatactattgctttcttgatggatatagtggtttcttttaaataccgattcaccctaatgatcaagagaaaactactttcacatgttcttatggaacttttgcttataagagaatgccatttggtttatgcaatgctcctgcaacatttcagaggtgtatgacctctatattttaagatttaatcgaggagatggtggaggtcttcatggacgatttttcggtctatggcccctctttctcctcttgtttgttgaatcttggcagggtattgaccaggtgcgaagagacgaatcttgttctcaattgggaaaagtgtcatttcatggtgaaggaaggcataatgttgggccacaagatatcagagaagggtatagaggttgacaaaggaaaaattgaagtgatgatgcagttgcagccaccaaaaacggtgaaggacatcagaagtttccttggtaatgctgggttctgcaagggggcttttggtggccaataatgtataaggacgctcagaagttcgtttcaaaatgtgattcatggcagagaaagggaaacatcagcaaaagaaatgagatgcctcaaaacccactcttggaagtggagatctttgacgtatgggaattgattttatgggtccattcccatcttcatacggtaacaagtatatactggtcgtcgtagctattgctagtcctaccaacaatgcaaaagttgtgctgaagctgttcaagaccataatcttctggagatttggagttcctagggtagtaatcagtgatggtaggaagcatttcatcaacaaagtctttgagaacctcctgaagaagcatggagtaaagcacaaagtcgccaccccttatcatccacagacaagcgggcaggttgagatctctaacagggagataaaaacaattctggaaaaaactgttggaattacaaggaaagactggtctgcaaagcttgatgatgcactgtgggcttacaggacaactttcaagacacccattggtacaactccttttaatctcctctatggagaatcatgtcacctacctgttgagctcgagtacaaagctatatgggcggtaaaactcctgaactttgacataaaaaccgctgaggaaaagcggttgatccaactcagtgaccttgatgaaatccgtttagaagcttatgagggctctaaaatctacaaggagagaattaagcttttccatgacaagaagatcatcactaaggattttcaggtctttccaggaaagcttaaatccagatggtctggccccttctttgtcattgaggtccgtccttatggagcagtcactctacctggtaagagtggagatttcacagtaaacggttaaaggctcaagaagtacttagcagatcaaatccttccagaggtgacgtcggttcacctcaaggaacttcttgatgattaaaggagtaaaggagtcaagctattgactttaaacaaactcacttggggggaaattctatgactatctctgtaaataaacttttattttcttgttatttttgatttgttttagttgtgtttttggttttcaggaacaaaggaacgatgtggagatagagtaaaaattcaaaacttttactctacagaagaccaggaaatcgagtgtatagcatggtggagtgcaaaattttgaaatttttttgttgcatctggagaccctgaattcgagtacataagtcgagtatatgtgatgtttaaaacccaaaaaaatttaaatcatcattatactcgaccaacaggagctacaaagacttgcagggattttgtcaagtttacagtagatttccttctgttttcccagtcaacagagtgtggaccacacgctgaagataagatggagagagaatctcaaactcaatttccaccactccttttgaaattttactcgaccaacctctattcaattttccatcactcgaccgcaagaaacaattctctgaaacctaagccgcactcgacctcgctgaaaccaatcgaccgtcgttggagagaattactcagccgccgcagtcgagttccaagtttcactcgaccaccggttttgtttcaccgtgaatcactcgactgctacgccaccgacactccaatttttctacttcaccacaaatcgccgcctctcactcgaccacttcacttcaccgtcaaagtctcgggaactactcggtaacaactacagtactcgaccgtcgacttgtggtttcgtccttgccaattccggctcaccgaagaagtactcgacctctggagccaaccactcgaccgacccttcacgtttcaagattccaggcttcaattccggttcactgaggtatcactcgatcgctggtgctaggaaatcagcagatccactcgacttcagaaaagttactcaaccgcggtctctactctactcgatccaattcgtgtaagaggaactcgagaacagctcagtttactcgagtactagattgtactcgaccaatttggtcaatttcattgcctgttgataacaattttggtttcattgttatctttgagactaacctattgacatttgagttttgagttctaaatcttcttgcaggagaatcatgagtaattacagtggcagttcttcggttgatcctgactataacatggatgagacagaacgagaacagagagaatacgatagcttcagaagaaaagctgagatagctcgagggaagagagcaatgacagggaggtatgagcttatagatgtggatctagaagacgagtacatgcctgagcatactcgcaaagccaccaaacttctgcacaaacctaatgtattgcctgctgaggagtatatcaggctcttcaaactgaatgagttctgtagcacagggtatccatgctcgaccacacttgctcaatttggattgttggaggatgttcagcacctgtaccagagttgtcatctggacactctgatggcttatccctatgtagcatatgaagaagaaacgattcagttcctctccacactacaagtggagctttaccaaggtatgacctctgatgatttggaatgcgaaggattgggattcttgagattctctgtgtatggtcatgagtataggtaatcaatcaagcgcttcgaaggattgtttggtttccccaatggaacgggtactaagcccaagtatgatagagaagagttgaaagacttatggatcacaattggcagctctgtaccgctgaattcttctaggccaaagagcaatatgatacgcagccctgtcatcaggtacttccagcgttctacagccaatgtcctctactcccgagagatcacagggactgttaccaattctgatatggaaatgatcgctatggctctcaaaggcactctccgccaaactaagaacaaaatgtctctccaaggtgaaatcaatgacacacctctctctgtacttcttctgatccacctgtgtggatacaagagctgggctgtcaacaataaccataagagaatacgaggcgctctttgtattggcggtgttgtgacaccgattctgatcgcttgtggagtcccaatcacatctgatggactcgagccacgggcaatggatatcgagcatctacgtcactgcgaattcgtggagttcgcaatggttggcgacatgcaccgtttcaggtttgagcactctacggataagagagctagcatccttctccccagcccagaggttacacgcataatagagggagataacattgattttaggcctgagcttggaaacctctactatgagaacgctccgccattggatgaggatgatcttatagaagaagctgctgaggatgggatggatgaagacagagcagtggagtttgacactagcatgtatcattttagtgaacatgtacctccagcgagggagagcaagagcttgagtgaagctcataggaacaatagcaagctgcagaagtggtgcaagaagcaggacaagctactcgccaagtgcctcaagactatcaagtttctgacggatacgctgagctgttcctcttacactacaaatgttccacagggacaacctcctctagagatgccatcgaggagatttgatgagcctgagccaagtcagcacaggcctgagcctagtgagcagagagtctcacatgtccctgctagacattcatcattcgagtctcgggagcacaagagaagaaggaaggctacactcgttcgctctagcagcagatcacgccttattcactcgaggagatcactcgaccacggtgctggtcgcagcagaagaagagaggtcgagtatcctcagagcggtgttggccgccatagagctgatgaggtcgagtacccacatgctggagctgatacagaacagggcgggtcgtctatggcctgggagcaatcacaggcagccattgacgaccaactccgttcattctttgagtgaggtaagcgcctcacttcaccattgtattatatcatctcttgtgatttgttctttattttgtttctgtgattggatttgtcctaagtactctcttccaagtttagtcacacagtggattgtgtgttttaagtttgggggagggctcaggaagtgtgtgttgcattgtttatactcttgagtctgcattcatcaaggcataggaaaaaaaaaaaaattgaaaaattcaagaaaatgatttcacaaaaatagagtgttcatgtagttgcatttcatttaggatcgagtctagagtgtttcatttaggattgttgcatatgcataggggataatgatgagatagccttgtaagcattttggttcaccggataaactcagtgccctcgttgctagttgtctgttgcgtagtcaatgaaattgaagtaaaactgaaccatgcctagattgctctactcgaccacactgtcatgatctgataccattccctatcaatttgaacctgaatttgatctttaattatcttgtctgcatcaaatttgaactcatggataccctaaaatacctggattttcttattcattttgatcactcttgttaatccaagtagctgactctccttattaaagcagttaacccgaactcaaacctagactttctttcaagccctatatcacttgtgagtgtttgtgaggtcttattccgattaagcttggtagaaagtgttaggttcgtaacgatagagatagtgtctcatggagttctagttcgcatttttcggactagataggactaggtgggcgcttatactttgggttgggatgtgtcttaaagaaaaaaaaaaaaaagggttgattcattgatgagaaagggtaaaagactctaggtgaagtaagctaaagaagcaaaaaagtctagtaaaggttttgagatatgtaaagaaaagaaagagagagttcttgttagcaattgaagatgggcaaaagccctcggctttaaaattttaaaaaataggaaccttagttgtcaaagaaatccaaatccgctagatgtatcaaagtgttgagaaagcttctcctaagagttaagagagaagaaaagaatgattagaaaaagggcttaaaggattcatgaatgcaaagggtagagttaagttcttatactgggattggagatgggattaccattagagcttcatttgatatactctgggtagatgggatcttatctctgtatgcatagcttgggacttacctttagcattctactaaagctcaatcattttttgagagatcccctgttgctgaagcctattctataagggaccatctttgtctcttggcctttaccttagccaaatgagttcattgatgatacattgcttgattcacgttcgagaactaatgaatgttaaagggattggtagatttgaaaacattatgtaggtcgagcaaatgagtcggattgattgataacaaggcttggctaacctttttgagtagaattcgatcatatcgtaacttagaactatcaacttggacattgatttcatctgatatacctgctttggctctgagtccccgccttcaaacctcacctccagcttgttcttaattgtttgcttagggcaaacaaagactaagttttggggagttgataagtgtgcattttgcctgttttgagcatccatttgtcatcactttagcatcatatcatcactgttttatatcatttgtcatcatttgtcatcactttgcatgtttaggatagttttgcatgcatgttgcatatttgtgttgttttcaggtgatttggagctgttgacgagctaattcaaaaaagcggacctgatcatgtcaaaccactcgaccccctggtcgagtagacgcttcacgacctcaaccgaccactcgacccccctggtcgagtagaagacttgaccactcgaccacctggccgagtatgatgtgatcatggaaagcacaaaggacttggaatttgatcaagagcttgtagccgcgaaagagcttgaagcagaggagcagcttgaacctgaggagcattttgaagcagaaaatgaacttataacggagaaagagtatgggaaagatgttatcttaacctcattggttttgatacatgatcatcaaatgggcatgtgtctcatttgtactctttttcccttgtcaagttttgtcccaatgggttttcttgacaaggtttttaatgaggcaaatgattcacattcaaatcacccatttgatgatccaaaccatggtataactttcagaagttggcctcaaggaatatatatcaagtccaagtcattttatgcccattacaagcccaagaagagcccaaaccaagtggttaatttgatggtcaagaggagtgacgaaaatggaagtttaagggtcatctttaaagtgaaagagttttttctattcaaattctatctttaatattatgttgtgtttctaagcagccttggagtatgttccaagacttgtctctttctcttcttttcttcttctctttataaactcatgtaatctcttatgagaacccatctatctttttatcaaaactctctcttaaaatagatcatggatccattttcgtatgtcaaattttgatctttctcgacttatcaaaaggcttttccgcatccttttgtggcgtcattcaatccatcatctcgtctttgagtcgtgtgtcgtctctattttgagatatccactccagatcttccaagtgccgaaattgggattgattcctcaccagcatcatatcatgtggtataagagcacacttggaggttgagtcgtttctgtctgtcatcttgttttaattttcataattatttggcgtgtgctacgttacggctgatttgtaaaaggttgcctgagttatacgataacccagacaacggtatgactgagttaaggaatgttgtctgagttataagaatttatagcctaacccagacaacgttatgtcaaagttatgagaaaacggctggcttattccctcgacacagctgagttatatttttggacggtttagttatgggatgatgtgacggctgaattatgatcgagtgttataaatcagccgtaaaggggaagattactaaataacttagccttgttacggcagacttatgtgcaaaaaaattaattactataatagcatgcagttacggacgagttttttaaacgttacggctgagttagttgagttacgacattacacagctaacttaactttgttttttttgcttttttaattacggttaaagtattcatgttgcgactgacttatagatttgcttgatggctgagttatcaaatgttcgtttggtggcttacttgccacctcatcaattcaaaacgacgtcggctgtaatattccatgtcagcatcatcaatggaaatacgaaacgtcccttgcttctttatctcgtctttccggtctgtgtttaacgcctgagcgttggaacatcaccgaaacttctatctaatcatctttttcttcgttcatcttcaatttctttcatctttctctcgatatggctgatcccgtttcggtcatagttgtttccggtatttgggttaagaaatagatattcgtatttaaccacgacgaaagagggtgtagagttgtgcagctagaagcggaaacaacgcacgataggcttttgaagctggtggtcgatgattacggatttaatcagtcgacccatcagttaaggctaagttacatgttctccaacaagactcagaaaaatatgtcgttcgatacttcatcagtgtatatctctaatgatcgacagttgcaatgttatctaggtctctgtgtggagtttacagcgaaagagtcaagggatataagtcggaaggatggatcttgaggaaggatgaaacggcctattgaatctgactcaagagtagaatctagattcgaagtttcgggtaggccaacgatacagtagcaaattcgagttggagtatcgactcaaactttttgcgataagggatggatttgattttgatgtaccaatatctaatactactacagtgaattaccagtgctgggttgatggatgtcgttggagtgttcgtgcatctagacaaggggatgagccttatttttatgttcgtatatacgattcggaacacacatgttctgtgacgaaacgttctgatcgatcccaacaagcaacacttgatgttcttggagttctttacagggactatcttggtgacattggtccggatgtaaaaccaaaaacagtcaaaataatcatcaataagcattttcgagtaaaggtaattacaatgtttcgactgacttattattatatggctgacttatagatatattacgggttacttatggatatattatggctgacatataattacactccggttgatttatgacccttttacagctgccttaacatcactttgtggctaagttgtgttatagtttgcctaagttgtacatatattatggctgacttataaattaatatgtttgtgttaacagatgggttattggaagtcatacaagacattgagggtttacaagggagctcactctaggaacccttgatagtagttttgaagaactgccttcttacctatacatgataagacagacaaatctgagtacaatcgcacgtcttcaaattgatgagagtggaagattcaactatatgttcattgcttttgttgccagtatcgctgggtttcatttcatgcgcaaagttgttgttgtcgacggtacgtttctccatggtagttacaaagggacgctcctaagagccctagctcaggatggtaattttcagatttttctgttagcttttggtgtagttgacactgaaaatgatgaatcttggcggttgtttttacgcaactcaaagttgttattcctgacgcaacggacctggcgataatctcggacagacataagtcagtagggaaagcaattggtgaagtgtatttgttggcttctcgtgggatttgcacttaccatttgtataagaacattttggtaaaattcaaagaaaaacatatgttccctctcgtggaaaaagcggcaaggtattttaggcggactgattttgatgacgcgttcaacgagattcaagagcgtgatcctcaactacatgcatacctccaaagagcgggtgttcaaatgtgggcgtgtgttcattttcccggtgatagatacaatttaatgactacgaatatagcggaatcaatgaacacaacaccgtcaaaagccataaatcttcccatagttcaaccgttagaagcgataagatagatgatgacaagatggtttgctgaacggagagatgatgcgagcacggagcaaactcacctcccacatggtattgagaaactgttacaggtaactcagctgtaactatgtgtataactcagtcctcaaataatgataaacaagacataataagaataactcagccataacgtctttgtttttttttccttctgtctaataagcatgtgtcaagacttatggatgtacaaacgattgatgcttttcgcgtacaagtaacttatggaacatctttgcatgttgtaaatgtggatgcaaaaagaagcgcatgccgtcttttcgagaaagagaaattaccatgcatccatgcaatcacagctgcaaagcatatgtgtgtgtctcgtatatccctgtacagtccttactataagagcagttatttggtcaatgcgtacgttggtgcaatcatgccttcagatacggaagtccctgttcctcaaattgtaattgaccaaccgtgcttacctccgattgttgttaaccaacagggcagacccaagaaactaaggatgaaatcagcactagaagtagccattgagaataaacgccctaggaaggaacacgcatgttctcgatgtaaagaagttgggcacaatgttaaaacttgtcgtgcatagtattgtttgcacgaattgtatgtttcttctttcccttgtttggtaaatgttatatgtatttcgtgtcaattgtagactctaagcaccataatatttgcaatttctttaacgtcccggctgatttatttttgataatgtcttgtcgttttaaatgttggggttgagttagttaaatatggaagactaaaggttgggccattttatatgttgcggctgagttatctaaataaggaaattgaaaggttcagttattttacatgttacggctgagttatctaactaggaaagtcaaaaggttcagtcattttacttgttacggctgagttatctaaatagggaagtcgaaaggttaggtcattttacttgttacggctgagtcatctaaatagggaagtcgaaaggatcggtcatttcatatgccgttttacgactgagttatgcggttttacggttgagttatatttgaattatgttattttacgactaagctatggaggtaggacaatggctgagttatctgaattatgttacttggcggctgagtgattctactatttagctgaggtatattacagatcaaatatgaacattttgaaggctaagacaatatgaaacttcccataaatatatgtttgaaggatacataggaggaaattaaaactaaacaatatgaaacttcaagcagcatgacccgattccttccatcttgcattagtcgacggccatttttatctctaccacttcttcaatattgtgtttggtagtcacatctgatatggtcgaacgattgaaaatcgtcacgtgttgggggccagtatgatacctaacgatcctccaccaagtgagtgcaataacaatattgtcattgcgaaaagatcgaaacctactatcgaagtcaaccgccatttggccaacaacctcacatttccatgtcaccttgctgaaacagaatagagcattgttacaattatacccctctcaaggaaaatacatgatgaaaagaaagaaatttaaaaggaagtgatcgaaagaaattgtactatttgtccataatcttgaagggaagtatgaatccgtttatctcgacaccgttgtgtgagatatttctcatacatccgatatcgacgtgcaccaactaaatcttggagtatgaaataaaagttaaaaacatgcatgtcaaaggtgaaagtatgaaatctgcattccatacgtattacttaccgaccaaagtatttgtaggaatgattttttcaataatgttgtcaaaaggtgtgaatctgttaagtaaaacagttttccttgggtcggacattatgaccaattgcttccatgaactcaatcatgtagtggtgagttgttgctcggattagtccaccgtttgcaatgacacgaaaagttgagattgatttccattgattctctttgagcatatcacagtaacattgtgaaaaacgtcttccgattataggctcaatttgtattccctatgaaaacaacatcggagggtaagttatatagggaataagataggaataaggttaagtatgacttgtaagaagagtgaagattccattaattacccattcatcaacaaagacgacctgtagttcgaatgtgttatctctgtataactttatgtacgttctaagaaccataacacaaattgtccatccagttatgaaaggagacaagtcgcaaaaaccgtggaaatacaccatgttgaaatttagagtcgtagaaaagtgaagaaatattttgattgtgatattctgtttgtgagagtttagccttcgggagtttaaaggagcagctgtttttataggcgtataaaaacgttgttaattgggctggatataaccgtaaatcggttagttagcaaatcgaatgtaaccagcagctttataactattgacaactcagccgtaatgtggattaactcagccgtaatagctcattttcctgcaaaactcagccgtaaccatttaaaatttcccgccaaacagtcatagacgcaacctttcgtattcatttctctatttttttttgtataattctacataactcagcaatattgttacatgttacacctaagttatctaaatagggaagtcaaaaggttctgtcattttatatgtggtttacggctgagttatttggtttaacggctgagttatctaaacagggaagttgaaaggttttatagcattataactattgacaactcagctgtaatgcctggtaactcagccataacaatatattttaccgccaaactcagtcgtaacatagaaaactttcccaccacacggtcagaaaactcagccgtttcattgttacatttcctgccaaactcaactgtaacctagaaaactttcccaccaagcggttacggacgcaacctttcacattcttttttttcttatatatatgttacttcatctcatcatttaggcgtctcatactctcttcctaacgacatggtcgttgttcctcacattgacagacagtttctcaaggatgttgaagccgtattcaccgctcgtgctcgcgtgaatctcccagttccaaaccctggcttgggtacatgggttgacagaaccacggatacgtggttcagattcaatcaccaactatctgtcgcgattgcagatatacttcagcgcaactttcactatgcgtggctgacgtaccagatgattctcgttgtttttaaggcaagatggtttttctcctcacggtaagcatcgagtttgttatttaaagcacttctagtaaaccatataccaaaaaattcatactatttgctctctttgtagcgtaaatacatgtgggattcaaggcacactctaacggtgtggacgcagtttaatttggtggctagaacgttgtaccgagacgacaacagtttggaatgatttggttgacatgtttaatgaatttggcccagatgatgtcggtttcatgtcttgagtgcttttgtatctcttacttgtcttcccttttaaacttaacaactatgtttttatatctccttttttggtaatggttttaaatctcctattatctacgattgtcttttcactataatcagttgttatcgcttgatgtcacttgttaaattttatcataatttaggcgtaactcaaacataactcagccatatcaattgattaactcattcgtatcaatagattaactcagacacaacattataataactcaatcatagcgttgaattaactcagccacaacattacccgtataactcagtcatagcgttgaattaactcaacaacaatattaacttaactcagcaataacattatattaactcagccataacattagattaacatggccgaacacacaataccatttcattacaagccaatactaaaaataaaatgaattaaccttagaagcaagataaacatcaaacacataatggaatccaacagcaaacacatcatccaaacatcaaacaaactattagccaagaagaagcctttgttcgttggtttttcggaacattaggataccaagtacaatgacattgataataaagccaagacaaaaacagcaaagtttgatcatcaattgccatttctggttttccctttcgctcctcattacttcttccttcagttctttcaccatcccctgtaatgcttctagctcgactgcaaccggacttggcagcgtttatctcactgtccatggtggacaattttggccaactgtctacaaccacttcgtatgtaccatcttcgacccatttaaacaaatggtcctgcattttcaatcactaaccagttaacaacgaaaccaataaaacccaaaatcaattatacttacatctttacgcgtatgacaacggaagtatggtcttccagggttctttgctgacgtcgatgtatagatgaccacgtctaatccatgatgacactttgatggtaacccacgtccccaacggcttacggattgcgtactcgaaatcgagttctcagaattgctactcatttctttagctatagcttgggagttcagagaagaaaaataagaaagaatgaagctccagatctgaaaccagaaattggatttttctaacttaggttttgattttggagatttataagtggggatctttcgtttatgtcacaatgacgtcttatgtggtcactaatggagactctttcacaaccgacgtcgtatctggtcaataacagagactctttttctctgtattttgacataactcagtcgtgacgcaggcataactaagcaatgtgactgttataactcggccaaaccctaaaattgctttccttaagccatcagttggtacaatcaagtaattaacatatcatattcactttccaactagtagaatcatgaaactagctcatattctgtatactttatccgacatcatactttatccaacatcatacccaacaacatcattcctagaagtttggtcaacataatttgtcaatagacccttagtgcaaacccaatttattttctgttttgatattatagatcttgacactaatagaaccaacaatttggtggctagtttgaaatctcataataacatttggtttctcataactcgatcaaaccacgaaatcttcttgcattactcagccgtgacgtattggtattccaccgccaaacagaaaatttgaatatttgagggttcagttattcgaactcgtttgaattattttgaatattaactgttggcttgtgttcgtgtgaatatggaaccaatcattattggcggttccccataaaaacactttttgtaatctcgataatgataaaataatggtttatgaacccattgagatgactcaagaatttcgctatttcgattttgctagtctttggaacagcgtagcgacggataattcagaatcagaataggtccaccagttcaaacatacaatattaatgtgttgttactcagccgcaaagcttttataacttagccacttctaaatttattcaccaatatttgattagtgctttttagcatacacgactatatagattaagtgctttagagtgccctattaattgaagacaagatgatggtgcagggatctgtatgtttattcctagagaaattatatctcttatttaggaataaactcagcctaaacaacacgtaatattctattctatatgagtaagggacattagtaaaaccaacaataatgcgagtatacaaatgggcctattaataacatttggttttctcataactcggtcgagcaacgaaatcttctaacataactcagtcgtgacgtaggcatagctaagccatatgactgttataactcggccgaaccctaaaagtgctttccttaagccatcagttggtacaatcaagtaattaacatatcataatcactttccaactagtggaatcatgaaactagctcatattctatatactttatccaacatcatacccatacattgttaagctctacctaacttccgttcctagaagtttggtcaacatagtttgtcaatcgactcttagtgcaaacccaatttattttctgttctaatataatagaccttgacactaatagagcaaccaatttggttgctagtttgaaatctcataataacatttggtttctcataactcggtcaaaccacgaaatcttcaggcatatttcagccgcgacgtattgttattgtaccgccaaacagaaaatttgaatatttgagggtttagttattcgaattaatttgaactcgtttgaattattttaaatattaactgttggcttgtgttcgtgtgaatatggacccaatcattattggcagttccccataaaaatactttttataatctcgataatgatataataatgcaatctcgataaactcagcctaaacaacacgttaattctattctatttgagtaagggacatcaatagaaccaacaataatgttagtatacaaatgggcctattaataacatttggttttctcataactcggtcgaacaagaaatcttcttacataactcagtcgtgacgcatgcataactaagcaatgtgactgttataactcggcaaaccctaaaagtgcttttcttaagccatcaggttgtacaatcaagtaattaacatatcatattaacttttcaactagtagaatcatgaaattagctcatattctatatactttatccaacatcatactttatccaacatcatacccaacaacatcattcctagaagtttgatcaacatagtttgtcaatcgacccttagtgaaaacccaatttattttctgttctgatataatagaccttgacactaatagagcaaccaatttggttgctagtttgaaatctcataataacatttggtttctcataactcggtcaaaccacgaaatcttcaggcatatttcagccgcgacgtattgttattgtaccgccaaacagaaaatttgaatatttgagggtttagttattcgaattaatttgaactcgtttgaattattttaaatattaactgttggcttgtgttcgtgtgaatatggactcaatcattattggcagttccccataaaaatactttttataatctcgataatgatataataatgcaatctcgataaactcagcctaaacaacacgttaattctattctatttgagtaagggacatcaatagaaccaacaataatgttagtatacaaatgggcctattaataacatttggttttctcataactcggtcgaacaagaaatcttcttacataactcagtcgtgacgcatgcataactaagcaatgtgactgttataactcggccaaaccctaaaagtgcttttcttaagccatcaggttgtacaatcaagtaattaacatatcatattaacttttcaactagtagaatcatgaaattacctcatattctatatactttatccaacatcatactttatccaacatcatacccaacaacatcattcctagaagtttgatcaacatagtttgtcaatcgacccttagtgaaaacccaatttattttctgttttgatattatagatcttgacactaataaaccaacaatttggtggctagtttgaaatctcataataacatttggtttctcataactcgatcaaaccacgaaatcttctggcataactcagtcgtgacatattggtattccactatcaaacataaaatttgaatatttgagggtttagttatacaaatcaattcgaactcgtttgaattatttttaatattaattgttggcgtgttcatgtgaatatggacccagtcattattggcggttccccataaaaacactttttgtaattttgataatgatataataaagaatattatttcgtatggaaataaggatgacaatgaggtacggcgaaatcaggaggcgcgataagggcgttctgatcgagtgtgattgcaatgctaaagttgtcgttgccacttctcgtgatcctgttacaagcggaaaactgtatttcagttgtccgtatgaaatatcagttgtaagcatcttttttgagttatgattctttattttatttcttttatttttgtatccctatgaatcaacctcttatttttcagggtcccggtcgaggctgcggtttcaagagatggtggactgttgcattgtgtgacgagtttgacatgataaaagaggagactattgtgatgaagaaggatctggaagcagccaataagcgcgtcgaggctcaggcggaaaagatcttttttatggaaaagaaatttgaaatgttagagatgaattatgagcttgaagaagtatctgtgagcatagctaaatttgattttttcaatttggacttccttgtactgtcaatttaattaagtcagccagtcttccgatttatgcgatgataactcagccatcacgttataataactcaaccaaatatcgaattaatctacgataactcagccgttacgttacaatgattcagctatcacacacgaataactcagccatcacacacgagtaactaaactaaacatcaagttaatatacgataagtccgcctttacgttagcataactcagccatcacacacgaataactcagccaaacatcaagttaatctacgataaatccgccgtaacgttagaataactcagccatcacacacacgtaaaagagagactgattatgaatcatacacacgaataaaagataaaaaaaaaaataacataaataacatagaagtactgcaattaaataacataaaataaaatacaaataacatggagatgtaattttgttatgaccaaacaatcacatccatcgccaccttcattcttcatctgattcaaaacttgaactctcggtcgatccataccccagcttatcccaatcaatactaatcaccttgaatgcattcttctccttgtaagccttgcttacctgctcctccactttctggaactcttcctccacgttaaatccgtccttcatcctcttcattttccttaggagtttaagtttcgcttctttctcatgcagtttgagatccaataattaagtattcttcctccatctcccttatgttgcatctgatgagagagatgatgcctttgaaacgtctctccgtttcatgcagccttctgctggaaccgtcatccacacacggcctcttgttggaaccgtcatccacacacggcctcttgttggaagagtttcggaagagtttcgttgctcagagattatagagattaattggtaagaatcgagaagagaaaagacaagagagaaccagtgtatgtatagtcctctaacgaagtttgggttctttgatataagcgacgtttgggtccttgactattgagttatatttataagaaggtcaaccggtgtatgtatagtcctctagtgatgtttgggttctttgattacagcgaagtttgggtatgacaagtcagcccccacgttagactaactcagccgcaacatcgaattaatatatgataagtcagccgttatgttagaataactcagccatgacatgatctgtgcgatgacaagtcagccaccacattagaataactcagctaaacatcaaattaatctacgataactcagccataacacgaattgagcgataataagtcagtcattacatcgatttaacctataattaacaccgtgcattcaatttcatagattcatacaaacataattttggttatcaatcctaaagcttcaatatttagtaaaatcacatgctaaaaatcccaaaagacacagacattattcgaaaaagccaattacgtctctagaaaccgtgtaggggtcctttccggtgcttcatcgaagatctctgctaccatcttaacccgtagagcctggatatttgcatcagtatgacatcaaaagaaacaccaaccaataaacattcaagaatctttaatgcgtaaacgccgcagtcccctctgatagtattttgcgggaccattttcttgtccctccgccagaatgaaaattggtcgtattgcgggatacggactttggaaggaatcagttcgttcatcatctgtgtaatcatcctcgtgaacggcctacaagtgataaggttcaaatttccctaagaactactatctcaaataagcgatcaattgcagtatttaaggatcgaattcacaaagttcttttattcaaacaatgagttcaatgtcaagattaagctagcaggtgatgactgaaataataagtaaacaaagtaaaaagacagcatgttggttgtgttgtaaacgattaggaaaagagctaggaacaatgtattatcaggaaactattggttagtagatcgaatgaaagctaggtggttatcgaacaattcttaaactcaaactctaattatggaataaccggtggtgttccgcgaaactctctatatctatagctaagaaaatccggagaagcgaagattattaacttaaacattcattctaaacgagtttgattgttcaccttagtagataggccgattcttattacacacctataaaccaggctcatcaaataatagattcaactacagatacctatgatggcatatctattgtctggattaaagatctagttaattactctagatctagcattaagcataattaaagatgaagaattctacagataacctagcaaaaggggcaatctacaaaaccatatgaatcactaatgagaaaccctattcctaacagcagattattcagacatattgattgaaacaaacaacataattgagtatgaaagcataaacacagcaaatagaataagggaaagaaaggttctcttcactaaattaagaactgaatgaatctctaaaaacaatggatgaatagcttatgtctctctgtaacagggttttgcaaaaagcttgagaaaagaaattagggtctaaaacaatgtatataaaccctataaaacgtccagggactaataatgcaaatagagaaatcttctagggcaaacttccttttctgtaaactcgtgtgacgatcgacactctggctgattcctgaatctaaaatcgtccttaacttccttttccttagcttttgctccaaaatgtctccttatttccattggtgtctcattgcatagaatacctgaaaagacactaaaaagactcgagaaataacataaagactcaaaatcctatacctaaaacgtagataaaatcagtgaaattagggttatattaacaagcttccagcatttttccatcgctctcttttgtatgttctccgacgatgcaatcatagcaatcaatgtgagacctaagcaagttcacatgaagggtcacccaatgattacctccggtttggtggataagatacaagtgatccacatctgttactagaaaagtcctagtggtcatttcatcgagttgaatcaatgaactcccatccgaggccaacttaacagtttttccccttgcagcttttactctctgcagcctcatggtttcctcctcatcttcatcagactcatgcaacatgctagtatcttcagctacccactggtcagtaacattaagtatagaatcatcattagtcttgggacagcagtatcaccgtcagcttttttccttggctttctcatgtgattttggcatttttattgtcaactttggaggcacctttctaggcacctttgtaggagcctttgtagtagtctttcttcctcttttatttgtggcggctagctctttcacgattagcccttttaaggttttctccttaactttagctttcttctttggtgatgtcttcgctttggtatttctcctcgccggcgtcgtagagcgtaaacagcgggaaccaggagacttctcaatgaaatcaatatcaacattgtctccatcagtggtcttagcaaattcgtcatcaagattcctactaacctcaacctcagcaatatcaacatccttctctaccaccgaatctacaacttctttctattgcataaacgtaaagaaaactcaggcattaaataacgaaaactcaggcctatgtataaatataactcaaccgtaactaaataaaaagttatacctcagccgtataatatgaagataactcagctgtaactaaataatagttataactcagccgtataatatgaagataactcagccataactaaataaaaagtaataactcagccattagcttaccggaggacgactagtaacagattggttatttgtagatttccgtggaacttttggtgtctattgagtttggggtttagggtggccttgctcctcttgggttaaaaacatttctctaataaccactctagagtttaatgttgagtcagctatgccagtttggccaattaggcctaccccaatgaccttcagatgctctttcatctgtttgacctcattctcaatagatccaaaccttctttcaaactttgcatcaatcctctcttctacttgatctccaatcacctcccgacgggaggacatttctttgatgcttttatcaacggtgtcaaaccttgagtttaagggagatattaagttggacaccatatccacgaacgacacatctccccgaacatcatgcttgtcctcgtcctcatcagattcgacagctacttccttattattcttcttctttttcttttttgcatctcctccaccagcttgaacaccctcactgtgagagactttctgcttctttgcaggagattcagacacatccgctgctttatctttaaccggtttcttcttcttctcattcgtcttcacatcccaataacctttaacaagcttatccccatgtatgccttcgatcaagtgatcgagtgctgggtcttctacttcatctggccaagtatgaaacagctcgcttacatcatccttcataaccatttaatgcacacgcaactacaacacaagagataataaaacccatcagtatgtttaactcagccatactataactcattcgtcacagaacataactcagccatcacctaacatatttgacaaaaatagaacataactcagccattacagaacagaactcagccatcacagaacataattcagccgtcacataacatttgacaaaaaacaaaacagaactcagccatcacagaacataactcagccgttacataacatatttgacaaaaaacaaaacataactcagccatcacagatcataactcagacgtcacataacatatttgacaaaaaacagaacattaactcagtcataagagagcataactcagtcgtaacacaaatatttgataaaaaacagaacataactcagccataacagaacataactcagtcaataactatcataacagagccaaaaccttacctcaccaccatgcgttttgatatcttcagcaatggccgattctattgttgcacgggtacggttgccaccccatctaagcaacggaatctcatccgctttgactatgtttccaaatcgctcaccaatggtgatgattgaatcatacgcccaagcctgcaacacgaaagccataccactgatggtgcacgtcttgccaataggcctcaacaactttatagaaataacaagggcttcaaatgttgtccgaccccatggataagtgttcaagacttcgtcatcaaaaactcttttggcactctcaaatggtatccaagagttaggatgcatgccataaagtccaatggctagaagagtcaataacccaaacaatttacgctttccaggaggccatactctcttcctattactaagcctcgcctaagttcttcttaacttaggacctttaccggttggtacatgatataggtcaaattaatcctaagaccactctctcaaataaagaagtcagttacagcactttgggatcgaattcacaaagttctcgaatcacgcaataaactaaggttttgaattaagctaagtaaaacagtaattaaattaaagagaaacaaaagtaaacaacagcaatcgattggatggttgtgaaacaagattataaaagcgtcaaacttagggtattctcaggaaatagatgatagtagatctagaaataactaagttgttatcgaaccgttctcgaactcaaactatgattttagagtaaccggtggcgttccgcaaaactccctatacctatagctaagaataaccagagaagccgagagaactttaacttaaacatgcattattatcaagtttgattagttcacctagtatctaaaccagagcccttctatgagcctacctgttctttcttaaatgcctaggctcatctatgatggatcaaatagcaagtacctatggtgggcatacttattatctaagaacaagttctagttagctactctagaactagcattaagaacaatcaagatgaagaatttctacagataacctagcaagggggcaatctactaaatcatctataaccctaatgagaaaccctaaacctaacagaaaaactactcaagcatgatgaatgaagtaaacaacatgattagaatagaaatcaatgaataaaacaagaagaaaatagagtaagaaagatccaaagggagtttccacagggttttgctccccaagtacaaaagagatagaaaatagcctctccaagcttcgggtctaaacattgacctaagaactatatatatatatgtcttaaaaacgtgatgggccttaattaaacataagagaaagttctggaccaaatttggaaatcttcaaaacatccataagttgcgtctcaaaattgccgtcaggtattggtgtcgctcgacatcaggggtggtgtcgttcgacacctacgtgcattttcgtctccggattgcttatgcagcttaagttttctgttgatctccagaatgctccataatctccaaatgcatcccaaacatgtaaagacctgaaaagaactagaaaaggctctagaaataacaattaggctccaaaacttatacctaaataatagctaaaatcggtaaaaatagggttatatcaactcccccaaacttagcttttgcttgccctcaagcaaaacactaaagccgaacccgtggaagaggtttgaaaacaaaggaactcccagcattctctagtgtattgccatgatcattctaacaaaatctatatgccgatcagttctaatcaaattctaaccaacatgtacttctctgcaagcttacacaacattctctattttatacctaagttccacaactatatccaccaggctttcatcactgggtctcatcaaacaagctaacattctagatccttctagactcattcatgtactataccatgatcaatcgaccattcttttatcatttttttctttggtgttctttctctccccgagacttattttgtttttcgagagtaaacaaaggggaactcgcatactggatccacaccctcggcatttttccaacctttgtaattgatcattccaaataatatataataatggggtcataggaaatattcctatccctagaaactatctgaaaatcatctcaatctctcattatattttttttctttttataagaggagatgaacatattctttttatcacattggtctcaatataaggtatgaacaaggagtcaagatctatgaatactaactgtttgaagaggtaaaaggaagagcagtgagattagctccagccttagtggttgaattggaaactaggatatcctcaagtctgttggtttgccatctagttttccaatagtcggattgagtcgaacctcatcattaatcaaccaagcaataatctaaagaatagagatcataattccaaacaaaattttgactcaataaaacgactcaaaaataagaaaaagaagagtaagaataagactcaaaaagaaaaacatagttagtaactgcctcccccagacttaaacgacactgtccccagtggtattcaaatccagagtaagcgaaaaaaataaaagaaaaacgaaaaataaaagaaaaagaaaaagaaaaccatatcagtgggttgcctcccactaagcgcttgtttagagtcaatagcttgactttgatggagtttggggatcaggtggatcagatggaggaaaaaaatacttcctagtagaaccccgcatcatctaaggtagcgtataggcagttggtgtgtgcgctctaccaaggaagtaaggaatgtcagcagagtaggacagaggtatgggtggtctactccactttcctgcacaatcatcaaaagaaagaacaagcactcgacgagaaactcgtggcttgcttaaccgtaaaacagtttttggagatttgaaactcttattgatgaaaccaggaggtttaggaggaggagatgagtacctttgccgtttcggagttgcagcaaagggtagaggtgcagtgggagacgtgactgtagtgcctggagtaccggctctgaactcaaaccgaaaactagctctaataaaaaaatcttgcttagcctgtgtggggtgttgatcgacacaggtaatggtatcgatcgacaccatctctgcacatcgattctcagcaacgaatctggagcttgcttcatgtggatgcttgctgttgctgagtacctgttctgagacaaccattatctttgtcttgtcatcttgcttctctggagcatcatctcgtagcatatcaatctgaagaaggggtgacaatttctctatatcaatcggaggcaactgaagtggagtctcttccatgatacccatgcaatgcatctttgaaatctcctgcttggactgtcgatgcagaagacaaggaacttgtggtgtgaagacttgtctagtaacaggtggagatgcaagacatataggaggagtttgagtccagtgtagatcgacactaggtgagtgtcgaatgacaccactgtctagaatcaagcctgctctgtcaaatgtcaacattgtattgtctgtttggtgctggtgtcgatcgacatgaggtgggtgtcgttcgacaccatcagggtcgactctggtcgatctggctttgtcacagcttggcttctctctggagaattgttggtgtcgatcgacgcagataatggtgtcgttcgacaccatcgggaataagttcctcctcctctgtgaaagtattgattccactcgacaaagtcaaaacagagtcgtcaagattaataggtgtcgatcgacaccctgatatatcgttcgacactgagacgtttcctgcaactggacgagatgaagtttgagctgaacattcgcgacgaaggattgggtttagttgctttccactgggtagtgtgactgcattgatagaggctgatggaggtgagagttcggatatatgagagcgtagattgtcaatcttgctatttagattcgtgtagagagaatcatgtttgctttcgagctttgtttggcctgcaagaagcagcgcaagcatagactccattctggtctctgatgagggtggaggggaagataggagcagaaattgctgaaacaggagtcgctttatttgcggtggctatctcagctgaaattcttcgttcagtgtcaaattcatgtgtcgaacgactagttaaagcattggtaatgaggagtaatgcttcactagtagttcttgtcatgaagttacagtagctcgctgcatcaagttgagcctggtatggcatggctatccctctttagaagatattgatgagttggctctcttggaaaccatgttggggacattctctctgataggatttgaatctgatccaagctgcattcaaaccttctgttggagcttgagaaaacgaagagatcttctcccgcagtaattatgtcaatgaatcatcaaggaagtggatcatgaatgcattcttcatgtcagtccaattcgttagtgaacctggttcaagttgttgcagccatgatgttcctctgcctgcgagagagtgtgggaaaagtttgcaaagaagataattagctggtacaccttctactttgattgaggacactaaatcttcgaagacttctagatgatctagtggtgattcatcagaatgtcctcgaaactttcctcgtgaaacaagagtataattaggcagggtgaatagcaaagtcttctcttgcaaaaggaggtagcaggatcgctgatcgattggagtagaaaagatcagctctgttgaagtcgcctatggtagcaggtctgtttgcagatggtgtcgatcgacacccagttggtgtcggtcgacactgtcgtcgaaatctgccagcagtttgttgcgttccatcttttagctcccctgttataggaaaaagaagaaagaaaatgcgtgagaaacaaaagaaagaaaaataaaagcttagtctaaattctacacctagtctaatggtgactcaaagagatcttcggcaacggcgccaaatttgatataggtcaaattaatcctaagaccactctctcaaataaagaggtcagttgcagcacttagggatcgaattcacaaagttctcggatcacgcaataaactaaggtttggaattaagaaaagtaaaacagtaatgaaaataaagagaaacaaaagtaaacaatagcaatcgatggttgtgaaacaagataataaaagcgtcaagcttagggtattctcaggaaatagatgatagtagatctagaaatatctaagttattatcaaaccgttctcgaactcaaactatgattttagagtaaccggtggcgttccgcgaaactctcgatgactatagttaagaataaccggagaagccaaaagatctttaacttaaacatgcattattatcaagtttgattagttcacctagtatctaaaccagagcccttctatgagcctacctgttctttcttaaatgcctaggctcatctatgatggatcaaatagcaagtacctatggtgggcatacttattatctaagaacaagttctagttagctactctaaaactagcattaagaacaatcaagatgaagaatttctacagataacctagcaagggggccatctactaaatcatctataaccctaatgagaaaccgtaaacctaacaggaaaactactcaagcatgatgaatgaagtaaacaacatgattagaatagaaatccctgaataaaacaagaagaggatagagtaagaaagatccaaagggagtttccacatggttttgctcccaaagtacaaaagagattgaaaatagactcaccaagcttcgggtctaaaacaatgacctaaaaactatatatatgtcttaaaaacgtgatgggtcttaattaaacataggagaaagttctgggccgaatttggaaatcttcaaaacatcaataagttgtgtctcaaaattgccgtcaggtattggtgtcgctcaaaatcaggggtggtgtcgttcgacacctacgtgcattttcgtctctgaattgcttctgcagcttaagttgtctgctgatctccagaatgctccataatctccaaatgcatcccaaacatgtaaagacctgaaaaggactagaaaacactctagaaataacaattaggctctaaaacctatacctaaatcatggctaaaatcggtaaaaatagggttatatcactacacccaattcactgaagaacgctttgtagtccgctttaagctcaaacttttctggaggcagtggatctgtgtttaaacccgtgatatgataaaactcgttcaagccaaaccggatgggttgaccagccacgagacaccaaagctccttcttcagtactcttaactgtctgcatagtagataatgtacagtcttacaaaccatacaaaatggctataaacaagtttagcaattaatccaagcggtgtctctttcagttcatcccatgtatcttgtcttattgattctctaatcatagggaaatctccaagcttgatgttgtgattaatggctttagcctccagattagaatccccctctgggtaaagtattggagggtaatcccttgcttggtcttcagccataaatcagtcgtaaggatacaatacactacaagaaaacaggtaaacgacgactacaatcagcgacaataaacgtagtcgtaacattatacgactagttggcgacggatttacgactcgcctgcgacaacacgaaaaattgtagtcacatagtcgttgttttacgactatcgtatgcagtcggcaaagtgtcggcaagtgacgactatttgacgattatattattggagggatattgttgtcgttgtttagtcgctaattaacgactattctaccgtctattttatttagtcgctaatatggcgactacaggccgaccaagtcgtctagtcgtcctgtagtcgtagaaacgtcgcaccgtagtcgtataaagtagatggaaaacatgttttgcattgttaagtaggtacacctaattatttagttgtagtcgtaaattagtcacaaaaattggcctatataataaacgttcacgcaactcttctttcaccaacaaatcaaaacaacaacaacatcaaaaagaaaaaaaaatactagttattttattgtataatggcgggaaactacaattatggcggtactggcggtttctatcgagattggatgtacaagagatttgatgaagtgacggggaatttgtcagccgaatacgttgcaggagttgagcaattcatgacattcgctaatagtcagccaatagtacagagtagtcgaggtaaatttcattgtccttgtagtgtatgcaagaatgaaaaacacatcatctcgggtagaagagttagtagtcatttgtttagtcatggatttatgcctgattattatgtttggtataagcatggagaagaaatgaatatggatataggaacgagttacacgaataggacgtattttagtgagaatcatgaagaagtgggtaatattgtagaagatccatatgtggatatggtaaacgatgcatttaattttaacgtggggtatgatgataactatcgtcatgatgatagttatcagaatgtggaagaaccggtccgtaaccattcaaataagttctacgacttgttagaaggtgcaaataatcctttgtacgatggttgtcgtgaagggcagtcgcaattatccttagcatctccactcatgcacaacaaggcggagtataatatgagtgaaaagttggtggactccgtttgcgaaatgtttacagattttttaccagaaggaaaccaggcaaccacttcacattaccagaccgagaagttaatgcgcaatttaggacttccatatcatacgattgatgtttgtcagaacaattgtatgctattttggaaagaagacgaaaaagaagatcaatgtcgattttgtggcgcgaaaagatggaagccttaggacgaccgtcgaagaaccaaagtaccatatagtcgtatgtggtatctacctattggggaccggttgaagagaatgtatcagagccataagacagcgatggcaatgcgatggcatgctgagcaccaatcaaaggagggagaaatgaatcatccttcagatgcagcagagtggagatatttccaagggttacatcccgagtttgccgaagaaccccgtaacgtttatctcgggttgtgtactgatgggttcaatccatttggcatgtctcgtaatcattcgttgtggcctgtgatcctaactccttataatttaccccctggtatgtgcatgaataccgagtacttatttcttaccattctgaattctggtccaaatcatcctcgagctagtcttgatgtcttcctccaacctcttattgaggagttaaaagagttgtggtctactggagtcgatgcgtacgatgtttcattgagtcagaattttaatctaaaagcagtactactgtggacgattagcgactttccggcgtatagcatgttatcaggatggactactcatggtaaattgtcttgtcctgtttgcatggaaagtacaaagtctttttatctacccaatggacggaagacatgctggtttgattgtcaacgtagatttcttcctcatggtcatccatcccgtaggaacagaaaagactttctgaaaggaagagatgcttctagcgaatcgtctcaagggaacaacttcgcgagattcagacgctccagcaaacagccacccgtcgtctcaagggaacaacttccaagaggaagttcctgggacgttgccggagctacaagaagactcggcgttggctctgcaatcgacactctctgtgccaaaccgggagcagtggtgttgtgtcttgtctccaattcccaaacctaaaaccgaatggtatgttttcttcctctattttattctagtgttcttagcctgtgtagtgtaactcgtgttatggtctgtagaatggcttgttagggtttgtgtaacatagtagaatctgcctttgttggagttggatgtttgttagggtttgtgtaacatagtagaatctgcctttgttctaaactcgtgtgtgatcttgttaagttcttcaatttgtctataatcttgttaggttatttattgtgttctgtggtgaatcatgaacataattgtggaacatttgttgattgttgaacttagcatgttttcggctttgacattgaggatctgtctttgttctatacttgtctataatcttgttaagttctttattgtgttctattgtgaatcatgaacttaattgtggaacatttgttgattgttgaacttagcatgttttcggctttgacaatgaggatctgtctttgttctatacttgtttatacttgttcattactgtctatgatcttgttatgttgactattgtgttctgtgtgtgatcttgtcggcttatacttgtctagaatcttgtaaaatctgcctttgttcaattatatagtctgctgtagttgtagtgttttggattttaaacatgtttactttctgtctgtgttgcatgtgtttggaggtttactcgcgacagaggatctaaattggttagaaagatcacacggatttttactcaaaagttcaatgctccctactataattggtcctgtgtgccattggataaaagagaaagattgtttttagagtttgcggtaagcttcttgtatttcttcaactttcattagactgtactatttaatctgtcatttgttcactaacttcacactttttttgtagaaaactcaccattgggatcctttaataacagggacagtccaatactacttcaatgagatcgttaagaggcgcttgaaggacatggttagcaccgcaaggagaactcgagagcagcctccatggattggagaaactctgtggagaaccatgtgcgactactaggacactgaagaggcacagaaaaggagtaagacatattccaaagctcgtctctctgaccgtaacggtctcggtcctcacgtccactactctgggccaaagtctttccaagaaatccaagatgaattggtaagtgtttctgcaatcttcccatgtgttttagtgatgtttgtttaactgtgtgtgatgtttagtctgttgatagtaatgaagcttgtgatctgtgtttgcaggaagaaaaaatgggaagacctgtccctcttggtgaggtgttcatccagacacacactaagtcggatgggacttatgttgatcagaaggcatagaagattggtctggcgtatgagcagaatgtgagagagaagctgtctgaactagaggcggatgcttctgctgtgtctgatggctcttcacgtcctcgggatctcacactagatgagtatgcagccatatttctcgaggtaagatgttctttgtctttttcagagtcttagagacatttaggatctgtcactaattatcttcctctttatttcttgcagtccacagaaaaggatgcaagaggcaatccttatggacttggctgtcttaaagaaactctaggcagtgccaaccgccaactccccggagactcaacctttaaagccttagaagaacggctgcaggaagctcagcggcaaattgaagaacaggctgcatataacgagaagcgagatgctgagattgctgcccgagaagccgagacagcccgagtcacagctgagcaaaaggacaagctcgagcacttgtccttagtcgagaagtatctccgccaaaccgatccgcagttcttggactttattgccacacactcttccacatccacagagcgtatcccaattactcccccatctaatgatccatagaatttaggtttccaaacactaattgtatctttcaataagttgtatgtttgaacaagataattttatgttttgaacttgattttcaatatataagcagtgttttcatattgtatagcgtatcaataacaaacaagaacaatcgatgaacaaacaagaacaaacaagaaacccatcacctgatgaccaaatctttattcggaccaaactattagtcgcaaaaaagtagtaaataagtagcagtatagtcgctgaatcgtcgtcaagtagtcacataactttacgacaatcataagactaaacaaattagtcataaaagaatcgtaaaactgacgtccaatagtcgtatatacttatacgactatgttatgacaaaaagtttcaaatccttggcaagtacttttaatcgtcaaagagtcgtcgaatagtcgtaaacatatttacgactactttacgacaactggaaacatacccagggtttataataattaatcgcaacatagtcgtaaagtcgtcgtaaacaattaacgactatgaaacgactacatgttctcacacgctcagtacagtacaaataatcgtaggatagtcgtcaattaatcgccgacataatacgactacgtaacgacgatttttcactgtttagtcaattgtcgtattattgtcgttgatcaacgactaataaacgactactgtttttagcgactatggattaatgactacagtcattagtcgtaaattagtcgtattagctttagttacgactactaaacgactgacttgtaggtcgtcaatcacctgttttcttgtagtgataactcagtcataacataaaccaaactcagccacagataacataacttagtcaaaacataaacctaactcagccatagataacataacttagtcacaatataaacctaactcagccacagataacataactcagccataacataaacctaactcagccatatcgtaatagaaactcagtcaaaacataaacaaaaccataaaataaaaaaatctcagtcaaaacataaaccaaactcagccatagcataaccaaactcatccatatcgtaacagaaactcagccataacataaacaaattcatccatatcgtaacagaaactcagccacggatttaagattaaaccataactcaatcacagcatataacaaactaagacacagatgaattgataaatcataaatcagtcggcaaacaaacggtaactcagccatcaaatcaaatagatctaacaaatcggcaccatatgtcaatcaacaacgacgttaaaaaccatcgttaagcatcggaaacaatttcagtgacgagaatcacttgcgattgaacttagatgtcggattcttgtcggaaaattcgaaataaagttaggaaacatacttaccggaacttagccagaaaccagaaatgcaactccagatgtcagatgtgacttcccgaaaccagtaatgcaactgcggcataagaatttcggtcggaacagacgagaacagcaaaaacggcgacgaaaatagggtaaagggtttgttcccgtggagagagaaagaaagcgacagtttttttccgctgatgaacagtaatgctcaaaaaaaaaaactgaaacgtttatgcgatttgagatgagtaataacgtggattatgttaatgatatggattgatgacatgtataatcagtgtttttttatttaatattaagttaaaaacgaattaaataataatatttaattaaaactaatgaaggatttaactgtaattacataagtactgaaaacatgtgagtaataaaaaaagatgtatgttattgtaggaagaaacatacagttgttttttatctgagtaattttttctttttatttctcttacttaatttaaacatatttaaatttcaaaaaaataaatcaaacagtgttaatacttaatagttctatttacataatcaactactttgttgaaatgcatatactatatattttatattatttacatttttcaattgaaaacatacaatgcattaaatgtataaatctttgtataaaaagctttcttgtttaaaattttgaaatatttaattttgacaagtttagttaattaaaataaatgtatataaaaactaaagtgtttggaaataagagcatctccatcaggtagatattcttgccagtttctaaaaaataaaatattattattttaattatattatatattttagttaaattgtaatatttaagctaataccctattgacatgtggtgattttgttagagaaaggtttctcttagtttctcaagtgagagactcttctttccatctctcctactttttcatttttaattattattttattattaagtttctcaatgaaaaacgatgatggagatggtctaaggatgagaatagagaatatggttcgttatgaactcatctaaagagaaaaaaatcctattgaaggttttgacaaacaaatttgtcaaaaaatgtagacggaggtccgtcggaaatttttcgacgcagttccatcaaaactttccgaggaacccaatggtcggaaaaaatcagaaatttttcaacaagtttttaataaaatttgcatagaaatagtgaaacaaaactgagaaaattgtttgaaatttttaactattttccaacaaaatcatggaaggcctagagaataataaacagagttatgaatgaaaccaagaaacacaagcaacgattactaataagtaacttagggaaaagctgaaaatatgtagcttaaacgatagagtggacacataagaggctgccagaaaagcttcaagatctcatgacgcataagagacgatttcagaggtgataagatccataagtcaagaagaaccatttcttacgatgtaagattgataacgacgaccaccgctatattgtgaactctgcgatttccgtcctcatgtacatagtccatcctccactcctaaaaggtttctcatacctataaattccttcgacaacttgatgagctggtaaaagaaagataactttggagttataggttgctcaaactctcaactgcctaaaaaaaaacattaactttgactcaacgcgtaatacgatggaacaccaacgatccgtctaggtaacgtaccagccataaatccccacaccacagctcctctgttgattgatccatgagaaaaccaacattgcatttaaggaagcttgatggaagatatctccacttggaggttgaagactgaagatatataatgataagatcgatttcttcttatcgggcttctattgggcttattggataatacctcaaactaatctaattaggcctgcttatgaattgagtttgtaattaagttgttcttctacttctggaaacgctatcgattaagaacctaaagaatgtttatctccttcatctcctttcttttcccttttcttctctaattcttcttttctcaatcttattcttctgttttttcatcaccttctgttactcaacttgataagtgatatttgaccttatcaattggtgctttatattgggagttgaaatcatggctactcaagctgctcaaaccattccagccaccatagtcatagatctagaagcaaaactggatcaattcgttcaaaatttcgaagataagctagattccatcgtccaaaggctccaagcacaacaaaaggagcatcgacaagggatgcgtgaaatttttgctaactttttcccggagacagcatgtgacgaaccacctacgatgaagaaccaagagcatcatgagctccatcaagttatcaccacaagatctgaagccaccccaacaaaaacctagacatctctcttgagaattttgtcgaacacttggtgggcactgaattcccagaagcttttcttaatctttgggtcttagagcttccaacgacgtatcattctcgcaggaaaagaagaatccatattacacaagctcgcaggagaggatgtattcatgttaatcgaagctatcataaggtcaggaagaagatcacacggaagaaacgtcacgagatcgtacctacaacaccaatcaacaaacactcaacgaaaagacatggtaaaggacctcgttcctttctcttgactctagaactcgattccatcaattattctacgagcatattcaagatgatgctagcagagataaacatataggattttcgtctgattatgagggatcacagtctcacgaattgagtggtggtgctaatattagaaggaattcacggaaacttaaccaagtccgagacaacaaggagggttacattcgatcaatgaaacaaagtggtaagcaacatgaatctcttgttttaaatgtggggctaaaggctaattctaaagagattacactctatcacaatgttgatgatttgatgatgccggagagaaatggtagagtgggaaatgggtcattggattggaccaattctgccaaggcatgggaacttcagacttggaacagaatggttgggatagatagtcatggggatagatcatgagcgcaagtggtgccaaggtctcagagtaaaggtgttgatttggggagagtattctgttttggttttcagagaacaaatcctcaaatggctatgaaagtggcacgagatactaatagtgctaggcaagcagaatgacaaattttggaatcatctcatggagttattcaagagacacaatcacaaggtgcgaatggaggaagactatgaatagatccactaacaggaggatatcacaagcaagtaaacaagccaatgtgcctaggaatctgtcaagagagaaccgcgaaagaatacagggacatgtttgaaactctttgcctgaatcctgtgatcttaccagggcaacagttggaggagttatttctacaagggttgaggcctgagttgcaagctgcagttaggcatttccagcctaatgggattgtaaacatgatggatttagcacaatagctagaagaaattaacaacaatgtcgccccaagaacagaaccatacggtgaccaagcgacacaagtagagctaatgagctttattatggtggaaggtaatacatatggatatgggaatgagtgggaaggtttattagaggattttaagaccataagacaagttaaaaggcaatcaacgacagaatttaccaagggcaaggatatgagattctatggcttcatatcatgtcataaggtcgttgtagttatcgattctggagcgaccaacaattttatctcagatgagttagctttagttctcaaactacccacgagcactacaaaccaagcttcagttttattgggacaaaggcagtgcatacaaaccataggaacttgttttgggatcaatttgttagttcaagaagtagaaatcaatgagaatttccttttattagatctgaccaagactgacgtggatgtgattctagggtatggtggctctcaaaacttggagagacaatggttaatttggctgaatcaagatttctccttcttccacaaccaacaatgggtcactctttgtgctaaggacaaagaacttgagcaagttactacaaaagtaaagatgaagagtgaatatgagcaagaaaaaattgatcattaccttgaagacaaggtagttttaaaaggggggagtaaggctatgtggggaggaattgctaaggatataccatggaaacagaaaatgagtggtgaaagtcttgctaaggaaatactatggaaacagaaaataagcggtgaaagtcgaaagaatttttcagagattatgttgaaagtgtcaaggctcaagagtgctcaaaccattggaaactatggcggattagaggcgcaacagggtagtctaggagtgatgcccatgggttacaagggtgttggagagaagcaagaggagtttccattgaggcttatatttatcgggaaagcgggtcaatcgccacggccaccagaattgttttgtggtaaagtgttgggacaagagggaagtctttttcaaaaacacaaaggagagaaaggtggtcacctaaacttatggttaatgacgaatggagggaagtcttggttagaggctggaatttgtttaaaactgcagaacggagtctttgagtgttgtaagatatcatagttgttcatctcaaagtggtcttcatcatcaagaaacacggtggcaggggaaggaccagctaaagagagcaggtggaagcagttggagatcgttcataggagctttggtgaaatcttctttgtcaagattggttatgttcgtacctgcaactttgaatctataacaaatgatggggtacaaagaaacaagatattgatcgaggagtttcaataccttcgacgatgaggacatagtttcaataccttcgacgatgaggacatagtcaatctcaacaggaaggtattgaatgatcgatttcttcttattgagcttctattgagtttattggataaatgctcaaactaatctaatttggcgtgcttatgaattgagtttgtatttaaattgttcttctacttttagaaccactatcgattaagaattctccttcatctcctttcttcttcctttttactcaacttgatttctgaccttatcatataactgcttcatgatcaggaatctttgttttatttgtttcaagctatctaatattttattcacggcaaaagaaaatgaagtaaaatatataaaaaagtaaaaagcatttttattgataaggtgaatatacatttgtgaatgatatattgatagtaaaaacatagtccctcatgaaaaatatttagccacaggaaatgttcttacctactccatttcttatattataattttttgttttcaatttcttaaactacatagaagaaatttattcatctacatttcccaatttcatttaatggctccatactctctctttacgcaatcccggcgattaatctcctcttaagttccatcctgcaataaccaataccaacattagtaaaccaaatccaaaatctattaactaaactatatggttaaagaactaatcaagggtgttaactacctcatgagttgacggtcatgagctccggtggccatcattccccggttctcataagcgcgtcggagaagatacggtatagcggttgcgacgggtccaaacggcatgtacttgctaacattgaaccctgctctctttaacccgaaggacaatgcatctgacataccatatagctgtgcaaactctatcttcccgttctgtttatcgatcccgaggtcactcgctttcctcgacgcaagtctccctgagattaaaacatttctacaattagtaaaccatttcactctaactaaagcgctaaaaaaaccgcggttacaatgtgatttaatggcttacccgaatcagcgttatgtgttgcgagaacgacaccgaaaccagaaccgtttgatgctttctccatcaggaatgtcatacaatcattgtaacaagagtgagtatcctgaattgtgtcgtggactggcgacttgcaacccagggaatccgccaagctagcttcgctagacatgtaagcccctctcaccaacttgaaccccataggaacattctctttctcagcattttgtactgccaaatgcagtctctcaccggcgtctctcaagtacgcctgaatcgtgttgtaaacgattggtcggtctttgtcagcattgaacatgatcgccgatgaataagccatgtaatcgatcgcgggttggaggattgtgtcttccgcatcaatcaacaatggtacattggactcttggcatttcctacagatttcttgaatccttccatgagctgcttcgagctccctttcttcttccgcggttaacggttccggttctgagtttgtgtggtagagaggactcgattcggagaaaaccggaaacgatttgagcttccatgagagtttgaagttcggacttttgtattcccaccgcagcagatcgctcactcgtttcagaagactaattggacaaatggcagttatcttcacaaccactgagctaaactgttaggacaagaaaacaaataaccggtcattacaaaaccaaaccggaacaatccgtgtcgcacaacaataaaccggtattttagtaaccggagaatattcctaaagtgttttctcccgaaagttctagtccacctatactcgtacgtgtaaatctaatccgataatgacgcattgcaattaattttaatcacagcaaaaatcgaattttaaaaagcaaataaattcattaggaaaaaaaactaaataaattaaacataaagtcattttcataagagaaacattagggaaacacaactttggtacgtacttgtataacgcgtaagagtaatttaaccaatttaaaatgaaaatagatagatataataaatgtagtacatatctatgcaagtgtactttgtcagagtacggagatttagctgtcgaaccaaacaagttgtctgaatttgataattacgtttcccattaacaaataattacgttttaagacaaaatgattagggattaatgtaaaataatcagaaaaaacagagcaaagaagaaaaacagaggaattaggcttacgtgagatgttggtaaagatttggcagcttcaatggttcgaatgaattgttgcatgttatcatcacaagatacagcgtcatcggcgtgttcgacgccatagacaagcatccctttaagaccagtagcttcataaacgcttctcacgcgctcagcggctgcgtcggcatcttcaccggcgcaaaaatggtcataaaacgtacttttcacaagccctaaaaccatgccacgcgtcaccgaagcgtccataagtttagagctcatgacccacgtccctaggtcgaccataggacctatcgccgccgcatgcaacacggcggtggaacggaggagatcagaggttgggatagaggagaaaagacgggcttgatcggagagatcgagaccatcgtgagattgctcggtgggttttgggtggtgaagaggtggttccggtgcttgttgtccaaaggagagaatctccgggacgacggcggtggaagcagtcacggtgggaggacccaccgggctaaaagcgggtaaacggtaagatc
